United States Patent Application Publication US 2018/0126003 A1 - sequence listing, part 136

SEQ ID NO: 237937 - DNA, 4281 bp, Artificial Sequence
  derived and/or modified sequence
atgcaccaaagacacccccgggcaagatgccccccactgtgtgtcgcaggaattcttgcatgcgggtttctcctgggatgttgggggccaagtcactttcaacagtcgtgtctccaggcactggagcctcaagcagtgtcgtcctacctctcacctggagcccctcttaagggccgcccaccaagccctggatttcaaagacagagacaacggcaaagaagagcagcaggaggtattcttcacctggagctgcttgtggcagtgggtccggatgtgttccaggcacaccaagaagataccgaacgctacgtactgactaacctcaatataggagcagaattgcttcgggatccttcgctgggtgcacagtttagagtgcaccttgtcaagatggtcattcttacggaaccagagggcgccccaaacattaccgcgaatttgacctcatcccttctttcggtgtgtggatggagccaaactattaaccctgaggatgataccgatccaggtcatgcggatcttgtgctttacattaccagatttgatcttgaactgcctgatggcaaccggcaagtgcggggcgtgactcagctggggggcgcatgttcgcccacctggtcatgcctgatcacggaagataccgggtttgacttgggtgtgaccatcgcccatgaaatcggccattccttcggcttggagcatgatggagcgcctggatccgggtgtggaccttcgggacatgtgatggcatccgatggggcagcacctcgtgccgggctggcatggtccccatgttccaggcggcagctgctttctcttctgtccgcaggcagggcaaggtgcgtgtgggatccgccccgtcctcaacctggaagcgccggacatcctcctgatgcccaacctggactctactactcggcaaacgaacagtgcagagtcgcgttcggcccgaaggcagtggcatgtacctttgcacgggagcatctggatatgtgccaagccctgtcctgtcatactgaccctctggaccagtcatcatgctcgcgcctgctcgtcccgttgctggacgggactgaatgcggagtcgaaaaatggtgttcaaagggccgatgtaggtccctggttgaactcacgccaatcgcagcggtgcatgggcgttggtccagttggggtccaagatcaccctgttcgagatcctgcggtggtggtgttgtgactcgtagacgtcagtgcaacaaccctcgaccagcattcggcgggagggcatgcgtcggagcagatcttcaggcagaaatgtgcaacacgcaagcatgtgaaaagacccagctcgagtttatgtcacagcagtgcgctagaactgacgggcagccattgagatcgagtcccggtggagcatccttttatcattggggggcagcagtgccccattcgcagggagatgcactttgcagacatatgtgtcgggctatcggagagtcgttcattatgaagcggggtgacagctttctggacggtactagatgtatgccgtcaggaccaagagaagatggtactctctcactttgtgtgtcggggtcgtgcaggacttttggttgcgacggtagaatggatagccaacaggtttgggaccggtgccaagtgtgtggaggtgataactccacctgttcgccacggaagggttcattcaccgcagggagggcacgtgagtacgtcacttttctcaccgtgacccctaatcttaccagcgtgtacatcgcgaatcacagaccgctttttacccacctggcagtccggatcggaggtcgctatgtggtcgctggcaaaatgtccatatcacctaacaccacgtacccttcactgctcgaagatggacgagtcgagtacagagtggcccttacggaagataggctgccccggctggaagaaataagaatctggggtccacttcaagaggatgcggacattcaggtgtacaggagatacggagaagagtacggaaacctgacccgacccgatatcaccttcacctacttccaaccaaagcccaggcaagcatgggtctgggcagccgtgagaggtccctgctcagtctcctgcggtgccgggcttcggtgggtgaactacagctgcctcgaccaggcccgcaaggaacttgtggaaaccgtccaatgtcaaggctcgcagcagccgcccgcatggccggaagcatgcgtcttggaaccgtgtcctccttactgggcagtgggcgatttcggaccatgtagcgcctcgtgtggcggcggactgagagagcgccctgtgcgctgtgtggaggcacaggggtcgcttttgaaaacgctgcccccagcacgatgtcgcgctggtgctcaacagccagcagtcgctctcgaaacttgcaatccccaaccatgcccggcccggtgggaagtgtcggagccatcctcgtgcacctccgcagggggcgcaggtctggcacttgagaacgaaacgtgtgtgcctggtgctgatggtcttgaagcaccagtcaccgaaggcccaggatccgtcgatgaaaaactccctgcacctgagccttgtgtcgggatgtcatgcccaccgggatggggacatctcgacgcgacttcggccggagagaaggcaccaagcccttggggatcgattcgtaccggagctcaagcagcacatgtctggaccccagcagcaggatcatgttcagtctcctgtggaagagggctcatggaacttcgtttcctgtgcatggactccgcactccgcgttcctgtgcaggaagaattgtgcggcctggcctcaaagcctgggtcacggagagaggtgtgtcaggccgtgccttgccctgctcgatggcaatacaagctggcggcgtgctccgtgtcatgtggacgcggcgtggtccggagaatcctctactgcgccagagcacacggagaagatgatggagaagaaatactgcttgacacccaatgtcagggacttccccgtccggaaccacaagaggcctgttccctggaaccttgtccaccacggtggaaagtgatgtcgcttgggccatgttcggcaagctgcggtttggggaccgcccgacggtcggtcgcctgcgtgcagcttgatcagggccaggacgtggaagtggatgaagcggcgtgtgcagcccttgttaggcccgaagcatccgtgccatgtctcatcgcagattgtacttacagatggcacgtcggcacttggatggaatgctctgtgtcatgtggcgatggaatccagcgtagacgggatacttgcctcggaccacaggcccaagcaccggtgcctgccgatttttgccaacacctgccgaagccagtcactgtgcgtggttgctgggcaggaccatgtgtcggtcagggtactccgtcccttgtgccacatgaggaagctgcagcacctggcagaaccactgcgaccccagccggggccagccttgaatggtcacaagcaagaggtctgctgttttccccagccccacagccaagacgcctgctgcccggacctcaagaaaactcggtgcagtcctccgcatgtgggagacaacacctcgagccaaccgggaccatcgatatgcgcggcccaggacaagcagactgcgcagtggcaattggacgaccactgggagaagtggtgacgcttcgggtgcttgaatcgtcgctcaattgctccgcaggcgatatgcttcttctttggggacggcttacttggcgcaagatgtgccgtaagctgcttgacatgaccttcagcagcaagactaataccctcgtcgtcagacaaagatgcggacgcccaggtggaggcgtcttgcttaggtatgggtcgcaactcgcccctgagacgttttacagagagtgtgatatgcaacttttcggaccttggggtgaaatcgtttccccatcgctcagcccagccacttccaacgcgggaggatgtcgcttgttcatcaatgtcgcccctcacgcgcgcattgcaattcacgcacttgcaaccaatatgggagcaggcactgaaggtgcaaacgcaagctacattctgatacgtgatacgcatagcctccgaactactgcattccacggccaacaagtgctttactgggagtcggaatcgtcccaggcggagatggaattctccgagggcttccttaaggcgcaagccagccttcgcggccagtactggaccctgcagagctgggtgcctgaaatgcaagatccgcaatcgtggaagggtaaggaaggaacc

SEQ ID NO: 237938 - DNA, 4281 bp, Artificial Sequence
  derived and/or modified sequence
atgcatcaacggcatccacgggctcgttgtcctcctctttgcgtggccggaatcctcgcatgtggttttctcctgggatgttggggtccctcgcattttcaacagtcctgcctgcaagcacttgaacctcaggcagtctcttcatacctttcgcctggagcgccacttaagggacgaccgcctagcccgggttttcaacgtcaacggcaaaggcagagacgagcagctggtggtattcttcatttggaactgcttgtggcagtcggacctgatgtgtttcaggcacaccaagaagatacggaacgttacgtgttgaccaaccttaacataggcgcagagcttctgcgtgacccgtcacttggtgcccaattccgagtgcaccttgtcaagatggtgatcctgactgagcctgaaggcgcacccaacatcactgcgaacctgacgtcatccctcctttcggtgtgtggatggtcacaaactattaacccggaagatgatactgatcctggtcatgcagatcttgtgttgtacattaccagattcgacctggagctccctgacggaaaccggcaagttcggggtgtcactcaactggggggtgcctgctcaccaacctggtcatgtctgattacggaggacaccggatttgatctgggggtgaccatcgcacatgagattggccacagctttggtcttgaacatgacggagcaccagggtccggatgtggaccttcaggccacgtgatggcaagcgacggggcggccccacgcgcaggcctggcatggtcgccatgttccagacggcaactgttgtcgctgctgagcgccggtcgggcacgctgtgtttgggatccacccagacctcaacctggatcggcgggacatccaccagatgcccaaccaggactttactactctgccaatgaacagtgtagagtggctttcggcccaaaggcagtggcctgtactttcgcaagggagcatctggatatgtgtcaagccctgtcgtgccatactgatccacttgatcaatcctcttgttcacgtcttttggtgcctcttctcgacggtaccgaatgcggtgtggagaaatggtgttccaagggacggtgccgctcgctggtggaactgaccccaatagcagcggtccatggaagatggtcgtcgtggggtcctcgctcgccctgtagccgatcgtgtggtggtggcgtagtgaccagacgcaggcagtgcaataacccacgtcccgcttttggtggacgagcgtgcgtgggggctgacttgcaggcagagatgtgtaacactcaggcttgcgaaaaaacccaacttgagtttatgtcccaacaatgtgcacgtaccgatggccaaccccttcggtcatcccctggtggcgcatctttttaccactggggtgcagccgtcccacactcgcaaggggatgctctgtgtcgccatatgtgccgtgcaattggtgaaagtttcataatgaaacggggcgattcattcctggatggaactcgctgtatgcctagcggaccaagagaggacggaaccctttcgctttgtgtgtccgggtcctgtcggactttcggatgcgacggacggatggattcgcagcaagtctgggaccgctgtcaggtgtgtggaggcgataacagcacttgtagccctcggaaaggatccttcacggctgggcgcgcgagagaatacgtcaccttccttaccgtgacgccgaacctgacctcggtctacatagcaaatcacagacccctgttcacccatttggctgtaagaatcgggggaaggtacgtcgtggcgggaaagatgagcattagcccaaatactacctacccatcgcttcttgaagatggtagagtggaataccgagtcgcgcttaccgaggacagactgcctagacttgaagagattaggatttggggtcctctccaggaggacgcggatattcaagtgtaccgaaggtacggagaagaatacggtaacttgaccagaccggatattacctttacctactttcaaccaaagccaagacaggcttgggtctgggcagccgtgcgcggtccatgctcggtgtcctgtggtgccggtctgagatgggtgaactattcctgtctggatcaggcgcgcaaggaactggtcgaaaccgtgcagtgtcaaggatcccagcaaccacctgcatggcccgaggcgtgcgttctggaaccgtgccctccatattgggccgtgggagactttggtccctgtagcgcatcatgtggcggaggacttagagagaggcctgtgaggtgcgtggaagcacagggttcacttcttaagactcttccacccgcaaggtgcagagcaggggcccagcagccagcagtggccttggaaacttgtaatccccagccttgtccggctcggtgggaagtctccgaaccttcatcctgtacgtccgcagggggagcgggccttgcgctggagaacgaaacctgtgtcccaggggcagatggtctggaggcaccagtgaccgaaggacctggttccgtggatgaaaagctgccagcaccagagccatgtgtgggaatgtcatgtcctcctggttggggccatctggatgcaacctcagcgggtgaaaaggcaccttcgccttgggggtccatcagaactggtgcccaagccgcacatgtctggacccccgcagcgggttcatgttcagtgtcctgcggccgaggactcatggaattgagattcctttgtatggactcagcactgagggtgccggtgcaagaggagctgtgcggactcgcgagcaaaccaggatcgaggcgggaagtgtgtcaggcggtgccctgtccggctcgatggcaatacaagctggcagcatgtagtgtgtcgtgtgggagaggggtcgttaggagaatcctgtattgtgcccgcgcacacggggaagatgacggagaagagatactgttggatactcaatgccaaggtctgcctcgcccggaacctcaggaggcttgttcattggaaccttgtccgccccgatggaaagtgatgtccctcggaccatgctccgcgtcatgcggactcggtactgccaggcggtcggtggcatgcgtgcaactcgaccagggtcaggacgtcgaagtggatgaagcagcgtgcgccgcacttgtgaggcctgaggcctcggtgccttgcctcatagcagattgtacttatagatggcatgtcggcacttggatggaatgttccgtgtcctgtggagacggcattcagaggcggcgggatacttgtttgggccctcaagcccaagcaccagtgcctgcagatttctgtcagcatcttcctaaacctgtcacggtcagaggatgttgggcaggaccatgcgtcggtcaaggaaccccatcgcttgtcccgcatgaagaggcggcagcacccggacgtaccactgcaacccctgcaggagcttcccttgaatggtcccaagcaagaggcctgcttttttctcccgcaccacagcctcgcagacttctgcctggtcctcaagagaattcggtgcaatcctccgcatgtggacggcagcatcttgaaccaactggaacgatagatatgagagggcctggacaggccgactgtgcagtggcaattggacgcccacttggggaagtcgtgacgctgcgggtgctggaatcatcactgaattgttctgcaggagatatgctcctgctttggggccggctcacttggcgaaaaatgtgtagaaagctgctggatatgactttctccagcaaaaccaatacccttgttgtgagacagcgatgtgggcgaccaggcggaggagtgcttttgaggtacgggtcccaactggcacccgaaaccttttaccgggaatgcgatatgcagctgttcgggccttggggagaaatcgtctcgccctccctgtcacccgctactagcaacgcgggaggttgtagactgttcattaacgttgcccctcatgcacgtatagctatccacgccttggctactaatatgggagcaggcactgaaggtgcaaacgcatcttacatcttgattagagacacccattcactgaggactaccgcctttcacggtcaacaggtcctttactgggagagcgagagctcacaggcggaaatggaattctccgagggatttcttaaagcccaggcctcgctccgaggtcagtactggactttgcagtcgtgggtgcctgagatgcaagacccccaaagctggaaaggcaaagagggcact

SEQ ID NO: 237939 - DNA, 4281 bp, Artificial Sequence
  derived and/or modified sequence
atgcatcaacggcacccacgggccaggtgtccaccgctgtgtgtggccgggatcctcgcctgtgggttcctcctggggtgctggggtcctagtcattttcaacaatcctgcctgcaagccctcgagccacaagccgtgtcaagttacctctctcctggtgcacctctaaagggtcggcctccgtctcccggtttccagcgccaaaggcagcggcagcgccgagctgcgggagggatcttgcatctggagctgcttgtcgccgttggacccgacgtctttcaggcacaccaggaagacaccgagcggtacgtcttaaccaacctgaatatcggggctgagctgttgcgagacccttcactcggggctcaatttagagtccatttggtaaaaatggttatcttgacggagcctgaaggcgcacccaacataactgccaacctgaccagctcactgcttagcgtgtgtggatggtcccagacaataaacccagaggacgatactgatcccggtcatgcggatttggtgctgtacattacccggttcgatttggaattgcccgatggtaatcggcaggttcggggcgttacccagctgggaggcgcttgttcacctacctggtcctgcttgataactgaagacacgggtttcgacttaggcgttaccatcgcgcacgagattggacactcctttgggctcgagcacgatggcgcacccggtagcggctgcggaccctctggccacgtgatggccagcgacggggccgctccccgggccggactcgcgtggagcccatgttctcgacgacaactactttccctgttgtcggccgggagggccagatgcgtctgggatccgccccgccctcagcccggaagtgccgggcatccaccagacgctcagcctggtttgtactatagcgccaatgaacagtgcagggtcgcctttgggcctaaggctgtggcatgtaccttcgccagagaacacctggacatgtgtcaggccctctcatgccataccgaccccttagaccaaagctcctgcagccgacttctcgtgccgctgctagacggaaccgagtgcggcgtggaaaaatggtgctccaagggaagatgccgcagcctcgttgagctaactcctattgcggcagtccatggcaggtggtcttcctggggtcctcggagcccctgttctagatcgtgcggaggcggagtggtgacacggagacgacagtgcaacaatcccagacccgctttcgggggcagggcctgcgttggggctgacctgcaggccgaaatgtgtaacacccaggcatgcgagaaaactcagttagagtttatgtctcagcaatgtgccagaaccgacgggcagccactgcgaagctcaccaggcggcgcttctttttaccactggggcgctgcagttcctcattcccagggggacgcattgtgtaggcacatgtgcagagcaatcggagaaagcttcattatgaagaggggtgatagtttcctggacggcactcgctgcatgcctagcggtccgcgcgaagacggcacgctgagtttgtgcgtttcagggagctgccgtactttcggctgcgatgggcgaatggactcacagcaggtgtgggaccggtgccaggtgtgtggaggagataactctacatgttcacccaggaaaggatcatttacggcagggcgggcccgagagtatgtgacatttttaaccgtgacgccaaacttaacttcagtgtacatcgctaaccatcggccgctgttcacacaccttgccgttcgaatcggaggcagatacgtggtggcaggaaaaatgagtatctctcccaatacaacataccccagccttctcgaagatgggagggtcgaataccgggtggctcttactgaagaccgtctcccccgcctcgaagaaatcagaatttggggcccccttcaagaggacgccgacatccaggtctacaggcggtacggcgaggaatatggcaacctgacaagaccagacatcaccttcacctacttccagcccaagccacgccaggcctgggtgtgggcagccgtgcgcggcccctgtagtgtctcttgcggagcgggccttaggtgggtgaattactcttgcctggatcaggcgagaaaggagctggtggagacggttcagtgccagggatcacagcagcccccagcgtggccggaggcctgtgtgctggaaccttgcccgccgtactgggctgtcggcgattttgggccctgcagcgcaagctgcggcggcggcctaagggaacgtcctgtccgctgcgtggaggctcagggatctttgcttaagacactgcctccagcaagatgccgcgctggagctcagcagcccgcagtggcactagagacgtgcaatcctcaaccatgccctgcacggtgggaggtgtctgagcctagcagttgcacatctgcaggaggcgccggcctcgcactggagaacgagacttgcgtccctggtgcagacggcctggaggcccccgtaaccgagggccctggaagtgtcgatgagaagctcccagctcctgagccatgcgtcggaatgtcgtgcccacccggctggggacacctggatgccacttccgcgggagaaaaagccccgtctccctggggctccataaggacaggcgcacaggccgcacacgtgtggacccctgccgcaggatcttgttctgtgtcttgcggccggggcctgatggagctccgcttcctgtgtatggattctgcactcagagtccccgtccaggaagagctctgcgggctggcttcaaagcccgggagtagacgggaagtctgccaagctgtgccgtgccccgctcgatggcagtacaaactggccgcctgttctgtgagttgcggtcgtggcgtggtacggcgcattctgtactgcgctagagctcacggcgaagacgacggggaagaaatcctacttgacacccagtgccagggactgcccagaccagaaccccaagaggcatgttcactcgaaccttgcccgccgagatggaaagtgatgtccttgggcccctgttccgcttcttgtgggctaggaaccgctagacgctctgttgcctgcgtgcagctcgaccagggacaggacgtagaggttgatgaagcggcatgtgcagccctggtcaggcctgaggcctcagttccttgcctcatcgccgactgtacatatcggtggcacgtgggcacctggatggagtgcagcgtttcctgcggagacggtatccagaggcgccgagacacgtgcctggggccccaagctcaagctccagtgccagccgacttttgtcagcacctgcccaagcccgttaccgtcagaggatgttgggcagggccttgcgtcggacagggtacgccctccctggtccctcacgaagaggctgccgcgcctggcaggaccactgcaacccctgccggcgcctcactggagtggtcccaggcccgcggactacttttcagcccagccccacagccccggcgcctgctgccagggccccaggagaattctgtgcagagctcagcatgtggccggcagcatctcgagccaactggcaccatcgacatgcggggacctggccaggccgactgcgccgtagccattgggcgaccattgggggaggtagtaactctcagagttctggagagctcccttaactgctccgccggcgatatgctgctactgtgggggaggctcacctggagaaagatgtgtcggaagctgctggatatgactttttcctctaagacaaacaccttagtggtgagacagaggtgcggtaggcctggcggaggagttcttctgaggtatggctcccagctggcccccgaaactttctacagagagtgtgacatgcagcttttcggaccatggggtgagatagtcagcccttcactgagcccagccacaagtaatgccgggggatgtcgcctattcattaacgtcgccccccatgcgcgcatcgccatacacgcactggctacaaacatgggggctgggactgaaggcgctaatgcctcatacatccttatccgggatacacattcgctgagaacaaccgcctttcacggccagcaagtcctgtattgggagtccgagagctcacaagccgagatggaatttagcgagggctttttgaaggcacaggcatccttaagagggcaatactggacattacagagttgggtgcccgaaatgcaggatccacagagctggaaaggaaaggaaggtact

SEQ ID NO: 237940 - DNA, 4281 bp, Artificial Sequence
  derived and/or modified sequence
atgcatcaaaggcacccccgcgcacgctgccctccgctttgtgttgcaggcatcctggcgtgtggtttcctgcttggatgctggggcccgtcccattttcagcaaagttgtttgcaagcacttgaaccacaggctgtgtctagctacctttcccctggggcacccctgaagggccggcctccatcgccaggttttcagagacaacgccagagacagcgtagggcggcagggggaatacttcatcttgaacttctggtggctgtgggtcccgatgtgttccaagcccatcaagaggataccgaacgctacgttctcactaacctgaacataggagcggaacttctgcgggatccatcactcggtgcacaattccgagtgcatctcgtgaaaatggtcattctgaccgaaccagaaggagctccgaacataactgcaaaccttacctcatcgctgcttagcgtctgcggttggtcgcaaactataaacccggaagatgataccgaccccggccacgctgatttggtgctctacatcactcgcttcgacctggagttgcccgatggaaaccgtcaggtgcgcggcgtgacccaattgggaggggcctgttcgcctacctggtcatgtcttattacggaagataccggatttgatctgggagtgaccatagcacacgagatcggacattcgtttgggctcgagcatgatggtgcaccaggttcgggatgtggacctagcggacatgtgatggcctcagatggagcagcacccagagcagggctggcctggagtccctgtagccgtaggcaactcttgtccctccttagcgcaggccgagcccggtgtgtgtgggaccctccaaggccgcaacccggaagcgcagggcacccaccagacgcacaaccaggcctttactattcagcgaacgagcagtgtcgagtggcctttggccccaaggcagtggcatgtacgtttgcaagggaacatcttgacatgtgtcaagcgctcagctgccataccgaccctctggaccagtcctcatgttcgcgacttcttgtgcctcttctggatggcaccgagtgtggtgtcgagaaatggtgttcaaagggacggtgccgatcgctcgtggagctcactcccattgccgcagtgcacggccgatggtcatcgtgggggcccagatcgccgtgttccaggtcctgtggaggtggcgtggtgacccggcggcgccaatgcaataatcctcggccagcatttggaggccgcgcctgtgtgggagccgacctgcaagccgagatgtgtaacactcaggcatgtgaaaagactcagttggagtttatgagccaacagtgtgcgagaacggacggacagcccctgcgttcgtccccaggtggagcatccttttaccattggggagcagccgtgccccattcacagggtgatgcactttgtcgtcatatgtgtcgcgcgattggggagagcttcattatgaagcgcggcgattcgttccttgacggcacccggtgtatgccatcaggacctcgagaagatggcactctctcgctgtgcgtgtcgggctcatgtcgtacgtttggatgtgatggccggatggacagccaacaggtgtgggatcgttgccaagtctgtggcggggataactccacgtgttctcctcgaaagggttcatttactgccggacgggcacgagaatacgtcacctttcttaccgtgacgcccaatcttactagcgtgtatatcgcaaatcaccgtcccctgtttactcatctggcggtgagaattggcggaagatacgtggtggcgggtaagatgtccatttcgccgaatactacctacccatcgcttcttgaggatggaagggtggaatacagagtggcgttgactgaggatagactgcctcgcctcgaagagatacgaatctggggtcctcttcaagaagatgcggatatccaggtgtacagaagatacggtgaggagtacggtaacctcactagacccgacattaccttcacgtacttccagcctaagcctaggcaggcatgggtctgggcagcagtgagaggaccatgttcagtgtcttgtggtgccggtttgagatgggtgaattactcatgtcttgatcaggcacggaaggaactggtggaaactgtgcaatgtcaggggagtcaacagcctcctgcgtggccagaagcctgcgtgctcgaaccatgccctccgtactgggcggtgggtgactttggaccttgctccgcctcgtgtggagggggtctgcgcgaaagacccgtgcgctgtgtggaagcacagggcagcctgcttaagacgctcccccctgctcgatgtcgagcgggcgcgcagcagccggcagtggcactggaaacctgtaacccgcaaccgtgtccggcacgttgggaagtttcggaaccatcgtcgtgcacttctgcagggggagcaggactggctctggaaaatgagacttgcgtgccaggtgcagacggacttgaagcaccagtcacggaaggacctggatctgtcgacgagaagttgcccgcacccgaaccttgcgtcggaatgtcctgccctcccgggtggggccatttggatgctacgtccgcgggagagaaggcacctagcccctggggttcgatacgcaccggtgcacaagcggcacacgtgtggactcccgcagcgggatcctgctccgtgtcgtgtggccgtggtctgatggaacttagatttctgtgtatggactcggcgctgcgggtcccagtccaagaagagctgtgtgggctcgcatcaaagccaggtagccgtcgggaggtgtgtcaggcagtgccatgtccagcgaggtggcagtacaagctggccgcatgtagcgtttcatgtggtcggggtgtggtgagaaggatcctgtactgcgcgagagcccatggggaagatgatggggaggaaatccttctggatacccaatgccagggacttcctagaccagagcctcaggaagcatgctctcttgagccatgtcctccaagatggaaggtgatgtcgctgggaccatgttcggcaagctgtggattgggtacggcgcggcggtcggtcgcgtgcgtgcagctggatcagggtcaggatgtggaggtggatgaagcggcatgtgcggctctggtaagacctgaagcatctgtgccttgtctgattgcagactgtacttaccgatggcacgtcgggacgtggatggaatgttcggtgtcctgcggggatggaatccagaggcggcgagacacctgccttggcccgcaggcacaagcaccagtcccagcagatttttgccaacatctgcccaagcctgtgacggtgagaggttgttgggcggggccatgtgtcggacaagggactccatcccttgtgcctcacgaagaggctgccgcacccggtaggactactgcaacccctgctggggcctcgctggagtggtcccaagctcgcgggcttctcttttctccagcccctcagcctcgccgcctgctgccgggcccacaagaaaactcagtccaatcaagcgcatgcggacgccagcacctcgagcccactgggaccatcgacatgagaggcccaggacaagcagactgtgcagtggcgattggacggccccttggggaggtcgtcactctccgggtgcttgaaagctcgcttaactgtagcgccggggatatgctgctgctctggggaaggctcacctggagaaagatgtgccgcaaactgctggacatgacgtttagctcaaagaccaacactctcgtcgtgcggcagcgatgcggacgacctggtggaggtgtgctccttagatacgggagccaactggcacctgaaaccttttacagggaatgcgatatgcagctcttcggtccatggggagaaattgtctccccttcgctctcaccggccacctcgaatgccgggggatgcaggctcttcataaacgtggcacctcacgcaaggattgcaattcatgccctcgccactaatatgggcgcaggtaccgaaggagcaaacgcatcgtacatcctgattagggacacccattcccttagaaccaccgcatttcacggacagcaagtgctttactgggaatcggaatcctcgcaggcagaaatggaattttcagagggatttcttaaagcacaggcctcgcttcggggacaatactggaccctgcaatcatgggtccctgaaatgcaagatccacagtcctggaagggtaaggaagggacc

SEQ ID NO: 237941 - DNA, 4281 bp, Artificial Sequence
  derived and/or modified sequence
atgcaccagcgtcacccaagagcacgctgtccacccctgtgcgtggcaggtatacttgcgtgcggattcctgctgggatgctggggcccttcacatttccaacagagctgcctgcaggcgcttgaaccgcaggcagtgtcgagctatctgagccctggtgctccccttaagggacgaccacctagcccaggcttccagcggcaaagacaacgccaacgaagggcagctggaggaatccttcaccttgaactgctggtggcagtgggaccagacgtgtttcaggcgcatcaagaagataccgagagatacgtgttgactaatctgaatatcggagcggaactgctccgcgaccctagcctcggagcacaatttagggtgcatctcgtcaaaatggtcattttgacggagccggaaggggcgccgaacattactgccaacttgacgtcctctctgctttcggtctgcggttggagccagacgattaacccggaggatgataccgaccccggacatgccgatctggtgctgtacatcacccgtttcgatctggaactgccagatggaaatcggcaggtcaggggcgtgacccaattgggcggcgcctgttcgcccacttggtcgtgtctgattacggaagataccggatttgatttgggagtaacgatcgcccatgagattggtcattcgtttggactggaacacgacggggcacctggttcgggctgtgggccatcaggacacgtgatggcaagtgacggggcggccccgcgagcgggtcttgcctggtccccatgtagccgacgtcagctgttgtccctgctctccgcaggaagagctaggtgcgtgtgggacccaccgcggcctcaaccaggttccgcgggacatcctcctgacgcccagcctggactgtactactcggccaacgaacaatgtagagttgcctttggacctaaggctgtcgcatgtacgtttgcacgagagcacctcgacatgtgtcaagctctgtcgtgtcacaccgatcccctggaccaaagctcatgctcgcgtttgctggtgccactgctcgacggaactgagtgtggagtggaaaagtggtgttctaagggcagatgcaggtcattggtggagctcacgcccatcgctgcagtgcatggccgctggtcctcgtggggacctcgcagcccgtgctccagatcgtgtgggggtggtgtggtgaccaggcggcggcagtgcaacaatccaaggcctgcattcggaggacgcgcctgcgtcggggctgatctgcaagcggagatgtgtaacacccaggcgtgtgaaaaaactcagcttgaattcatgtcgcagcagtgcgcacgaaccgacgggcaacccctccgatcgtcgccaggaggagcgtcgttttaccactggggagcagccgtgcctcatagccaaggagatgcgctgtgtagacacatgtgcagagcaataggagagtcgttcataatgaagaggggagatagcttcctggacggtactagatgtatgccttcgggcccacgcgaggatggtactctctcgctctgcgtctcgggatcatgccggacttttggatgtgacggccgcatggactcgcaacaggtgtgggatagatgccaggtctgcggtggagacaactcgacctgttcacctcggaagggtagctttacggcaggtcgtgcccgcgagtacgtcacctttcttacggtgacccctaatcttacttcagtgtacattgctaaccatcggccacttttcactcatcttgcagtgagaattggtggaaggtacgtggtggcaggaaaaatgtcgatttcgcctaacaccacttacccttccctccttgaggacggacgagtggagtacagggtcgcgctgacggaagatcgcctgccaaggcttgaagaaatcaggatttggggaccacttcaagaagatgcagacatccaagtgtaccggcgctacggtgaagaatacggaaaccttactcgccctgatataacgttcacctactttcaacctaagccacggcaggcgtgggtgtgggcagccgtgcgtggaccgtgtagcgtgtcatgcggcgcaggacttcgctgggtcaactacagctgtctcgatcaggccaggaaggagctggtggaaaccgtgcaatgtcaggggtcccagcaacctccagcatggccggaagcctgtgtgctggaaccttgtcctccttactgggcagtgggagattttggtccttgctccgcatcgtgtggtggcggtcttagggaaagacctgtcagatgtgtggaagcacaaggttcgctgcttaagaccctcccccctgctcgctgccgggcaggagcccagcagccggccgtcgcccttgagacttgtaaccctcaaccatgtccggcccgatgggaagtctccgagccatcgtcctgtacctcggccggaggtgcagggctggccctcgaaaacgagacttgtgtcccaggtgccgatggcctggaagcgccagtgactgaagggccaggctcggtggatgaaaagttgccagcacccgaaccatgtgttggtatgtcttgtcctcccgggtggggtcatcttgatgctacttcggccggggagaaggcaccttccccctggggatcaatccggactggtgcacaagctgcccatgtttggactccggcagccggttcatgttccgtctcgtgcgggagaggactgatggaacttagattcctttgtatggactccgccctgcgggtgccagtccaggaagaactttgtggtcttgcctcgaaaccagggtcgagacgggaagtctgtcaagcagtgccctgcccagcacgctggcagtacaaacttgcagcttgttccgtgtcctgcggaaggggtgtcgtgagacggattctttactgtgcacgggctcatggtgaagatgatggcgaagaaatactgctggacactcaatgccagggacttcctagaccagagcctcaagaagcatgttccctggagccctgccctcctagatggaaggttatgagcctcggcccttgcagcgcatcctgtggcctcggaaccgcaagaagatccgtggcatgcgtgcagttggaccagggccaagacgtcgaagttgatgaggcagcatgtgcagcgcttgtcagaccagaggcatctgtgccatgtctgattgcagattgcacctatcgctggcatgtgggcacctggatggaatgctccgtcagctgcggagatggaatacagcggagacgagacacttgccttggtccacaggcccaggcccccgtgccagccgatttttgtcagcacctgcccaagccggtgaccgtgcggggttgctgggcaggtccttgtgtcggtcaaggaaccccatcactggtcccgcacgaagaggcagcggcaccaggtcggaccaccgccaccccagcaggagcatcactggaatggtcccaagcccgaggcctgttgttctcacccgcaccccaaccaagacgactcctccctggaccacaagagaactcggtgcagtccagcgcatgtggacggcagcatttggaacctacgggaacgattgacatgaggggtccaggacaagccgattgtgctgtggcaatcggtcgtccacttggtgaagtggtgactctccgggtgctggaatcatcactcaactgcagcgcgggtgatatgctgcttctgtggggcaggttgacttggagaaagatgtgtagaaagctgctggatatgaccttttcatccaaaactaatactctggttgtgcggcaaaggtgtggaaggccgggaggcggagtcctcctgagatacggaagccaactcgcacctgagactttttacagggaatgtgatatgcaactgttcggtccctggggagaaatcgtgtcaccatccctgtcgcctgccacttcgaatgccggcggttgcaggctctttatcaacgtggcaccacatgctagaattgctattcatgcactggcaactaacatgggcgcagggactgagggagcgaacgcgtcatacattctgatacgggacactcattccctccgcactactgcatttcatgggcaacaagtgctttactgggaaagcgaatcgtcgcaggcagaaatggagttttccgaaggattccttaaggcacaggcctccctgcgcggtcagtactggaccctgcaaagctgggtgccagaaatgcaagatcctcagtcatggaaaggtaaggagggcact

SEQ ID NO: 237942 - DNA, 4281 bp, Artificial Sequence
  derived and/or modified sequence
atgcaccaaagacatccgagggctcggtgtccgccgctctgcgtggccgggatcctggcctgcggattcctgctgggatgctggggaccctcgcatttccaacaaagctgcttgcaggccctggagccacaggccgtgtcgtcgtaccttagcccgggggccccactcaagggtcggccgccctcgcccggatttcagcgccagcggcagaggcagcgccgggcggcgggcggaatcttgcaccttgagctgctggtggccgtcggtcctgacgtgttccaggcgcaccaagaagatactgaaagatatgtcctgaccaacctgaacatcggagcggaactgctcagagatccgtccctgggggcgcagtttagagtccacctcgtgaagatggtgatcctgactgaaccggaaggagccccgaacatcactgcgaatctgacctcatcattgctttccgtctgtggatggagccaaaccatcaacccggaagatgacactgacccgggccacgccgacctggtgctgtatatcacccgatttgacctggagctccctgatgggaatagacaggtgagaggggtcactcagctcggaggggcctgttcaccaacctggtcctgtctcatcacggaggacacgggtttcgacctcggcgtgactatcgcccacgagatcggacactccttcggactggagcacgacggagcgccgggaagcggctgcggcccgtctggccacgtgatggcgtccgacggcgcagcacctagagccggactcgcatggagcccgtgcagccgacgccagctgctgtcactcctcagcgctgggagagcgaggtgcgtgtgggaccctccgaggccacagccgggttcggctggacatccccccgatgctcagccgggactgtactactcggcaaacgagcagtgccgcgtggccttcggcccgaaggcggttgcatgcactttcgcccgggaacacctcgacatgtgccaggccctctcctgccacacggatccgctcgaccagtcgtcctgttcgcgcttgctcgtgccgctgttggacggtaccgaatgcggcgtggagaaatggtgcagcaagggacgctgccgttcactcgtcgagcttaccccgattgccgcggtccacggcaggtggagctcgtggggaccacggtcgccatgctcccgctcatgtggcggaggagtcgtcacccggaggcggcaatgtaacaaccctcgaccggcgttcggtggccgcgcgtgtgtgggagctgatctgcaggctgaaatgtgcaacactcaggcttgcgagaaaacccaactggaattcatgtcacaacagtgcgcacgcaccgatggtcaaccgctgcggtctagccctggtggagcctctttctaccattggggcgccgccgtgccacactcccagggagacgccctgtgtcgccatatgtgccgcgcgattggagaatcctttatcatgaagcggggtgacagcttcctcgatggaacccggtgcatgccgtcggggccacgcgaggacggaaccctgagcctctgcgtgtccggaagctgccggaccttcgggtgcgatggcagaatggattcgcaacaggtctgggaccgctgtcaggtgtgtggaggcgataactctacttgctcaccacgcaagggatcatttactgccggtcgcgcccgcgagtacgtgacttttctgaccgtcactcctaacctgacctccgtctacattgcgaaccaccggccacttttcactcatctcgcagtgcggataggtggtcgctatgtggtggctggaaaaatgtcgatcagcccgaatactacttacccgtcgcttctggaagatggccgcgtcgaatacagagtcgccctcactgaagatagactcccgcggctcgaggagatccgcatctggggacctctccaggaggacgcagatatccaagtgtaccggagatacggagaagagtacggaaatctgaccagaccagatatcaccttcacttacttccaaccaaaacccagacaagcatgggtatgggccgctgtgcgcgggccttgctccgtgtcgtgcggcgccggcctcagatgggtgaattactcctgcctggatcaagcgagaaaggaactggttgaaacggtgcagtgccaaggatcgcagcaaccgccggcatggccggaggcctgcgtgctggaaccatgcccgccgtactgggcggtcggagacttcggaccgtgctccgcgtcatgtggaggggggctgcgggaacgcccagtgcgctgcgtggaagcccaggggagtctcctcaagactctgcctccagctagatgtagggccggggcccaacaaccggctgtagccctcgaaacttgcaacccccagccttgcccggctcggtgggaggttagcgagccctccagctgcacctccgccggtggcgccggactggctctggagaacgaaacttgtgtgcccggcgcggacgggctggaagcacctgtgacggaaggccccggatcggtggatgagaaactgccggccccagagccgtgcgtcggtatgtcatgccctccagggtgggggcaccttgacgcaacctcagcgggcgaaaaagcgccgtcgccgtggggttcgatcagaaccggcgcccaagccgcgcatgtgtggacccccgccgcgggctcctgcagcgtgtcctgcggaaggggacttatggagttgagattcttgtgcatggactcggccctgcgggtgccggtccaggaagaattgtgtggactggcatcgaagcccggatcgcggagagaagtctgccaggcagtgccgtgccctgcccgctggcaatacaagctcgcagcctgctcggtgagctgcggcaggggagttgtgcgtaggattctttactgcgcgagagcacatggcgaggacgatggagaagagatcctgctcgatacccagtgtcaggggttgcctaggcctgaaccccaggaggcgtgttcactggagccttgtccgcctcggtggaaggtgatgtccctcggaccatgctccgcatcgtgcggactgggaactgccagacggtccgtggcttgtgtccaacttgaccaaggacaggatgtggaagtcgatgaggcggcttgcgcagccctggtccgccccgaggcgagcgtcccgtgtctcatcgctgactgcacctaccgctggcacgtgggcacttggatggaatgttcagtttcctgcggggacggcatccagcgccgccgagacacctgccttggaccacaggctcaagcgccagtgccagcagacttttgccagcacctgcctaagccggtgaccgtgagggggtgctgggcaggcccgtgcgtgggacagggcaccccatccctggtgccccacgaggaggccgccgccccaggccgcactaccgccactcctgctggagcctccctggaatggtcccaggcacgcggactgctcttctcgccggcacctcaaccgcggaggttgctgccaggtccccaagaaaattcagtccagtcgtctgcttgtggacggcagcatctggaaccgactggcactattgacatgcgggggccaggacaagccgactgcgcggtggctattggacggccattgggagaagtcgtgaccctgcgcgtcttggagtccagcctgaactgtagcgccggagacatgctccttctgtggggacgactgacctggcggaagatgtgccgaaagctcctggacatgaccttctcatcaaagacgaacacgctggtggtgcggcagcggtgcggccgcccaggaggtggagtgctcctgcgctacggctcacagctggcgcctgaaaccttctaccgtgaatgcgatatgcagttgtttgggccttggggcgaaattgtgtccccgtcgctgagcccagccacctcgaatgcaggaggatgccggcttttcatcaatgtcgccccacatgcacgcatcgcaatccacgccctggcgactaacatgggtgcaggaaccgaaggtgctaatgcctcgtacatcctgatccgcgacacgcatagcttgcggactactgcatttcatggacaacaggttctctactgggagtcagagtcctcgcaggctgagatggaattcagcgagggcttcctgaaggcccaagctagtctgcgcggacagtactggaccctgcagtcatgggtgccggaaatgcaggacccacagtcctggaagggaaaagaaggaacg

SEQ ID NO: 237943 - DNA, 4281 bp, Artificial Sequence
  derived and/or modified sequence
atgcaccagcgccacccccgggcccgctgcccaccgctgtgcgtggccgggattctcgcctgcggatttctgcttggctgttggggcccgtcacacttccagcagtcgtgcctccaagcactcgaaccccaagcagtgagctcctacctttctccaggcgcccctctgaaaggaaggccgccaagccccggtttccagcggcagagacagagacaacgacgcgccgctggcgggatcctgcaccttgaactgctggttgcagtgggccctgacgttttccaagcgcaccaagaagatactgagcggtacgtcctgaccaatctgaatattggcgcagaactgttgcgcgacccgtccctgggtgcgcagttccgggtccatcttgtcaagatggtcatcctgaccgaacctgagggagcccctaatatcacggcaaacctcaccagctcgttgctgtccgtgtgcggttggagccagactatcaacccggaggatgataccgatccgggccacgcagatctggtgctgtacatcacccgcttcgatctcgagctccctgacggaaaccgccaggtgcgcggggtgacccagttgggtggcgcctgctcgccgacttggtcgtgtctgattaccgaagatactggcttcgacctcggagtgaccatcgcgcatgagatcgggcactcgttcggactcgagcacgatggagctccgggaagcggatgcggtccgtcgggacacgtgatggctagcgatggagcagctccacgtgctggactggcttggtccccgtgttcaagacggcaactgctgagcctgctctcggccggaagagctaggtgcgtgtgggacccgccgcggcctcagcctggttcggcgggacatccgccggacgcccagcccgggttgtactactccgctaacgagcagtgcagggtggcattcggtccgaaggcggtcgcctgcaccttcgccagggagcatctggacatgtgtcaggcgttgtcctgccacacggatccactcgaccagagctcatgttcaaggttgctcgtccctcttctggatgggactgaatgcggcgtggaaaaatggtgtagcaagggccgctgccggtcgctggtggaactgactcccatcgccgcagttcatggacgttggtcatcgtggggaccaagatcgccttgctcaaggtcatgcggaggcggggtcgtgactcgcaggcgacagtgcaacaatccgcgtccggctttcggaggacgcgcctgcgtgggggcagatctgcaggcagaaatgtgcaacactcaagcctgcgaaaaaactcaactcgagtttatgtcccagcagtgcgcccggactgacggccaacccctgaggtccagcccaggcggagcatcattctaccactggggtgccgcggtcccgcatagccagggagatgcgctttgtcgccatatgtgcagagcgatcggtgagagctttatcatgaaacgcggtgactccttcctcgatggaacccgctgtatgccgtccggcccacgcgaggacgggaccctgtcgctctgcgtgtccggttcctgcagaactttcggctgcgacggacgcatggatagccaacaagtgtgggacaggtgtcaggtgtgtggtggagataatagcacgtgctcaccgagaaaggggtcgttcactgctgggagagcccgggaatacgtgaccttcctcactgtcactccaaacctcacttcggtgtacattgcgaaccaccgcccacttttcactcatcttgcagtcaggattggaggaaggtacgtcgtcgccggcaaaatgtccatctcccccaatacgacctacccgagcctgctggaagatggacgggtggaatatagggtggcccttaccgaggacaggctcccaagactggaggagatcaggatctggggaccactccaggaggacgcagacatccaggtgtaccggcggtatggggaggagtacggtaacctcacccggcctgacattacctttacctactttcaaccaaagccgcgccaggcctgggtgtgggccgccgttcgtggaccatgcagcgtctcgtgcggcgccggtctgcggtgggttaactacagctgcctggaccaggcgcgcaaagagctggtcgagactgtccaatgccaaggctcgcaacaacctccggcctggcccgaggcctgcgtgctcgagccttgtcctccttattgggctgtaggggatttcggcccttgtagcgcaagctgcggtggaggactgcgggaacgcccagtaagatgcgtggaggcgcaaggatcactgctcaaaactctgccgccggcacggtgccgggcaggggcacaacagccggccgtggccctggaaacctgcaatccgcaaccttgtcctgcacgctgggaagtgtcagagccgtcatcctgcacctcagctggaggggcgggcctcgcactcgaaaacgaaacctgcgttccgggagccgacggactggaagccccagtgactgaagggcctgggtcggtggatgaaaagctgccagccccagagccgtgcgttggaatgtcatgtccgcccgggtggggacatctggatgcgaccagtgcgggcgagaaagccccttccccttggggatccatccgaaccggagcacaagccgctcatgtgtggacgcctgccgcgggctcttgctcagtgtcgtgcggacgcggtcttatggaactccggtttctctgcatggactcggcacttcgcgtcccggtgcaggaggagctctgtggattggcaagcaagccaggatcacgacgtgaggtgtgccaggcggtgccttgtccggcccgctggcaatacaaactggcagcgtgctcggtgagctgcggtcgcggggtggtccggaggatcttgtactgcgcaagagcacatggagaagatgatggagaagaaatcttgctggacacccagtgtcaaggtctgccacggccagagccacaagaagcctgctcattggagccgtgcccgccacggtggaaagtgatgagtctcggcccgtgctcagcttcatgtggactgggcactgcgcgccgctccgtggcgtgcgtgcagctggaccagggccaggatgtggaagtggacgaagccgcatgcgccgccctggtccgcccagaggcatctgtcccgtgcctgatcgctgattgtacttacagatggcacgtcggcacctggatggagtgctcggtgtcctgcggcgacgggatccagcgccgtcgcgatacttgtttgggaccgcaggcacaggctccggtcccagccgacttttgccagcatttgcccaaaccagtgaccgttagaggctgctgggcgggaccgtgtgtcggccagggaaccccgagcctggtcccgcacgaggaagcagccgcgccgggaagaaccactgccactcccgcaggagccagccttgagtggtcgcaggctagaggacttctgttctccccagcacctcagccgcgcagactgcttcctggaccgcaggaaaatagcgtgcagtcgtccgcctgcggccgccagcatctggaaccgactggtactatcgatatgagagggcccggacaagcggattgtgcggtggctatcggacgccctctcggggaggtggtgactttgagagtgctcgagagctccctgaactgctcggccggagacatgcttctcttgtggggtaggcttacttggaggaagatgtgccgcaagctcttggacatgaccttctcgtcgaaaaccaatactctggtggtgaggcaaaggtgcgggcgccccggcggaggagtcctgctgcgctacggatcccaactggctccggaaactttttacagggaatgcgatatgcagctgttcggaccttggggagaaattgtgtcgccaagtctgtcgcctgccacctcaaacgcggggggatgtcggctcttcattaacgttgctccacatgccagaatcgctatccacgccctggcgactaatatgggggctggaaccgaaggagccaacgcctcatacatcctgatcagagacacgcatagcctcagaaccactgcatttcatggacagcaggtcctgtactgggagtccgaatcgagccaggctgagatggagttctcggaaggatttctgaaggcgcaagcatctctccgcggccagtattggaccctgcaatcatgggtcccagagatgcaggacccacaatcctggaagggtaaggagggtacc

SEQ ID NO: 237944 - DNA, 4281 bp, Artificial Sequence
  derived and/or modified sequence
atgcaccagaggcatcccagggcccgctgccctccactctgcgtcgccgggattctggcgtgcgggttcctcctgggctgttgggggccgagtcacttccagcagtcttgcctccaggctctggagccacaggccgtctcatcatacctgtctccaggcgctccattgaagggacggcctccaagtcctggctttcagcgccagcggcagcgccagagacgggccgctggggggatactccacctggagctgctggttgccgttggtcctgatgtgtttcaggctcatcaggaggacacagaacgatatgttctcacaaatctgaatattggggcagagcttctgcgggacccttccctcggcgcacagtttcgggtccacctagttaaaatggttatattgaccgaacctgagggcgcgccgaatatcacggctaatctaacgtcttcgctactgtctgtgtgcggatggtcccaaacgataaaccccgaggacgatactgacccaggtcacgctgacttagtgctgtacatcactcgctttgatctcgagctcccagacggcaataggcaggtacggggtgtcactcagctgggcggggcctgctcacccacttggagctgtttgataactgaggacaccggatttgacctaggggtgacgatcgcacatgagatcggtcactcctttgggctagaacatgacggcgcccccgggtctgggtgcggtcctagtgggcatgtcatggcttccgacggagccgcccctagagccggactggcatggtcaccttgttcccgtcgacagctcctgagtcttctgtccgccggccgggcgcgctgcgtgtgggacccccccaggccacagcccggctccgccggtcacccccctgatgcccagccaggcctatactactccgctaacgaacagtgtcgagtcgccttcggtccaaaagcggtggcctgtaccttcgcaagagagcatctggacatgtgccaggcattgtcttgtcataccgatcccttggaccagtccagttgctcgcgacttttggtgccacttctggacggcacagaatgcggcgttgagaagtggtgctccaagggtcgctgccgctcacttgtggagttgacaccaatcgcggctgtgcacggccggtggagctcctggggaccacgctctccatgctctagatcttgtggggggggtgtggtgacacgccggaggcagtgtaacaaccccagaccagccttcggagggagggcttgtgtgggagctgacctgcaggctgaaatgtgtaacacgcaagcgtgtgagaaaacccagctggagtttatgagtcagcagtgcgcccgcactgatgggcaaccattgaggtcttcgccgggcggcgcctctttctaccactggggcgctgcagtgccccactctcagggcgacgctctatgcagacacatgtgccgtgctattggggagagttttatcatgaagcgaggtgattcctttctcgacggaacaaggtgcatgccctctgggccgcgcgaagacgggactctctccctgtgtgtgagtgggagctgtagaaccttcggttgcgatggtcggatggacagccagcaagtatgggaccgatgtcaggtctgcggcggggataactcaacctgttcccccagaaagggcagttttactgccggtcgggccagagagtatgttactttcttgactgtcacaccaaatctcacgtccgtgtacatcgcaaatcatcgccctctattcacacacctggccgtacggatcggtggccggtatgttgtggccggcaagatgtccatctctccgaataccacctatccttcactgctggaggatgggcgggtggaatatcgtgtggcgttgacagaagaccggctccctcgtctggaggaaatccgcatttggggaccactgcaggaagatgctgacatacaggtgtacaggaggtacggggaggaatacggtaacttgaccagacctgacataaccttcacctattttcagccgaagccgcggcaggcctgggtctgggccgccgtgagggggccctgcagtgtgtcctgtggggcaggtttacgttgggtgaattactcctgcctcgatcaggcccggaaagaactggtggagactgtccaatgccagggctcccagcagcctcctgcatggccagaggcatgtgtcctggaaccatgccctccttattgggcagttggcgactttgggccctgttccgctagttgtggaggagggctaagagaaagacctgtcaggtgcgtggaggcccagggatctctgcttaagaccttgcccccagctcgatgccgggcaggggcccagcagcctgcagtcgcattggagacgtgcaacccacagccttgtcctgctaggtgggaagtcagtgaaccatcatcctgcacctcagccgggggcgccggtttggctctggagaatgagacttgtgttcctggcgctgatggactggaagccccagttacagaggggcccgggtcagtggatgaaaaactgcctgcacccgagccatgcgtggggatgagctgcccccccggatggggacacctggacgcaacgagcgcgggagaaaaagctccaagtccctggggatctatcaggacaggtgcccaggcagcccatgtctggacccctgctgccggttcatgtagcgtaagttgtggtaggggcctgatggagctgcgattcctgtgcatggattcagcgctgcgtgtgccagtgcaggaagaactgtgcgggctcgcctccaagccaggttcccgccgcgaggtgtgtcaggctgtgccatgtcccgcccgctggcagtacaagctggccgcttgctccgtctcctgcggcagaggagtggtgcgccgcatcctgtattgcgcgcgcgcccatggtgaggacgacggggaggagatcctgctggacactcagtgccagggtctgcctagacctgaaccccaggaagcatgcagcctggagccttgcccacctagatggaaggtcatgtctctcggcccatgttccgcaagctgtggtcttggaaccgccaggaggagcgtggcctgtgtgcagctcgaccagggacaagatgtggaggtcgacgaggctgcctgtgccgccctcgttcgacctgaggcctccgtcccatgcctgatagcagactgtacatacaggtggcacgtggggacttggatggagtgttcagtgtcttgcggcgatggtatccaaagaaggcgcgatacctgcctgggacctcaggcacaggctcccgtgcctgctgatttctgtcagcatctgccaaaacctgtaacagttcgaggatgctgggccggcccatgtgtgggccagggcacaccgagtctggtcccacatgaagaggctgccgcacccggtagaaccactgccactcccgctggggccagcctcgagtggtctcaagcccggggactgctatttagtcccgccccccagccgcggcggcttcttccaggacctcaggaaaactcagtgcagagtagtgcctgcggccgccagcaccttgaaccaactggcacgatagacatgcgtggtcctgggcaggcagattgcgcagtggccatcggtcggccactgggtgaggtggttacactccgggtcctcgaatccagccttaactgctctgcaggcgacatgctgctcttgtggggcagactcacctggcgtaagatgtgtcgcaaactgttggacatgacctttagttccaagaccaacacgctagtggtgcggcagcgctgcggccgccccggcggcggagtgctgctgcggtatgggagccagctggctccggagaccttttacagagaatgtgatatgcagttatttggcccatggggggaaatagtgtccccttccctgtcaccagccacatccaacgcaggaggctgtaggctcttcattaatgtggccccccatgcccggattgccatccacgctctcgcaacaaacatgggggcggggacagaaggcgcaaacgcttcctatattctgattcgcgatacacattctctgcgtacaacggccttccacggccagcaagtactttactgggagtccgaaagtagccaggccgaaatggaattcagcgagggttttcttaaggcccaggcatccttgagagggcagtactggacactccaatcatgggtgcctgaaatgcaggatcctcagtcttggaaaggtaaggaggggact

SEQ ID NO: 237945 - DNA, 4281 bp, Artificial Sequence
  derived and/or modified sequence
atgcaccagcgccaccctcgggcacgatgccccccgctgtgtgtggctggaatcttggcttgcggcttcctcctgggctgttggggtccttcccattttcagcagtcttgcctccaggccctggaacctcaggctgtgagctcctatctgtcgcctggagctccacttaaagggcggcccccttcaccaggcttccaacgccaacggcaacgccagcgcagggctgcgggcgggatcttgcacttggaactgcttgtggctgtcggccccgacgtattccaagcacaccaagaggacacggagaggtatgtcctcactaatctgaatatcggggctgaactgctgagagatccatctctcggtgctcagttccgtgtgcacctggtcaagatggttattctgaccgagcccgaaggtgcaccgaacattacggccaatctcactagctcactcctcagcgtctgcgggtggtctcagactataaaccctgaggatgacaccgatcccgggcatgcagacttggtgctatacataacacggttcgacttagagctacccgacgggaaccgacaggtgcggggtgtgacacagttgggtggcgcctgttccccaacttggagttgcctcatcaccgaagacacaggattcgaccttggggtgacaatcgcccacgagatcggtcacagcttcgggctggaacacgacggagcaccaggaagtgggtgcggaccaagcgggcatgtaatggcctcagacggtgccgcgcctagagccggcctggcgtggtccccctgtagccgaagacagctcctctccctcctgagtgctggaagggcccggtgtgtgtgggatccaccgcgaccacaaccagggtccgccggtcacccacccgacgctcagcccggactgtattacagtgccaacgagcagtgcagggtggccttcggtccaaaagccgtggcctgcacatttgctcgagagcacttagatatgtgtcaagccctctcttgccatacagaccccctcgatcagtcctcctgctcgaggttgttggtacccctcctcgatggcaccgaatgcggggtggagaagtggtgctctaaaggccgttgccgatccctggtggaattaacacccattgctgccgtccacggccggtggagttcgtggggaccgaggtcgccgtgttcccgctcttgcggtggaggagttgttacaagacggcgccaatgcaataaccctaggccagccttcggaggaagagcctgcgtgggcgcagatctacaagcagagatgtgtaatacccaggcctgcgagaaaacccagttggaatttatgtctcagcagtgtgcacggactgacggtcagcccctgcggagctcgccgggaggtgcttccttctaccattggggcgccgcggttcctcacagtcagggcgacgcgctctgtcggcacatgtgtagagctatcggggagtctttcattatgaagcgcggcgatagctttctcgatggaacccgctgtatgccgtctggccctagggaagacggaactttgtcgctctgcgtgtctggatcctgccggacctttggatgcgacggaaggatggactcccaacaggtctgggatcgttgtcaggtatgcggaggcgacaatagtacttgctcgccgcgcaagggttcgttcacagccggtagggcaagggagtacgttaccttccttactgtaactccaaatctgactagtgtgtacatcgcgaaccaccgccccctgttcacccatctcgctgttaggatcgggggccggtacgttgtggcagggaaaatgagtatctcgcctaacactacttacccgtcgcttctggaggatgggagggtggagtacagggtggccctgacggaagaccgtctcccccgcctggaggagattcgcatttggggtccactccaggaagatgctgatatccaggtctaccgccgctacggggaggagtatgggaatcttacacgtcctgatattactttcacatattttcaaccaaagccacgacaggcgtgggtttgggccgccgtgcgcggaccctgctcagtctcatgcggagccgggctccgatgggtgaactattcgtgcctggatcaggcccgcaaggagctcgttgagaccgtacagtgccaaggcagtcagcagccccctgcctggccagaggcttgcgtgctggaaccatgtccgccatactgggccgtgggggactttgggccttgtagcgcctcttgtggtggaggactgcgcgaaaggcccgtgaggtgtgtcgaggcccaggggtctctccttaagaccttgccccccgcacgctgcagagctggcgcccagcaacctgccgtcgccctggagacttgtaacccccaaccctgtcccgccagatgggaagtgtccgagccctcctcttgtactagcgccggcggggcgggcttggcattggaaaacgagacctgtgtacctggagccgacggccttgaggctccagtgaccgagggacctggctccgtcgacgagaagctccctgcacccgaaccttgtgttggaatgtcttgtccccccgggtggggtcacctggatgctaccagcgcaggtgaaaaagcaccaagcccctgggggtctataagaaccggtgcccaggcggctcacgtctggacacccgccgcagggagctgctccgtcagttgtgggcggggactgatggagctgaggtttttatgtatggactccgccctgcgggtaccggtgcaggaggaactctgcgggctggcatctaagccaggatccagaagagaggtctgtcaggcagtcccatgcccagcaaggtggcaatacaaactggctgcctgctctgtgtcctgcgggagaggcgttgtccggagaatattgtactgtgcaagggcccatggggaggacgatggagaagagatcttgctggacactcagtgccagggccttcctcgcccagagccacaggaagcctgctctcttgaaccttgccctccgagatggaaggttatgagtttgggaccatgctcagcctcgtgcgggcttggcacagcccgcaggtccgtggcatgtgttcaattggaccagggccaggacgtcgaagtggatgaagccgcttgcgctgctcttgtgcgccccgaagccagtgtcccatgtctgatcgcggattgcacatatcgatggcacgtaggaacctggatggagtgcagtgtgagttgcggcgatggcattcaacgccggagagatacctgtttgggcccacaggcacaggctcccgtccctgctgacttttgccagcatctgcctaagcccgtgacagtgaggggatgttgggctggaccttgcgtgggtcagggcactccctctctggtgccacacgaagaggcggccgcacctggcaggacaactgccacacccgcaggggccagtctggagtggagtcaagcccggggcctcctcttttccccagcaccacaacctcggaggttactgccagggccccaggaaaactctgtacagtcatccgcttgcggccggcagcacctcgagccaacaggaactatcgacatgcgaggccccggccaagcagactgtgccgtcgccattggaagacctttgggcgaggttgtcaccctcagagtcctagaaagctccctcaactgttcggctggtgatatgctgctgttatggggccggctgacctggagaaaaatgtgccgtaaactgcttgatatgacatttagtagtaagactaacactcttgttgtccggcagcggtgcggacgacctggagggggcgtgctgctccgctacggctcccagctagcccctgagacgttctaccgtgagtgcgacatgcagctgttcgggccctggggagagatcgttagcccttccttgagccctgctactagcaatgccgggggttgccggctgtttattaatgttgcacctcacgcccgtatcgccatccatgctttggccactaacatgggcgctggtacagagggtgctaacgcatcttacattctgattcgcgacacccactctttacgaacaaccgccttccacggccaacaggtcctgtattgggaatctgaaagctctcaggccgagatggaattctccgaggggttcctcaaggcccaggcttcactgcgcggtcaatattggaccctccaatcatgggtgcctgagatgcaagacccccaatcgtggaaaggcaaagagggcacc

SEQ ID NO: 237946 - DNA, 4281 bp, Artificial Sequence
  derived and/or modified sequence
atgcaccagcgacacccgcgcgcccggtgtccccctttgtgcgtggccggaatcctggcttgcggattcctgctcgggtgctggggcccgtcgcactttcagcagtcctgcctgcaggccctggagccacaggccgtgtcgtcctacctttccccgggagcccccctgaagggacggccgccatcaccaggttttcagcggcagcgccagcggcaaagacgcgcagcgggtggaatcctgcacctcgaattgctcgtggccgtcggaccggatgtgttccaagcccaccaggaggacactgagaggtacgtcctgactaacctgaatatcggcgccgagctcctgcgcgacccgtccctgggggcacagttcagggttcacttggtgaagatggtgatccttaccgagccagaaggagccccgaatatcactgctaacctgacctcgtcactcctctcggtttgcggttggtcccaaaccatcaacccggaggacgataccgatccggggcacgcggatcttgttctgtacattacccggtttgacctggaactccccgacggcaacagacaggtgagaggggtgactcaactcggtggggcctgttccccgacctggtcgtgtcttatcaccgaggataccggctttgacctcggagtgacgatcgctcacgaaatcggacacagctttggactggaacatgacggagctcctggatcggggtgcggaccgtcgggtcacgtgatggcctcagacggcgccgccccgagagcagggctggcttggtccccctgctcccggaggcagctcctcagcttgctttccgcaggacgcgcgcgatgtgtctgggacccgccacgccctcagccgggatcggccggccaccctccagatgcacaacctggactctactactcggccaacgaacagtgccgcgtcgctttcggtccgaaggcggtggcgtgtacttttgcccgcgaacacttggacatgtgccaagctctttcgtgtcatactgatcccctggaccagtcgagctgtagtcgcctcctggtgccgctgctggatggcaccgaatgtggggtggaaaagtggtgctctaagggccggtgtcgctccctcgtggagctcactccgatagccgcagtgcatggtaggtggtcatcctggggtcctaggagcccgtgcagccggtcatgtggtggcggcgtggtcactaggcgccggcaatgtaataacccgcgcccggcgttcggagggcgcgcctgcgtgggagcagacttgcaagctgagatgtgcaatactcaggcatgcgaaaagactcagctcgagtttatgagccaacagtgcgcacggacggacgggcaaccgctgcggtcgagccccggtggcgcatcgttctatcattggggagcggcggtcccgcatagccagggcgatgctctctgcagacatatgtgcagagcgatcggcgaatcatttatcatgaagagaggcgactcgttcctggacggaacgcgatgcatgccctcagggccccgggaagatggaaccctcagcctctgcgtgtcagggtcctgcagaaccttcggatgcgacggacgcatggattctcaacaagtgtgggacagatgccaggtgtgcggaggtgacaattcgacctgcagccctcgcaagggctcgtttaccgcaggacgtgcccgcgaatacgtcactttcctgactgtcacgccaaacctgacgagcgtctatatcgcaaatcatcggcccctgttcacccacctggcagtgagaatcggtgggagatacgtcgtcgctggcaaaatgtcaatcagcccaaacaccacttacccatccctgcttgaagatggtcgggtggagtacagggtcgcgcttaccgaggacaggctgccaaggctcgaagaaattcgcatctggggccccttgcaagaggatgccgatatccaggtttaccggcgctatggagaagagtacgggaacctcacccgcccggacatcacctttacttactttcagccaaaaccgagacaggcctgggtgtgggcggcggtgcgcggtccctgttcagtgtcatgcggcgctggactccggtgggtgaattactcgtgtctggaccaagctagaaaggaattggtggagacggtgcaatgccagggaagccagcaaccccccgcatggcctgaggcttgcgtgctggaaccgtgtccgccatactgggctgtcggagacttcggaccgtgctcggcatcttgtggaggaggactgagagaacgccccgttcgctgtgtggaagcgcagggatcgctcctcaagaccctgccgcctgctcgctgtagagctggggcccagcaaccagccgtggcgctggaaacctgcaacccgcagccttgccccgcccggtgggaagtgtcggagccttcgtcgtgcacgtcggctggaggtgccggcctggccctggagaacgaaacttgcgtgccaggagccgatggactcgaagcgcccgtgaccgaggggccagggtccgtggacgagaaactgccagcgcccgaaccatgtgtgggaatgtcgtgcccaccaggatggggccacctggacgccacgagcgcgggcgagaaggccccgtcaccatgggggtccatcaggaccggagcgcaggccgcacatgtttggacccctgcagccggatcgtgctcagtcagctgcggacggggccttatggaactccgctttctttgcatggatagcgcgctgcgcgtgccagtgcaagaagagttgtgtggcctggcatccaaaccaggttcgcggcgcgaggtctgtcaagcagtcccgtgtccagccagatggcaatacaagctggcagcttgctccgtgtcctgcggaagaggagtagttagacggatcctctactgtgcgcgggctcatggtgaggacgacggagaagaaatcctcctcgacactcagtgccagggactgccacgcccggagccacaggaggcatgttcgctggaaccatgtcctccgcgctggaaggtcatgagccttggtccgtgctcggcctcttgtggactgggaaccgcacggaggtcggtagcctgcgtgcagctggatcaaggacaggatgtcgaggtggacgaagccgcgtgcgctgccctcgtccgcccggaggcctcggtcccgtgcctcatcgccgactgcacctaccggtggcacgtcggcacctggatggaatgctcagtttcgtgtggcgacggaattcaacgccgcagggatacctgcctgggcccgcaggcgcaggccccagtcccagcagatttctgccagcacctcccaaagccggtgaccgtgcggggctgctgggccggaccgtgcgtaggccagggaactcccagcttggtgccgcacgaagaggcagccgccccgggtcggactactgcaactccggctggcgcatcccttgaatggtcccaggcacggggcctcctgttcagcccggctcctcagccacgccgccttcttccgggacctcaggagaacagcgtgcagtcgtcggcctgcggacgtcagcatttggagccgactggtactatcgacatgcgcggtccggggcaagctgattgcgctgtggcgattggaaggccactgggggaagtggtgaccctgagagtgttggagtcctcccttaattgcagcgctggggatatgctcctcctgtggggtcgactgacctggcgcaagatgtgtcgcaaactcctggacatgactttctcctccaagaccaacacgctggtggtgcggcagcgctgcggacggccaggaggaggagtccttttgcgctatgggtcgcaactggcgcccgagactttctatagggaatgcgacatgcaactgttcggcccatggggggaaatcgtgtccccttcgctttctcctgcgacttcaaacgcgggaggttgtcggctgtttatcaacgtcgctccacatgcaaggattgcaatacacgcactggccactaacatgggagctggaactgaaggggccaatgcgtcatatatcctgatccgggatacccattcgctgcggaccactgccttccacgggcaacaagtcttgtactgggagtcagaatcctcgcaggcagaaatggaattttcggagggttttctgaaagcgcaggcttcgctgcgcggacaatactggacgctgcagtcctgggtgcctgaaatgcaggacccgcaaagctggaaggggaaagaaggaacg

SEQ ID NO: 237947 - DNA, 4281 bp, Artificial Sequence
  derived and/or modified sequence
atgcaccagagacacccccgggccaggtgtccacctctttgtgtggccgggatcctcgcgtgtgggttccttctgggttgctgggggccgagtcactttcagcagagctgtttgcaggccctggaaccacaggccgttagctcctacctcagcccaggcgcgccgctcaagggccgaccccccagccctgggttccagaggcaacgacagcgccagaggcgagccgcaggcggaatcttgcacttagagctcctggtcgccgtgggacctgatgtcttccaagcccatcaggaagatacggaaagatacgtactcacgaacctgaatatcggcgccgagttgctgagagacccgtcattaggggcccagttcagagttcacctggtgaagatggtgatcttgaccgagcctgagggggcccccaacattacagccaatctgacctccagcctgctgtctgtgtgcgggtggtctcagacaatcaatccagaagatgataccgacccaggacacgccgacctggtgctgtatatcactcggttcgacctcgaattacctgatgggaataggcaagtgagaggggtcacccagctcggaggagcttgtagcccaacttggtcttgtttaatcacggaggatactggatttgaccttggtgtgaccatcgcgcacgagatcgggcattccttcggactggagcatgacggagcaccgggctctggatgcggacccagtggacatgtgatggcctccgacggagccgctccacgggcagggttggcctggtcaccctgctcacgaagacagttgctctccctgctgtctgctggaagagccagatgcgtgtgggaccctccccgcccacagcctggctcagctggacacccccctgatgctcagcccggcctgtattacagtgcaaacgaacagtgtagggtggccttcggaccgaaagccgtcgcatgcacattcgcacgggagcatctggacatgtgccaggccttgagttgccacaccgacccgctggatcagagcagttgttctcgccttctcgtccctcttttggacggtacagagtgtggcgtggaaaagtggtgctctaaaggcaggtgccgcagtttggtggaactgacacctatcgccgcagtccatgggcggtggtcctcatggggcccccggtccccctgttctcggtcttgcggaggcggggttgtcacacgccgtcggcagtgtaacaatccacggccagccttcggcggccgcgcatgcgtgggagccgacctgcaggccgaaatgtgtaacacccaggcctgtgagaagacacaactagagtttatgtcccagcagtgcgcccggaccgatggccagcccttgaggtcatcccctggaggggcctctttttaccactggggggccgccgtccctcacagtcagggcgacgccctttgccgacacatgtgtagagccataggtgaaagctttatcatgaaacgaggggactcgttcctggatggcacacgctgcatgccctctggccctagggaggacggcaccctctcattatgtgtatccgggtcctgcagaacatttggctgcgatggaagaatggatagtcaacaagtctgggatcggtgccaagtgtgtggaggagacaattctacttgcagtcctcgcaaagggtcgttcaccgccgggcgcgccagagagtatgtgacatttctcaccgtgacgcccaatcttacctctgtgtatatcgcaaaccaccgccctctgttcactcacttggctgtgcggataggcggaagatacgtggtagcgggcaagatgagcatttccccgaatacaacttacccctctctgctggaggacggccgagtagagtacagagtagccctgaccgaagataggctgcctcggctggaggagatccggatatgggggccgcttcaggaggacgcggatatacaggtctaccggagatacggtgaagaatacggaaacctgacccgtcccgacatcactttcacgtatttccagcctaagcctagacaggcctgggtctgggccgccgtgcgggggccatgctcggtctcctgtggggccggcctgcgttgggtcaattactcttgcctggatcaggcaaggaaggagctggtcgaaaccgtccagtgccagggatctcaacaacctcctgcatggccagaggcttgcgttcttgagccttgccctccctactgggctgtaggagattttggtccatgttcagcctcttgcggtggcgggttgcgagagaggcccgtgcgctgtgtcgaggcacaagggtcgctgctcaaaaccctgccacccgcaagatgtagagcaggggcccagcagccggccgtggcgctagaaacctgtaatcctcagccttgtcccgcgcgctgggaagtgagtgaaccgagcagctgcaccagcgcgggcggggccggcctcgccctggagaatgaaacctgcgttcctggtgccgacggcctcgaggccccggtgactgagggtcccggctccgttgacgagaaattgccagcacccgaaccctgcgtgggaatgagttgccccccaggctggggacacctcgacgccacttccgccggggagaaggcaccttccccgtggggatcaatcaggactggagcacaggccgctcatgtgtggacaccggccgcgggaagttgctccgtctcctgcggccgtggtctgatggaattgcggtttttgtgcatggattctgcccttcgggttcctgtgcaggaggagctctgcggactggcctctaaacctggttctcgccgggaggtttgtcaagcagtgccttgtcccgcccgttggcaatacaaacttgccgcttgctctgtcagctgcggcaggggagtggtccgacggatcctatactgcgctcgggctcatggcgaggacgatggggaagagattctgctcgacacgcaatgtcaggggctgccccggcctgagccacaagaggcatgttctctggagccatgccccccccggtggaaagtgatgtctcttgggccatgctctgcaagttgtggactgggaactgcccgcaggagcgttgcatgtgtgcagctggaccagggacaggacgtggaggttgatgaggccgcctgcgctgccctcgtcaggcccgaggccagcgtgccttgtctgatcgccgactgtacataccggtggcatgtaggaacctggatggagtgcagcgtttcctgcggtgacggaatccagcggcggagggacacctgcttaggacctcaggctcaagcacctgtcccagcagacttctgtcagcacctcccgaagccagttacagtaaggggatgctgggcgggaccctgcgtgggacagggtacacccagtctggtaccgcatgaagaggccgcagcacccggtcggacaacggcgacacccgctggcgcatctctcgaatggagtcaggcccgcggtttactcttctcaccggccccacagcccaggagactgcttccgggcccgcaggagaacagcgttcagagttcagcttgtggtcggcagcacttagagcctaccggcaccatcgacatgagagggcctgggcaggctgattgtgcagttgctattggcaggcctctgggcgaagtggtgactctccgcgtgctggaatcgtcgctgaactgcagcgccggtgatatgctgctgctgtggggcaggctgacgtggcgaaaaatgtgtagaaagctgcttgacatgacttttagtagcaaaacaaatacactcgtggtgagacagcgctgtggccggcccggcgggggggtgctgcttcgctatggctcccaactggcgccagagactttctaccgcgaatgcgatatgcagctgttcggtccctggggggagatagtaagcccgagtttatctcctgccaccagcaacgcgggagggtgcagacttttcatcaatgtagcccctcacgcacgcatcgccattcacgcactcgctaccaatatgggggccggcacggaaggtgcaaacgccagctacattctgattcgagacacccactctctcaggacaaccgccttccacggccagcaagtgctctattgggaatccgagagcagccaggccgaaatggaattctctgagggctttctcaaggcccaggcttcccttcggggccagtattggacgctccaatcttgggttccggagatgcaagatccccagtcctggaaaggcaaggagggcacc

SEQ ID NO: 237948 - DNA, 4281 bp, Artificial Sequence
  derived and/or modified sequence
atgcatcagcggcatccgcgcgcccgttgccctcctctctgcgtggctgggatcctcgcgtgtgggttcctgcttggatgctggggaccgtcacacttccagcagtcctgcctccaggccctcgaaccgcaggctgtctcgagctacctgtccccaggtgccccactgaagggacgcccgccttccccgggttttcagcgccaacgccaaagacagcggcgagccgcgggaggaattctgcatctcgaactcctggtggccgtcgggccggacgtgttccaagcgcaccaagaagatactgagaggtacgtcctcactaatttgaatatcggagcggaactgctgcgggacccatcgcttggtgcccagttccgagtgcacctggtcaagatggtgatcctcaccgagcctgaaggagcgccaaatatcactgccaacctcactagctccctcctgtccgtctgtggatggtcgcaaaccatcaatccggaagatgacacggacccggggcatgctgatctggtgctgtatatcaccaggttcgatctggagctccccgatggcaacagacaggtccgtggcgtgactcagctcggcggggcctgcagtccgacttggtcatgcctgatcactgaggataccggcttcgatctgggcgtgactatcgcacatgaaatcggccattcgtttgggttggaacatgacggggcacccggatctgggtgtgggccgtccggacacgtgatggcctccgacggcgccgcaccgagggccggactcgcctggagcccgtgcagccgccggcagcttctgtcgctcctctcagcgggaagagcgagatgtgtctgggatccgccgcggcctcagccaggatcggcaggacacccccctgacgcacagccgggactgtactactccgccaacgaacaatgtagagtggcctttgggcccaaggcggttgcgtgtacgtttgcccgcgaacatctggatatgtgccaggcgctctcgtgtcacacggatccgcttgaccagtcgtcgtgctctaggctgttggtgccgctcctggatggcactgagtgcggcgtggagaaatggtgcagcaaaggacggtgccgctcgcttgttgagctgaccccaatcgccgcagtccacggccgttggagcagctggggccctcggtccccgtgctcaaggtcgtgcggcggaggcgtggtcacccggcgcagacagtgcaacaatccacggccagccttcgggggcagagcctgcgtgggagccgaccttcaagcggagatgtgcaatactcaagcctgcgaaaagactcagctggagtttatgtcgcagcagtgcgctcgcaccgacggacagcctctgagatcgtccccgggcggagcctcattctaccactggggagcggcagtgccgcattcgcagggcgacgcgctgtgcaggcatatgtgccgggcaatcggagaatcgttcatcatgaagcgcggcgactcgttcctggacggaactaggtgtatgccatcagggcctagggaagatggaactctgagcctttgtgtgagcggatcgtgtagaaccttcggctgcgacggaagaatggattcgcagcaggtctgggatagatgccaggtgtgcgggggtgacaactccacttgttcgccgaggaagggatcgttcactgccggccgcgcacgggagtacgtgactttcctcactgtgactccgaatctgacctcggtctacattgccaaccaccggcccctcttcacccatctggccgtgcggatcggcggccggtacgtggtcgctggaaaaatgtcgatttcgccgaacacgacctacccatcactgctcgaagatggccgggtcgaatacagggttgccctgactgaagatcgcctgccccgcctggaggaaattcgcatctggggacctctccaggaggacgccgatattcaggtgtaccgccgctacggcgaggaatacggcaacctcacccgcccggatatcaccttcacctacttccaacctaagccgaggcaggcgtgggtttgggccgcagtgcggggaccgtgttccgtcagttgtggtgcgggtctgagatgggtgaactactcctgcctcgaccaggccaggaaggagctggtggaaactgtccagtgccagggaagccagcagcccccggcctggcccgaggcctgtgtgctggagccatgcccgccctactgggccgtcggagactttggaccatgctcagcatcgtgtggcggaggccttagggagcgcccggtgcgctgcgtcgaggcccaaggatccctcctcaagactttgccgcctgcaaggtgtagagccggagcacagcagccagcggtggctctcgagacttgtaatccgcaaccgtgccccgcgcgctgggaggtgagcgagccgtcctcctgtacttctgccggaggagcgggattggctctggaaaacgaaacctgcgtgccaggagcggacggactggaggcacctgtgacggaggggccgggatcagtcgatgaaaagctgccggctcccgaaccctgcgtcggaatgtcgtgcccaccgggatggggtcacctcgatgcaaccagcgccggtgagaaggccccatcgccatggggatcaatcagaactggagcccaggcggcccacgtgtggacgccggcagctggatcctgttcggtgtcgtgtggacggggactcatggagctgcgcttcctgtgcatggactcggcactgcgggtgccggttcaagaggaactctgtggcctcgcgtcgaagccgggctcccgccgcgaggtgtgccaagccgtgccctgtccagcccggtggcaatacaagttggcggcctgcagcgtgtcctgtggacgcggagtcgtccggcggattctctattgcgcgcgcgctcacggtgaggacgacggagaagaaatcctgctggatacccaatgtcagggcctgccacgaccggaaccgcaggaagcgtgttccctcgagccgtgtcctccgcgctggaaggtgatgtcgcttggcccatgctccgcgtcatgcgggttgggtactgctcgcagatccgtggcctgcgtccagctcgatcaaggacaggacgttgaggtcgatgaggctgcgtgcgcggccctggtgaggcctgaggcttcggtcccctgtctgatcgctgattgcacgtatcggtggcacgtgggaacctggatggagtgctccgtctcctgcggagacggaatacaaagacggcgcgatacctgcctgggaccacaggcacaggcgccggtccccgctgatttttgccagcacctgccgaaaccagtgacggtgagaggctgctgggcgggaccgtgcgtggggcaggggaccccatccctggtccctcatgaggaagcggctgcaccagggcggactactgccactcctgccggagcttcactggagtggtcgcaggcgcgaggactgctgttctcgccagctcctcagcccagacggctgcttcctggaccgcaagagaacagcgtgcagagctcagcttgtggtcggcagcaccttgaaccaaccgggaccattgacatgcggggtccgggccaggctgactgcgcggttgccatcggtcgcccactgggcgaggtggtgactctgcgcgtgctggagtcgtcactcaactgcagtgctggtgacatgctgctcctctggggacggcttacttggaggaagatgtgcaggaagctcctcgatatgaccttctcttcaaagaccaatacgctcgtggtgcggcaacggtgcggccggccgggaggtggcgtgttgctcaggtatggatcacagctggctccggaaaccttctatagagaatgcgacatgcaactcttcggaccatggggggaaattgtttccccatccctgtccccagcaacctcaaacgcaggcggttgtcgactcttcatcaacgtggccccgcacgctagaatcgcgatccacgcgctcgccactaacatgggggcaggcactgaaggtgcgaacgcatcctacattctgatcagggacacgcattcgctccggactaccgcttttcatggacaacaagtcctttactgggaatcggaatcatctcaagcggaaatggaattcagcgaagggtttctcaaggcgcaggcatccctccgcggacagtactggactctccaaagctgggtgccggaaatgcaggacccacagtcctggaaaggtaaggagggaacc

SEQ ID NO: 237949 - DNA, 4281 bp, Artificial Sequence
  derived and/or modified sequence
atgcaccagcgacatccgcgagctcgatgcccccccttgtgcgtggcaggtattctcgcttgtggcttcctgctgggttgctggggcccctcccactttcagcagtcgtgtctccaggctttggagccacaggcagtgtcctcctatctctcgcctggcgcccccctgaaaggccgccccccctcacccggcttccagaggcagcgccaaaggcagcggagggctgcaggggggatactgcacttggagctcttggtggctgtggggcccgatgtgtttcaggctcaccaggaggataccgagcggtatgttttaactaacctgaacatcggtgctgaattgctgcgggatccgagtctgggggcacagttcagggtgcacttagtgaagatggtaatcctgactgaaccggagggagctcccaacattacagctaacttgacatccagtctgttgtctgtatgtggttggagccagacaataaaccctgaggacgataccgatccaggccatgccgatttggttctatacatcacccggtttgacctcgaactgcccgacgggaacagacaggttagaggagtgacacagctcggaggcgcatgctctcccacttggagctgcctcatcactgaggacacaggcttcgatctgggagtgaccattgcacacgaaatcggccactcctttggcctggaacacgatggagctcctggcagcgggtgtgggccatctggccacgtcatggcgtctgacggggcagcaccaagagcgggtttggcgtggtctccttgttctcgccggcagttgctttccctgttgtcagccgggcgggcacgttgcgtgtgggatccacccagaccccagcccgggtctgctgggcacccccccgacgcgcaacccggactctactactctgccaatgaacagtgcagggtcgctttcgggcccaaggctgttgcctgcaccttcgctcgagagcacctagatatgtgtcaggctctgtcgtgccacacggatcccctggaccagtcctcctgttcccgattactcgtccctctgctcgacggcactgagtgcggcgtggaaaagtggtgcagcaaggggcgatgtcgctctcttgtcgagctgacgccaattgccgcagtgcacggacgttggtcgagctgggggccaagatccccttgtagcagatcctgtggtggtggagtcgtaacacggcgacggcagtgcaacaatccccggcccgccttcggcgggagagcgtgcgtcggtgccgacttgcaggcagagatgtgcaacacgcaggcctgcgagaagacacagctggagtttatgtcccaacagtgtgctcgcactgacggacagcctctccgctcctccccaggcggcgctagtttctaccactggggggcagctgtgccacactctcagggtgacgctctgtgcaggcacatgtgccgtgccattggggaatcttttatcatgaaacgaggggactctttcctggacggaacccgctgtatgccttcgggccctcgggaggacggaaccttgtccttatgtgtaagtgggtcatgcaggaccttcggttgcgacggaagaatggactcgcagcaggtgtgggaccgttgtcaggtttgcggcggcgataactcgacctgctcacctcggaaggggagctttactgcaggtagggcccgggagtacgttacctttctgaccgttacgcctaacttgacctctgtgtacattgctaaccaccggccactcttcacgcacctggctgtccggattggaggcagatacgtggtggccggaaagatgtccatttcaccaaatacaacttatccttcacttctagaggatggtcgggtcgaataccgggtggctctgacggaagatcgtctccctcgcttggaagagattcggatctgggggcctttacaagaggatgcagacattcaggtataccggcgctacggggaggagtacgggaacctgacccgcccagacattacttttacctacttccagcccaagcctcggcaagcatgggtgtgggccgccgtgcgcggcccttgttcagtgtcgtgtggtgccggcctgaggtgggttaactattcttgtttggaccaggcacgtaaagagctcgtggaaacggttcagtgtcagggcagtcagcagccacccgcatggccggaagcttgtgtgctggagccttgtcctccctactgggccgtgggcgatttcggtccttgcagcgcatcttgcggcggtggactgagagaaagacccgtgcgttgcgtcgaggctcagggcagcctcctgaaaaccctcccaccggctaggtgccgggccggagcacagcagcccgcggtggccttggagacttgtaatccccagccatgccctgctcgttgggaggtgtctgaaccttcatcctgtacatctgccggaggagccggattggccttggaaaacgagacctgtgtaccaggagcagatgggctggaagcccctgtaacagaaggaccgggcagcgtggatgaaaaactgccagcacccgagccctgcgttggaatgtcctgccctccaggatggggccatctggacgcgacctcggctggcgagaaagcgcctagcccctggggatcaattcgaacaggcgctcaggctgcgcatgtttggacgcctgccgctggatcttgcagcgtgagctgcggccgaggcctgatggagctgagatttttgtgcatggactccgccttgcgcgtgccagtccaagaagagctctgcgggctcgcttcaaagccaggatctcggagagaggtttgccaggctgttccttgcccggctcgatggcagtataagctcgcagcatgctccgtttcatgcggtagaggggtggtgaggagaattttgtactgcgcacgcgctcatggggaagacgacggggaagagatccttctcgacacccagtgtcaaggactaccccgtcccgagccacaggaggcctgcagcttggagccatgcccccctaggtggaaagtgatgtccctgggcccttgctctgcgtcttgcggcttggggacagcccgccgttcagtggcatgcgtgcagctcgaccagggacaggatgttgaggttgatgaagccgcttgcgccgccctagtcagacctgaggcatccgttccttgcttaattgccgattgtacataccgctggcacgtaggcacctggatggagtgttctgtttcgtgcggggatggcattcagagaaggcgcgatacgtgcttggggccccaggcgcaggcacctgtcccggctgatttttgccaacatctgcctaagccagtgacagtaaggggctgttgggccgggccgtgcgtcggccagggcacaccctcgttagttcctcacgaggaggccgcagccccgggacgtaccacagcaacacccgcaggggcctccctggagtggagccaggccaggggccttttattctcacctgctccgcaacctaggaggcttctccccggtccacaggagaactctgtccagtcttccgcctgtggccggcagcatcttgaacccacagggaccatcgacatgagaggccctggccaggctgattgcgcagtggctatcgggagacccttgggcgaagtggtgaccctccgggtactcgaatccagcctaaattgtagtgcaggcgatatgctgctgctgtgggggcggttgacctggaggaagatgtgcagaaagctcctcgatatgacattctcctctaagactaacacgttagtcgtgaggcagagatgtggacgaccgggtgggggtgtacttctgagatacggatcccagttagccccggagactttctaccgggagtgcgacatgcagctatttgggccttggggggaaatcgtgagcccttccctctcacctgccaccagtaacgcaggcggctgtcgcctgttcataaatgttgctcctcacgcgcgtattgccattcatgccctagctacgaacatgggagccggaacagagggggccaatgcgtcatacattctgattcgtgacacccactctcttcgcaccacagccttccacgggcagcaggttctctactgggaatctgagagctcccaagccgaaatggaattttcagaaggctttctgaaggcgcaagcatccctgcggggtcagtactggactttgcagtcttgggtgcctgagatgcaggatcctcaatcctggaagggcaaagaagggact

SEQ ID NO: 237950 - DNA, 4281 bp, Artificial Sequence
  derived and/or modified sequence
atgcatcagcggcatccccgcgcgcggtgtccgccgctttgcgtggctggcattttagcgtgcggttttctcttgggatgctggggcccttcgcacttccaacaatcctgccttcaggctcttgaaccacaggcagtgtcctcttacctcagtcccggcgccccactaaagggccgccccccgtctccgggtttccaacgccagaggcagcggcagcggcgtgcggctggagggatcctgcacctggagctcctcgttgccgtgggcccggacgtattccaggcccaccaggaggataccgagaggtacgttctgaccaatctgaatattggagccgagctactgcgcgaccccagcttgggagctcagttccgcgtgcacctggtgaagatggttatcttaacagagccggagggggctccgaatatcacggccaacctgacaagcagcctgttgtctgtgtgtggttggtcgcagaccatcaaccctgaggatgacactgatccggggcacgcagatctggtcttgtatattacaaggttcgacctggaactgcccgatggtaaccgtcaagtcaggggtgtgacgcaactggggggtgcctgctcaccaacatggtcctgccttataacagaggacacgggattcgacctaggcgtgacgattgcccacgagattggacactcctttggactggaacacgacggggcacccggcagtgggtgtggaccaagcggccatgttatggccagtgatggagccgcgccccgtgcaggcctggcctggtccccgtgcagtaggcggcaactcctttcattgctgagtgcgggtcgcgcgcgctgcgtgtgggatccaccgcggccccagccgggttcggcaggtcacccgccggacgcgcagccagggttgtattactccgcgaatgagcagtgcagagtggcttttggaccaaaggcagtggcctgcacattcgctcgcgagcatctggatatgtgccaagccctctcctgccacacagatccattggatcagtcgagttgttcacgcctcctggtgcccctgctggacggcactgagtgcggcgtcgaaaaatggtgctccaaggggcgctgccgctccttggtggagctcacacccatcgccgccgtccacggacggtggtccagttggggaccccgtagcccatgtagtaggtcttgcggcggaggcgtcgttaccagacgccgccagtgcaataacccgcgcccagcgttcggaggacgcgcgtgtgtgggcgccgacctgcaggccgagatgtgtaatacccaggcctgcgagaagacacagctggaatttatgagtcagcaatgcgcgcgtacagatggacagcccttgaggagttcacccggaggcgcgtcgttctaccactggggagctgccgtgccacattcgcagggagatgccttgtgcaggcatatgtgccgcgccatcggggagagcttcattatgaaacgtggcgatagcttcctggatggaactcgttgcatgcccagcgggccccgcgaagatggcaccctgagtttgtgtgtgagcggttcatgccgtactttcggctgcgacggccgcatggactcccagcaggtctgggaccgctgccaggtgtgcggcggtgacaatagtacctgttccccccgaaagggttcctttaccgcaggccgcgcgcgggagtacgtgactttccttactgtaaccccaaacctgacgtcagtgtatatcgctaaccaccgcccactattcacccatctggcggtacgaatcggcggacgctatgtggttgcgggcaagatgtccatcagccccaatacaacgtatccgtccctgcttgaggacggtcgggtggagtatcgtgttgctctgaccgaggataggctgccgcgcctggaggaaattagaatctgggggcctctccaagaggacgccgacatccaggtgtatcgccgctatggcgaagaatatggaaacctgacccggccggacatcacgttcacatatttccaaccgaagccacgccaggcctgggtctgggccgccgtccggggcccatgctcagtgagctgcggcgccggactccggtgggtaaattattcctgcctagaccaagcccggaaagagctagttgaaacggtacagtgccagggctcacaacagcctcccgcatggccggaggcatgtgttcttgagccctgcccaccatactgggccgtgggtgacttcggaccttgcagtgcctcttgcggaggaggtttgagggagagaccagtgcgatgcgttgaagcccagggaagcctattgaagacactgcccccagctcgctgccgcgccggtgcccaacagcctgctgtcgcgctagaaacgtgtaatccccagccgtgtccggcccgctgggaggtatcggaaccaagctcttgcacctccgctggcggggccggcctggcgcttgagaatgagacctgcgttcccggagctgatggactcgaggccccggttaccgaaggcccaggttctgttgatgagaagctgcccgcgccggagccctgcgtcggcatgagctgccctcccggttggggccacctggatgctacatctgcaggcgagaaggcgccgagcccatggggcagtatccggacgggcgcccaggctgcccatgtctggactcctgcagcgggcagttgctcagtgagctgcgggcggggactgatggagctacgcttcctatgcatggactcggcgttgcgcgtgccagtgcaggaagaactgtgcggcctggcttcgaagccaggtagtcgtcgcgaagtttgccaggctgtgccctgcccggcgcggtggcagtacaagttggctgcctgcagtgtgtcctgtggtcgcggggtggtgcgacgaatcctgtactgtgcgagagcccacggagaggatgacggagaggagattcttctggatacccaatgccaaggcctgccacgccctgagccgcaggaagcctgtagcctggaaccgtgcccgccacggtggaaggttatgtccctcggaccgtgctcagcgagctgtggcctcggcacggcgcgacgctccgttgcttgcgtacaactagaccaagggcaggacgttgaggtggatgaagcggcctgcgccgccctggttagacccgaggcgagcgttccctgcctcatcgcagattgtacttacaggtggcacgtcggaacatggatggaatgtagtgtatcgtgcggagacggcatccaacgtcgacgcgacacctgcctgggtccgcaggcgcaggctccagtccccgctgatttttgccaacatctaccaaaaccggtgacagtacgaggatgctgggccggcccctgcgttgggcagggaacgccgtcgctggtgccgcatgaagaggccgctgcccccgggcgtacgacagcaacaccggctggtgcctccctagagtggtcccaagctcgtggcctgctgttttcgccggctccacagccgcgaaggttgctgccaggccctcaagaaaactcggtccagtcctccgcctgtggacggcagcacctcgaacctaccggcacgatagatatgaggggaccgggtcaggctgactgtgctgtggccattggccgacccctgggtgaagtggtcaccctaagggtattggaatcctccttaaactgctccgccggcgatatgcttctgctgtggggacgccttacctggcgaaagatgtgtcgcaagttactggacatgacgttctcctcaaaaacaaacacgctggtggttaggcagcggtgcggaaggcccggaggcggggtcctactgaggtatggctcccagcttgctcccgagacgttctaccgcgagtgcgatatgcagctgttcggcccatggggggagatagtgtccccgtcgttgagccccgctacgagcaatgccggaggctgtcgtctgttcataaacgtagccccccacgcgcgtattgcaatacacgccctggctacaaatatgggcgcaggcactgagggcgccaacgcttcctatatcctgatccgggacacacatagtctccgcaccacggcgttccatggccagcaggtgttatactgggaatccgagtcaagccaggccgaaatggaatttagcgagggatttctgaaggcccaggcctcactgcgcggccagtactggaccctgcagtcgtgggtacctgagatgcaggatccgcaatcctggaagggaaaggagggtact

SEQ ID NO: 237951 - DNA, 4281 bp, Artificial Sequence
  derived and/or modified sequence
atgcatcagaggcacccgcgggctaggtgcccgccgttgtgcgtcgcgggaatcctcgcttgtggatttttgctcgggtgttggggaccgagccatttccagcagtcctgcctgcaggctcttgaaccacaggccgtctcgtcatacctcagtccgggggccccgctgaaaggccgccctccatcgccgggatttcagcgccagcgccaacgacagagaagggcagccggaggcatcctccatcttgagctgctcgtggctgtgggtcctgacgtgttccaggcccaccaagaggacaccgagcgctacgtgctgactaatctgaacatcggcgcggaactcctccgtgatccaagcctgggagctcagttccgcgtgcaccttgttaagatggtgatcctgaccgagccagaaggcgctccaaacattaccgccaacctgaccagctccttgctgtcggtgtgtggttggtcgcagaccattaatccagaggatgacaccgatcctggccacgctgatcttgtgctctacatcactcgtttcgacctggaattgccggacgggaaccgccaggtgcgcggagtgacccaactgggtggcgcctgcagcccaacgtggtcgtgtctgattactgaagatacggggtttgatctgggagtgactatcgcgcacgaaatcggacactcgttcggtctggaacacgacggcgcaccggggtcaggatgcggcccgtcgggacatgtcatggcatcggacggagccgcgccaagagccggccttgcttggtcgccttgctcacgccgccaactgctgagcctgctgtcggctggaagggcacgctgcgtgtgggacccgccgcggccgcaaccgggatccgcagggcacccaccggatgcccaacctggactgtactatagcgccaacgaacaatgccgggtggctttcggacctaaagccgtggcgtgcaccttcgcgagagaacacctggacatgtgtcaggccctgagctgtcatacggacccgctggatcaatcgtcttgcagtcgactgttggtgccgctgctggacggaactgagtgcggcgtggagaagtggtgttcaaagggccgctgccggtcactggtggaactcacccctatcgcagcagtgcacggccggtggtcgtcctggggtcctaggagcccttgttcacggtcctgcgggggaggagtggtgactcgccggagacagtgcaacaatccgcggccagcgttcggcggacgggcctgtgttggcgctgacctccaagccgaaatgtgcaatacccaggcttgcgaaaagactcagctggaattcatgtcacaacagtgcgctcggaccgacggacaaccgctgaggtcgtccccgggaggtgcctccttctaccactggggagctgcagtgcctcattcacagggggatgctctttgtagacatatgtgtcgggcaattggggagtccttcatcatgaagcgcggagactcgtttcttgacggcacgcggtgcatgccgagcggtccgagagaggatggtaccctgtcgctgtgtgtgtcgggttcctgtcggacctttggatgcgacggacggatggactcccagcaggtgtgggaccggtgccaagtgtgtggaggggacaactccacttgttccccgcggaagggatcctttactgccggaagagctcgggagtacgtgaccttcctcaccgtgactcctaacttgacctcagtgtacatcgcgaaccaccggcccctcttcactcatctggcggtgcgcatcggtggacggtacgtcgtggccggtaagatgtcaatctccccaaataccacctacccgtctctgcttgaagatggacgggtggaataccgcgtggctctgaccgaagatagactgccacggctcgaggagatcagaatctggggtcctctgcaggaagatgccgacattcaagtctatcggcggtacggcgaagagtacggcaacctgactagaccagacatcacgtttacctacttccagcctaagccccggcaggcttgggtgtgggcggccgtgcggggcccgtgctcagtttcctgcggggcgggccttagatgggtgaattactcctgcctggaccaggcgagaaaagaacttgtggaaacggtacagtgccaaggatcacagcagccgcctgcctggcctgaagcctgcgtcttggaaccatgtccgccttactgggcggtgggagacttcggaccatgctcggcttcatgcggaggtgggctcagggaacggccggtccgctgcgtcgaagcgcaaggctctttgcttaagactcttccgccggcgcggtgcagagctggagcccagcagcccgcggtggcactggaaacctgcaaccctcagccttgcccggctcggtgggaagtgtcagaaccttcctcttgcactagcgccggcggcgccggactcgccctggagaacgaaacctgcgtgccaggcgccgacggtctggaagcgcctgtgaccgaaggtcctggaagcgtggatgagaagctgccagcaccagagccgtgcgtgggtatgtcctgccccccgggatggggtcatctggacgctactagcgcgggggaaaaggccccgtcgccttgggggtccatccgaaccggggcccaggccgcacacgtgtggaccccggccgccggctcgtgctccgtgtcgtgtgggcgaggactgatggagctgcgctttctgtgtatggattccgccctgcgggtgcccgtgcaggaagagctctgcgggttggcctccaagccaggatcacgccgggaagtctgtcaagccgttccatgtccagcccgctggcagtacaaattggctgcttgcagtgtgtcctgcggcaggggggtcgtcaggcggatcctgtactgtgctcgggcgcatggagaggacgacggagaggaaatcctgctcgacactcaatgccagggactgccgcgcccggagccgcaggaggcatgctcgctggaaccgtgcccaccgcgctggaaggtaatgagccttggcccctgctcggcgtcgtgcggccttggaactgccagacgatcggtcgcctgtgtgcaactcgatcaaggccaggacgtcgaggtggacgaagcggcatgcgccgccctggtgcgaccggaggccagcgtgccatgcctgattgcagactgtacttacaggtggcatgtcgggacctggatggaatgttccgtctcatgcggggacggaatccaacggcgcagagacacttgtctcggcccacaggcccaggctccggtgccagccgacttctgccaacatctgcctaaacctgtgaccgtgcgcggctgctgggcgggcccctgcgtgggacaaggtacccccagcctggtgccgcatgaagaagcggcggcgcccgggaggactactgcgactccagccggtgcctccctggagtggtcacaggccagaggactgcttttctcgccggcaccacaaccacggcggctgctcccagggccgcaagaaaacagcgtccagtcaagcgcatgtggtaggcagcacctggagccgactggaaccatcgacatgcgcggaccgggtcaggccgattgcgcggtggcaatcggtaggccactgggagaagtcgtgaccctccgcgtcctcgaaagctctctgaactgcagcgcaggagacatgctgctgctgtggggtcgcctgacctggcgaaaaatgtgccggaagctgcttgatatgaccttttcgtccaagactaatactctggttgtgcgacaaagatgtggacggcccggagggggcgtgctgctccgttatggctcgcagttggcacctgaaactttctaccgcgaatgcgatatgcagctgttcggaccttggggtgagatcgtctcgccgtcactgagcccggctacttccaatgcaggaggatgcaggctctttatcaacgtggcaccgcatgctcgcatcgctatccatgcattggccactaacatgggagcaggaactgaaggcgcaaatgcgtcgtacattttgatccgcgatacccactcgcttaggaccactgctttccatggacaacaggtgctttactgggaatcggaatcgtcccaggcggagatggagtttagcgagggcttcctgaaggcgcaggctagtctgcggggccagtactggacgctccaatcttgggttccagaaatgcaggatccccagtcatggaaaggaaaggaagggacc

SEQ ID NO: 237952 - DNA, 4281 bp, Artificial Sequence
  derived and/or modified sequence
atgcatcaacgccacccaagggccagatgtccgccgctctgcgtggcgggaatcctcgcttgtggattcctcctggggtgttggggtccgagccactttcagcagtcctgcctgcaggccctcgagccgcaggccgtgtcgtcctacctgagccctggcgccccgctgaaggggaggccgccgtcccctggattccagcggcaacgccaaagacagcgacgggccgcgggcggaatcctccatcttgaactgctcgtggcagtcgggccggacgtctttcaggcgcaccaggaagatactgaaagatacgttttgaccaaccttaacatcggtgccgaactgcttcgcgacccatctctgggagcccaattccgggttcatctggtgaagatggtgatcctgactgaaccagaaggagcccctaacattactgcgaacctgacgtcgtcgctgcttagcgtgtgcggttggagccaaactatcaaccccgaggacgacactgaccctggacatgccgatctggtcctgtacatcactcggttcgacctggaactcccagacgggaacaggcaggtgagaggcgtcactcagttgggaggagcttgcagccccacctggtcctgcctcatcaccgaggacaccggcttcgacctgggagttactatcgcccatgaaatcggccactcattcggcctcgaacacgacggggcccctggctcgggatgcggaccctcggggcatgtgatggcttcggatggtgcagccccacgggctggacttgcatggtcgccgtgcagcaggcgccagcttctgtcccttctctccgcggggagagcgaggtgtgtgtgggatcctccgcggccgcagcctggctcggctggacacccgccggatgcgcaaccgggcctgtactactcggccaacgaacaatgtcgggtggcgtttggacccaaagcggtggcgtgcaccttcgctcgagaacatctcgacatgtgccaggcactgtcctgccataccgatccactcgaccagtccagctgctcgagactgctggtcccactgctggacggaactgaatgcggcgtcgaaaagtggtgctcgaagggacggtgcagatcgctggtggaactgacccctatcgccgccgtgcacggaaggtggtcctcatggggtccacggtcaccttgctcccggagctgcggcggcggggtggttactagacgcaggcaatgcaataatccgcgcccggccttcggaggacgggcgtgcgtcggagctgacttgcaagccgagatgtgcaatacgcaggcttgtgaaaagacccaacttgagttcatgagccagcagtgcgcccggaccgacggacaaccgctgagaagttcgccggggggtgccagcttttaccactggggcgccgcggtccctcattcgcaaggcgatgcactgtgccgacacatgtgccgcgctatcggggagtcgtttatcatgaaacgcggcgactctttcttggacggtacgagatgtatgccttcaggtccgagagaggacggaactctgtctttgtgcgtttcgggttcctgtcggaccttcggatgtgatggccggatggactcacagcaggtgtgggatcgctgccaggtgtgtggaggggacaatagcacctgttcgccacggaagggatcctttaccgccgggcgcgccagagaatatgtgactttcctgaccgtgactccaaacctcaccagcgtctacatcgctaatcaccgccccctgtttactcatttggcggtgcgcatcggaggccggtacgttgtcgctggaaagatgagcatctcaccgaacacgacttacccgtcccttctcgaggacggacgggtggaatacagagtggctctcactgaagatcgactgccaaggctggaagaaatcagaatctgggggcccctgcaggaagatgcagacattcaggtgtatcggcggtacggagaagagtatggaaacctgacgcggccagatatcaccttcacgtacttccagccgaagccccggcaggcgtgggtgtgggcagcggtgcggggaccgtgctcagtgtcgtgcggcgccggcctgagatgggtgaactactcgtgtctggaccaggctaggaaagaacttgtcgagactgtgcaatgccagggatctcagcaaccccctgcgtggccggaggcgtgcgtgctcgagccctgtccgccttactgggcagtgggagatttcggaccatgttcggcgtcatgtggcggaggacttagagagaggccagtcagatgtgtggaagcccagggaagcctgctgaaaaccctcccgccagcacgctgccgggcaggagcacaacagcctgcggttgcgcttgagacttgtaatccacagccatgcccggcccgctgggaagtaagcgagccgtccagctgcacgtcggcaggaggcgcgggactcgccctggagaatgagacgtgcgtgccaggagccgacggtcttgaagcaccggtcacggagggccccggatccgtggatgagaagctgccagcccctgagccatgcgtgggaatgtcctgccctcctggatggggacacctggacgccacctccgcaggtgaaaaggcgccgtcgccttggggctctataagaactggtgcccaggccgcacacgtgtggacccctgccgccggaagctgttcggtgagctgcgggcgcggactgatggaactgaggttcttgtgtatggactccgccctgagagtgccagtccaggaagagctctgcggattggcctccaagccgggaagcaggcgcgaggtctgccaggctgtcccctgcccggcccggtggcagtacaagctggcagcttgctcagtgtcatgcggcagaggagtcgtccggcgcatcctgtactgtgcccgggcccacggcgaggacgacggagaagaaatcctgctggacactcagtgccagggcctcccgcggccggagccgcaagaggcctgctcacttgagccttgccctccacgctggaaggtgatgtcgttgggaccttgttcagcgtcgtgtgggttggggactgcccgccgctcagtggcctgcgttcagctcgaccaaggacaagatgtggaggtggatgaagccgcatgcgctgcactggtaagaccagaggcgtccgtcccgtgcctcattgctgattgcacctaccgctggcatgtgggcacctggatggaatgctctgtgagctgcggtgacgggatccaaagaagaagagacacctgcctcggaccgcaggcgcaggcccccgtgccggccgacttctgccagcacctgccgaagccggtcaccgtgcgcggctgctgggccggcccgtgcgtcgggcaaggcactcctagcctcgtgccccacgaagaggccgccgccccgggcagaactactgctactccggcgggcgcttcgctggaatggagccaggcgcgaggactcctgttctccccggcgccccaaccccggagacttctgcctggaccccaagagaactctgtgcaatcaagcgcgtgcggaaggcagcacctggaaccgactggaacgatcgacatgcgaggcccgggccaggcagactgtgcggtggctatcggacggccgctgggagaggtcgtgactctccgcgtcctggagtcctcattgaattgcagcgcgggagatatgctcttgctctgggggaggctcacctggaggaaaatgtgccggaagctcctggatatgactttctcgagcaaaactaataccctggtggtgagacagcggtgtggacgcccggggggaggcgtcctgctcaggtacggatctcagctggcgccggaaaccttttatcgcgaatgtgacatgcagctctttggcccgtggggcgagatcgtctccccatcactcagcccggccaccagcaacgccggtggctgccggctgttcatcaatgtggccccgcatgcgagaatcgccatccacgcgcttgccactaatatgggagcagggactgaaggagcaaacgcttcatacattcttatcagagacacccatagcctgcgaaccactgcattccacggtcagcaggtgctgtactgggaaagcgaatcgtcgcaagcagaaatggagttttccgaaggattccttaaggcccaggccagcctgcgggggcagtactggactctgcaatcctgggtgcccgaaatgcaggacccacagtcgtggaagggaaaggaaggcacc

SEQ ID NO: 237953 - DNA, 4281 bp, Artificial Sequence
  derived and/or modified sequence
atgcaccaacgccaccctcgcgcccggtgtccccccctgtgcgtggcggggatactcgcttgcggttttttgcttgggtgttggggaccttcgcatttccagcagtcgtgcctgcaggccctggaacctcaggcagtgagttcatatttgtcgcctggcgcacccttgaaaggcaggccaccatcacctggcttccagaggcagaggcagcggcagcgtcgggcagccgggggtatcctgcatctggaactgctggtggcagtgggacctgatgtgttccaggctcatcaggaggacactgagcggtacgtgcttaccaaccttaatatcggagctgagcttcttcgtgatccctcgctgggagcccagttcagagtccacctcgtgaaaatggtcattcttaccgagcctgagggcgcacctaatatcaccgccaatctgactagttctttgctgagcgtctgtgggtggagccagactatcaaccccgaagacgataccgaccctggccatgccgatctagtcctgtacattacacggttcgacctcgagctccccgatggcaacaggcaagtgaggggtgtaacccaactcggtggagcttgctccccaacatggtcctgcctcattaccgaggataccggatttgacctgggggtcaccattgcgcatgaaataggacacagcttcggccttgagcacgatggcgctcctggtagcggctgcggaccgtcaggacacgtcatggcatctgacggtgctgctccccgggccggcttggcgtggtctccttgttctagaaggcaactgctgagcctgctaagcgctggccgtgcccggtgcgtgtgggatcctcccagacctcagccaggtagtgccgggcatcctcccgacgcccagccagggttatattattcagcgaacgagcaatgccgcgtcgcattcggaccaaaagctgtagcctgcaccttcgcgagagagcacctcgacatgtgccaggccctctcctgtcataccgacccactggatcagtcgtcctgtagtaggctgttggtcccccttcttgacggcacggaatgtggggtggaaaagtggtgtagcaaaggtcggtgccgttccctggttgagttgacacccattgcagccgttcacggaaggtggagctcctggggaccccgcagcccatgctcaagatcatgcgggggaggtgtggtgacccgccgccggcaatgtaacaatccgcgaccggccttcggcgggcgcgcctgcgtgggggctgacttacaggccgaaatgtgcaatacccaggcctgcgagaagacccagttagaattcatgagtcagcaatgtgcacgaaccgatggccagccattgcgaagctcaccaggcggcgctagtttttatcattggggagcagctgtgccgcatagtcagggcgacgctctctgccggcatatgtgccgggctattggggagtcatttatcatgaagagaggggatagctttctggacgggacacgctgcatgcccagtggaccaagggaggacggaactctctccctgtgtgtttctggctcttgtcgcaccttcgggtgtgacggcagaatggatagtcaacaggtttgggataggtgccaggtgtgcggcggggataatagtacctgtagtccaagaaagggtagctttaccgccggaagggcacgcgaatacgtgaccttcctgacggtaacccctaatttaactagcgtatatatcgcaaaccaccgccctctctttacacacctggccgtgagaatcggtggacggtacgttgtggccggcaagatgtctatctctccgaacactacatatccgtcattacttgaggacggccgggtcgaatacagggtagcgctaaccgaggaccggcttcccaggctggaagagatacggatatgggggccattgcaagaggacgccgatattcaagtataccggcggtatggcgaggagtacggtaatctgactcggcccgatataacgttcacgtactttcagcctaagcctagacaggcttgggtttgggccgccgtgagagggccatgctcagtctcttgcggagccggcttgcggtgggttaattactcatgtcttgatcaggctcgcaaggagcttgtcgagacagtgcagtgtcaaggaagtcagcagccccccgcttggccggaagcgtgcgtgctggagccatgccccccatactgggcggtaggcgattttggaccctgctccgcaagctgtgggggtggactgcgcgagcgtcctgttaggtgtgttgaggcacagggctctctgttgaagaccttgccgccagctaggtgtcgtgcaggtgctcaacagccggcagtggcattggagacgtgtaacccccagccttgtcccgccaggtgggaggtatctgagccttcgtcttgcacctcggcagggggggccggcctagcactggagaacgagacctgcgttcccggagctgacgggctagaggcgcctgtgacggagggtcctgggtccgtggatgagaagctccctgcacccgagccttgcgtgggaatgtcctgtccgccaggctggggccacctggacgctacttcggcgggggagaaggccccgagtccatggggatcaattaggacaggggctcaagccgcgcacgtctggacacccgctgcaggttcgtgttcggtgtcctgtgggcgcgggttaatggagcttaggtttttgtgtatggactccgctttgcgagtgccagttcaggaggagctgtgcggactcgcttccaagcctggctcccgccgggaggtgtgccaggctgtcccgtgccccgccagatggcagtacaagctggcagcatgctcagtctcttgtgggcggggtgtggtgaggagaattctgtactgcgcccgggcacatggagaagacgacggtgaggagattctcctggatacacagtgtcagggcttgcctcgcccagaaccccaagaagcctgttcactagagccttgtcccccccgctggaaggtcatgtctctcgggccctgttcagctagttgtggcctgggtacagccagaagatctgtggcctgcgtccaactcgaccagggccaggacgttgaagtcgatgaggccgcctgtgcagctcttgtgcgacctgaggcttcggtgccctgcctgatcgctgactgcacgtacagatggcacgttggtacttggatggagtgtagtgtcagctgtggggatgggattcagcgccggcgtgacacctgtctgggacctcaggctcaggcaccggtgcctgcagacttttgtcagcacttgcccaaacctgtgactgtccgaggatgctgggctggcccatgtgttgggcaaggcacacccagtcttgtgccgcatgaggaagcagctgccccaggccggaccacagcgacccccgccggagctagcctggaatggagccaagctcgaggccttttgttcagccctgctccccagccccgccgcctgctgccagggccacaggaaaactcagtgcagagctccgcatgtggacgccaacacctggagcccactgggacgatcgatatgagaggtcctggacaggctgactgtgccgtggcaattggacgaccattgggtgaggtagtgactctccgggtgttggaaagttctctgaactgtagcgccggagacatgctgctcctgtggggacgcctcacttggcgcaaaatgtgtcggaaactcctggacatgacatttagcagcaagacaaacacgctcgtcgtgagacagaggtgtgggcggccaggaggcggagtccttctccgttacgggtcccagctggccccagaaacattttacagggaatgtgatatgcaactgtttggcccatggggggagattgtctcaccttcccttagccccgccacgtctaacgccgggggatgccgacttttcatcaacgtggcaccacacgcccgcatcgcaatccatgcgttggcgacaaacatgggagcaggtacagagggggccaacgccagttacatcctcatcagagacacacattctttacggaccacggcctttcatggacagcaggtgttgtactgggagagtgaatcctctcaggcagaaatggagttttctgagggttttctgaaggctcaagcttcattacgtgggcagtattggactctccagtcttgggttcccgaaatgcaggacccccagtcctggaagggaaaggagggaact

SEQ ID NO: 237954 - DNA, 4281 bp, Artificial Sequence
  derived and/or modified sequence
atgcatcaacgacatccgcgtgcgcgatgtccgccgttatgtgttgcgggtatattagcgtgtggttttttactaggttgttggggtccgtcgcattttcaacaatcgtgtttacaagcgttagaaccgcaagcggtatcgtcgtatctatcgccgggtgcgccgttaaaaggtcgaccgccgtcgccgggttttcaacgacaacgtcaacgtcaacgtcgagcggcgggtggtatattacatctagaattattagtagcggttggtccggatgtttttcaagcgcatcaagaagatacggaacgttatgtattaacgaatctaaatataggtgcggaattactacgagatccgtcgctaggtgcgcaatttcgtgtacatttagtaaaaatggtaatactaacggaaccggaaggtgcgccgaatataacggcgaatctaacgtcgtcgttattatcggtatgtggttggtcgcaaacgataaatccggaagatgatacggatccgggtcatgcggatttagtattatatataacgcgttttgatttagaactaccggatggtaatcgacaagtacgtggtgtaacgcaactaggtggtgcgtgttcgccgacgtggtcgtgtctaataacggaagatacgggttttgatttaggtgtaacgatagcgcatgaaataggtcattcgtttggtctagaacatgatggtgcgccgggttcgggttgtggtccgtcgggtcatgttatggcgtcggatggtgcggcgccgcgtgcgggtttagcgtggtcgccgtgttcgcgtcgtcaattattatcgctattatcggcgggtcgagcgcgttgtgtatgggatccgccgcgtccgcaaccgggttcggcgggtcatccgccggatgcgcaaccgggtctatattattcggcgaatgaacaatgtcgagttgcgtttggtccgaaagcggttgcgtgtacgtttgcgcgagaacatttagatatgtgtcaagcgttatcgtgtcatacggatccgttagatcaatcgtcgtgttcgcgattattagtaccgctactagatggtacggaatgtggtgttgaaaaatggtgttcgaaaggtcgatgtcgttcgctagttgaattaacgccgatagcggcggtacatggtcgatggtcgtcgtggggtccgcgatcgccgtgttcgcgttcgtgtggtggtggtgtagtaacgcgacgtcgacaatgtaataatccgcgtccggcgtttggtggtcgagcgtgtgtaggtgcggatctacaagcggaaatgtgtaatacgcaagcgtgtgaaaaaacgcaattagaatttatgtcgcaacaatgtgcgcgaacggatggtcaaccgttacgatcgtcgccgggtggtgcgtcgttttatcattggggtgcggcggtaccgcattcgcaaggtgatgcgctatgtcgtcatatgtgtcgtgcgataggtgaatcgtttataatgaaacgaggtgattcgtttctagatggtacgcgttgtatgccgtcgggtccgcgagaagatggtacgttatcgttatgtgtatcgggttcgtgtcgtacgtttggttgtgatggtcgaatggattcgcaacaagtttgggatcgatgtcaagtatgtggtggtgataattcgacgtgttcgccgcgtaaaggttcgtttacggcgggtcgtgcgcgtgaatatgttacgtttttaacggtaacgccgaatttaacgtcggtttatatagcgaatcatcgaccgctatttacgcatttagcggttcgtataggtggtcgttatgtagtagcgggtaaaatgtcgatatcgccgaatacgacgtatccgtcgttattagaagatggtcgagttgaatatcgtgtagcgctaacggaagatcgtctaccgcgactagaagaaatacgtatatggggtccgttacaagaagatgcggatatacaagtatatcgacgatatggtgaagaatatggtaatctaacgcgaccggatataacgtttacgtattttcaaccgaaaccgcgtcaagcgtgggtatgggcggcggttcgtggtccgtgttcggtttcgtgtggtgcgggtctacgatgggtaaattattcgtgtctagatcaagcgcgtaaagaattagttgaaacggtacaatgtcaaggttcgcaacaaccgccggcgtggccggaagcgtgtgttttagaaccgtgtccgccgtattgggcggttggtgattttggtccgtgttcggcgtcgtgtggtggtggtttacgtgaacgtccggttcgatgtgttgaagcgcaaggttcgctattaaaaacgttaccgccggcgcgttgtcgtgcgggtgcgcaacaaccggcggttgcgttagaaacgtgtaatccgcaaccgtgtccggcgcgatgggaagtttcggaaccgtcgtcgtgtacgtcggcgggtggtgcgggtttagcgttagaaaatgaaacgtgtgttccgggtgcggatggtttagaagcgccggttacggaaggtccgggttcggtagatgaaaaattaccggcgccggaaccgtgtgtaggtatgtcgtgtccgccgggttggggtcatctagatgcgacgtcggcgggtgaaaaagcgccgtcgccgtggggttcgatacgaacgggtgcgcaagcggcgcatgtatggacgccggcggcgggttcgtgttcggtatcgtgtggtcgaggtttaatggaattacgttttttatgtatggattcggcgctacgtgtaccggttcaagaagaattatgtggtctagcgtcgaaaccgggttcgcgacgtgaagtatgtcaagcggtaccgtgtccggcgcgttggcaatataaattagcggcgtgttcggtttcgtgtggtcgaggtgtagtacgtcgtatattatattgtgcgcgagcgcatggtgaagatgatggtgaagaaatattattagatacgcaatgtcaaggtttaccgcgtccggaaccgcaagaagcgtgttcgctagaaccgtgtccgccgcgttggaaagttatgtcgttaggtccgtgttcggcgtcgtgtggtctaggtacggcgcgtcgatcggtagcgtgtgtacaactagatcaaggtcaagatgttgaagtagatgaagcggcgtgtgcggcgctagtacgaccggaagcgtcggttccgtgtctaatagcggattgtacgtatcgatggcatgtaggtacgtggatggaatgttcggtatcgtgtggtgatggtatacaacgacgtcgtgatacgtgtctaggtccgcaagcgcaagcgccggtaccggcggatttttgtcaacatctaccgaaaccggttacggtacgaggttgttgggcgggtccgtgtgtaggtcaaggtacgccgtcgttagtaccgcatgaagaagcggcggcgccgggtcgtacgacggcgacgccggcgggtgcgtcgctagaatggtcgcaagcgcgaggtttattattttcgccggcgccgcaaccgcgtcgtctattaccgggtccgcaagaaaattcggttcaatcgtcggcgtgtggtcgacaacatttagaaccgacgggtacgatagatatgcgaggtccgggtcaagcggattgtgcggttgcgataggtcgtccgctaggtgaagttgtaacgttacgtgtactagaatcgtcgctaaattgttcggcgggtgatatgttattattatggggtcgactaacgtggcgaaaaatgtgtcgaaaattactagatatgacgttttcgtcgaaaacgaatacgctagtagtacgtcaacgatgtggtcgaccgggtggtggtgttctattacgttatggttcgcaattagcgccggaaacgttttatcgagaatgtgatatgcaattatttggtccgtggggtgaaatagtatcgccgtcgctatcgccggcgacgtcgaatgcgggtggttgtcgattatttataaatgtagcgccgcatgcgcgaatagcgatacatgcgctagcgacgaatatgggtgcgggtacggaaggtgcgaatgcgtcgtatatattaatacgagatacgcattcgctacgtacgacggcgtttcatggtcaacaagtattatattgggaatcggaatcgtcgcaagcggaaatggaattttcggaaggttttttaaaagcgcaagcgtcgctacgaggtcaatattggacgttacaatcgtgggttccggaaatgcaagatccgcaatcgtggaaaggtaaagaaggtacg

SEQ ID NO: 237955 - DNA, 4281 bp, Artificial Sequence
  derived and/or modified sequence
atgcatcagaggcaccctagagcgaggtgccctcctctgtgtgtggctggaatcctcgcctgtggcttccttctcggctgctggggaccgtcgcacttccaacagtcctgcttgcaggcactggaaccccaggcggtgagttcatatctgtcaccaggggctccacttaaaggcagacctccatccccaggctttcaaagacaaaggcagaggcagcgaagagccgcaggcggaattctgcatttggagctgcttgtggccgtggggcccgatgtgtttcaggcccaccaggaagacacggagaggtacgtgctcacaaatctcaacataggggccgaactactcagggatccgtcgctcggggctcagtttagggtccatttggtcaaaatggttatcctgacagagccagagggggcgccaaacattactgccaacctcactagctcgctgcttagtgtgtgcggatggagtcagacgatcaacccggaggacgacacggacccaggacatgccgatcttgtcctctacattacacggttcgacttggaattgcctgatggcaaccgccaagtcaggggtgtgacccagctgggcggcgcgtgctctccaacctggagttgcttgattactgaggatacagggttcgatttgggggtcaccattgctcacgaaatcgggcactctttcggcttggagcacgatggagctccaggttccggatgtgggccttcaggacacgtgatggcaagtgatggtgccgctcctcgtgccggcctcgcgtggtctccgtgcagcaggcgccagctcctatcgctcctgtcagcggggcgggccaggtgtgtctgggatcctccgcggccacagcctgggtcagctggacaccccccggatgcccagcctgggctctattactccgccaacgagcagtgtcgagtcgcctttggcccaaaggcggtggcctgcacattcgcgcgagagcatctggacatgtgccaggccttgagttgccatactgatcccctcgaccagtcaagttgctcccgattactggttccgctcctcgacgggactgaatgtggtgttgagaaatggtgttcaaaaggtcgatgtcgaagtctggtggaactcacccctattgccgcagttcacggtagatggtcctcttgggggccgagatcgccctgcagcagatcatgcgggggcggagtcgtgactcgaaggcgacagtgtaacaaccctcgcccggcctttggggggagagcctgcgtgggtgctgaccttcaagctgaaatgtgcaacactcaggcgtgtgaaaagacccaactcgaatttatgtctcagcaatgcgcccgcaccgatggccagcctcttaggagctcccccgggggagcgtccttctatcattggggcgccgctgtgccccacagccagggagatgccctgtgccggcatatgtgcagggcgataggcgagagttttatcatgaagcgtggcgactcttttctggacggcacacgatgcatgccgtctggcccccgtgaggacggaacactgtccctgtgcgtgtctggaagctgtaggacctttggatgtgatggccgaatggattcacagcaggtctgggatcgatgtcaggtgtgcggtggcgataactcgacatgttctccaaggaaggggtctttcacagccggacgtgcgagggaatatgtaacctttctgaccgttaccccaaacttgacttcagtttatatagccaaccataggcctctctttacgcatctcgcagtacgcattggtgggagatatgttgtcgcaggtaagatgagcatcagcccgaacactacctaccccagcctcctggaggacggcagagtggagtatagagtcgctttaaccgaggatcgcctgcccagattagaagaaatcagaatatggggtcctctgcaggaggatgctgatattcaggtttatcgaagatatggcgaggaatatggaaacttaacaaggcccgatatcacattcacgtattttcaacctaagccccgtcaggcttgggtgtgggctgctgtgcgagggccctgtagcgtgagttgtggagccggactaagatgggtgaactacagttgtcttgatcaagcccgtaaggaactagtggaaacggtgcagtgccaagggtcccagcagccgcccgcatggccagaggcctgtgtgcttgagccttgtcccccatactgggccgttggtgactttggaccgtgctcggcctcatgcggcggagggttgcgagagagacctgtgcgatgcgtggaagctcaggggagcctgctcaagacacttccccccgcccgctgcagggccggggcacagcagcccgctgtggcactggaaacgtgcaaccctcagccctgtcctgcaagatgggaggtttctgagcccagcagctgcacctctgcaggtggcgcgggcctagccctggaaaatgaaacatgtgtgcctggagctgacgggctcgaggccccagtgacggaggggccgggcagcgtggacgaaaaactgccggcaccggaaccctgcgtaggtatgtcttgtcccccgggctgggggcatttagacgcgacttccgcaggagagaaggcaccttccccttggggttcaatccgaactggcgctcaggcggcacatgtgtggacccccgcggcggggtcatgcagtgtaagctgcggtaggggtctaatggaactgaggttcttatgcatggactctgccttgcgagtaccagtccaggaagaactctgcggtctcgcctctaagcctgggtcaagacgagaagtgtgtcaggcggtgccttgccctgcaagatggcagtacaagctggcggcatgttcagttagctgtggaaggggcgttgtccgaaggattctgtactgcgcacgtgcccacggcgaagatgacggtgaagagatacttctcgatactcaatgtcaggggttgccaagacctgagcctcaggaagcctgcagcctcgaaccttgcccacctagatggaaagtgatgtccctggggccttgttcagcctcatgcgggctggggactgctcgaaggagcgtggcttgtgtacagctggaccagggccaagatgtggaagtcgacgaggccgcatgcgctgccctcgttcgtccagaggcatccgtgccctgcttaattgcggactgtacatacaggtggcacgtgggtacatggatggaatgcagtgtgtcctgtggagacggcatccagcggaggagggatacctgcctgggaccacaggcccaggcgcccgtgcccgcagatttttgtcagcacctgccaaaaccggtgaccgtgcgaggatgctgggctggaccctgcgtgggccagggcactccaagtctagtcccacacgaagaggccgcagcaccagggcgaaccactgctactccagcaggagcttccctggagtggtctcaggcccgtgggcttctgtttagcccggccccacaaccgaggcgtttactgcccgggccccaggaaaactcagtccagtcttctgcatgcggcagacagcacttggaacctacaggcacaattgatatgcgaggcccaggtcaggccgattgtgccgttgcaattggacggcccctcggggaagtggtgactctgagggtcttggagtcatcactcaattgctcggcaggagacatgctcctgctctggggaagacttacttggcgcaagatgtgtagaaaactgttggacatgacctttagtagcaaaacaaatacccttgtcgttaggcagcgctgcggaaggccagggggaggcgtgttgctccgatacgggtcacagctcgcccctgaaacattttacagggaatgtgacatgcagctgttcgggccttggggggaaattgtatctccatccttgtctcccgctacatcaaacgccggcgggtgtaggctgttcataaatgtggcaccacatgccagaatagcaattcacgctctcgctactaatatgggagccggtacagagggcgccaatgcctcctacattctgattcgagacacacactctcttcgaacgaccgcctttcatgggcagcaagtgctgtactgggagtctgaatccagccaagccgagatggaattttctgagggatttctgaaagcacaggcatcactgagagggcagtactggactcttcaatcatgggtgccagagatgcaggatccccagtcatggaaagggaaggagggaaca

SEQ ID NO: 237956 - DNA, 4281 bp, Artificial Sequence
  derived and/or modified sequence
atgcaccagcgccacccgagggcgcgctgtccgcctctttgcgtggccgggattctggcttgcggcttcctgttggggtgctggggaccttcgcacttccagcagtcatgcctgcaggctctagagccccaagctgtctctagctacctttccccaggagcaccgctgaaaggtaggccccctagtccaggctttcagcggcagcgccaacgacaacggcgcgccgctggagggatcctgcacttagaactgttagtggcagtaggtcctgatgtatttcaggcccatcaagaggataccgagaggtacgtgcttacaaatctcaatataggagcagagcttttgcgggacccctcccttggggcccagtttagagtgcacctcgtaaagatggtcattctgacagaacccgagggcgccccaaacatcacagcgaacctgacctcatcacttctgtctgtgtgtgggtggagtcagaccatcaatcctgaagatgataccgatcctggccacgcggacctcgtgttgtatataactcgtttcgacctcgagttacccgacggaaataggcaggttaggggtgtgacacagctgggcggggcatgctcccctacatggtcctgcctcatcaccgaagacaccggattcgacctgggtgttacaatcgcgcatgagattgggcactcttttgggcttgagcacgacggggcaccagggtccggttgtggcccctctggtcatgtgatggcctcagacggcgccgcgcctagagcagggttggcgtggtcaccgtgctccagacgccagctcctctccctgctgagcgccggtagggcccggtgcgtgtgggaccctcctcgtcctcagccaggatcagccggccacccacccgacgctcaacccgggctgtattattccgctaatgaacaatgtcgtgtggcgttcggacctaaggctgtcgcctgcacttttgctcgtgagcacctagacatgtgtcaagcactcagctgccacaccgatcctcttgatcaatctagttgcagccgtcttcttgttccactgctcgatggaaccgagtgcggggtagaaaagtggtgctctaaaggcagatgcagaagtctcgtcgaactgactcctatagccgccgttcatggccgatggagttcctggggaccacggagtccatgtagtcgttcttgtggcgggggcgtggtgacaaggcgtaggcaatgtaataatcccagacccgcgtttgggggtcgggcctgcgttggagccgatcttcaggctgaaatgtgcaacacgcaggcctgtgagaaaacacagctggagttcatgtcccagcaatgtgccaggactgacgggcagccactccgctctagccctgggggagcgtctttctatcactggggagccgccgtgccacatagtcagggagatgccttgtgtcgccacatgtgccgtgcgattggtgaatcctttatcatgaaaagaggagattcgttcctcgacgggacccgttgcatgccctctggcccacgtgaagatggaactctcagcctttgcgtgagcgggtcttgtcggacattcggatgtgacggcagaatggactcccagcaggtgtgggaccgttgccaggtctgcggtggtgacaactctacatgtagtccccggaaggggtcattcactgctggtcgcgctagggaatacgtaacattcctcactgtgacgcccaatctcacatctgtctatatagccaatcaccgacccctttttactcacctcgctgttagaatcgggggcagatatgtggtggcagggaagatgtccatctctccaaacaccacctacccctccctgctggaggatgggcgggtggagtaccgagtggcacttacagaagacagattgccaagactggaagagatccggatatggggaccattgcaggaagatgcagacatacaagtgtatcgtaggtacggagaagaatacggtaatctgacacgacctgacatcacttttacatatttccagcccaaaccacgtcaggcatgggtgtgggctgccgtgcgggggccctgtagcgtttcttgcggcgctggcctgaggtgggtgaactactcctgtctcgaccaagcacgcaaggagctggttgagaccgtccagtgtcaggggagccagcagcccccagcctggcccgaggcttgcgtcctggaaccatgtcctccatactgggctgtgggagattttggaccatgcagtgcgtcttgcggaggagggctaagagagcggccagtgcgctgcgtggaggcgcaagggtcgctgctgaagacactgccaccagcccggtgtagagctggtgcacagcaacctgctgttgctctggagacttgtaaccctcagccctgtccagcgcggtgggaggtgagcgagccctcgtcttgcaccagcgccggcggcgcgggacttgccctggagaacgagacctgcgttcctggggccgacgggctggaagcccctgtgacagaaggccctggatccgtcgacgaaaaactgcctgccccagaaccctgcgtcgggatgagctgtccaccgggctggggccacttggatgctacgtcagctggagagaaggcacccagcccttggggctccattaggactggtgcccaagctgcacacgtgtggactccagccgcaggcagctgttccgtgtcttgcgggcggggcctcatggagctgaggtttctgtgtatggactcagctctgcgtgtgcccgttcaggaagagctgtgcggcctagcatcaaagcctggcagtaggcgagaggtgtgccaagccgtgccctgccccgcccggtggcagtacaaactggccgcctgtagcgttagttgtggaaggggtgtcgtccggagaatcctgtactgcgcaagagctcatggagaggatgacggtgaggaaatacttctggacactcaatgccaggggctgcctagaccagagcctcaggaagcgtgtagccttgaaccttgcccgccgcggtggaaggtcatgtcactgggcccttgctctgcaagctgtggcctgggcactgcgaggaggtcagtggcctgcgtgcagctagaccagggtcaggacgtggaggtggatgaagctgcatgcgccgctctggtgcggcccgaagcttctgtgccttgtttgattgccgactgtacataccggtggcatgtaggaacttggatggagtgtagcgtttcttgtggtgatggaatccagcggcgccgagatacctgtctaggaccacaggcccaggctcctgtccctgcagatttctgccaacatctgcccaaacccgtgaccgtgagaggatgctgggcgggtccctgcgtaggtcagggaaccccatccctggttccacatgaagaagctgcggcaccgggtaggacaacagcgacccccgccggtgcatctcttgaatggtcccaggctaggggactgctgttctctcccgcgcctcaaccacgccggttgctccccggtcctcaggagaactcggtgcagtctagtgcctgtggccgacagcacctggaacctacgggcactattgatatgagaggtcctggccaggccgattgtgccgtggccatcgggaggcccctgggagaagttgtgacactaagggtcctggaatccagcctgaactgttccgcgggagatatgctgctcttgtggggcaggcttacatggagaaaaatgtgccggaagctgctcgacatgaccttcagttctaaaactaatacactggtcgtgcgccagcgttgtggcagaccgggcggaggtgtcctgctgcggtatggcagtcagctcgcgccggagactttctatagagagtgtgacatgcagctgtttgggccttggggggagatagtgtcaccctccctgagtccagccaccagtaacgccgggggatgcagactgtttatcaacgtcgcccctcacgcaaggattgctatccacgctcttgctacgaatatgggcgccggtactgaaggggcgaacgccagttatattttgattagagacacccattctctgagaactactgcgtttcacgggcagcaagtgttatactgggaatccgagtctagccaagccgaaatggagttcagtgagggtttcctcaaggcccaggcctcactccgaggtcaatattggactttacaatcatgggtgcctgagatgcaggatcctcagtcctggaagggtaaagaaggcaca

SEQ ID NO: 237957 - DNA, 4281 bp, Artificial Sequence
  derived and/or modified sequence
atgcaccagagacatccacgtgcaagatgtcctcccctttgtgtcgcaggaatacttgcatgcggatttctgcttggatgctggggtccctcccatttccaacaatcatgtttgcaagcgcttgagccacaagcagtttcgagctacctttcgccgggggcgccccttaaaggccgaccgccatcccccggcttccagagacaacgacagcgacaacgtagagcagcagggggtattctccatctggaacttctggtggcagtgggccctgatgtgttccaagcacaccaggaagatactgagagatatgtgctcactaatctgaacattggtgcagagctcctcagagatccatcgctgggggcacaatttcgggtgcatctggtgaagatggtgatcttgactgaacccgaaggagcccccaacattaccgcaaacttgacgtcctcgctgcttagcgtctgtggttggagccagaccataaaccctgaagatgataccgatccgggtcacgctgatctcgtgctttacattactcgattcgatcttgaactgcctgatggtaaccgtcaagttcgcggagtgacccagctcggaggtgcgtgctcgcctacctggtcctgcctgattacggaggatactggcttcgacctgggagttactattgcacacgaaatcggtcactcttttggccttgaacacgatggagcaccgggttcaggatgtggcccatccggccatgtgatggcaagcgatggagcagccccaagagcgggacttgcctggagcccatgttcacggaggcagctcctttcactcctttccgcaggtcgcgcgaggtgcgtctgggatcctcctaggccacaaccaggatcagcagggcatccgcctgatgcacaaccaggtctttactactcggcaaacgagcaatgtcgtgtggcattcgggccaaaagcggttgcatgtaccttcgcaagggagcatcttgacatgtgtcaagccctgtcttgtcatactgatcctctggaccagtccagctgttccagactgctggtcccgctgctcgacggtactgaatgtggagtcgaaaaatggtgctctaaaggccgctgccgttcgcttgtcgaattgacccccattgcagccgttcacggccgttggtccagttggggacctagatcaccgtgctcccggagctgtggagggggagtcgtgactagacgccgacaatgcaataatccgcgcccagcattcggaggacgggcatgcgtgggtgcagaccttcaagcagagatgtgcaatacccaagcctgcgaaaagactcaactggagtttatgagccagcagtgtgcgaggactgatggacaacctctccggtcgagcccaggaggggcatccttctaccattggggagcagcagtgcctcattcgcaaggggacgccctgtgtcgtcatatgtgtcgtgcaattggtgagtcgttcatcatgaagcggggagattcctttctggatggtacgcgctgtatgccctcaggaccacgcgaagatgggactctctccctttgtgtgtcggggagttgtagaacctttggatgtgatggaagaatggactcgcaacaagtgtgggatagatgccaggtgtgtggcggcgataactcgacctgctctccacgaaagggatcattcactgccggcagagcccgggaatatgtgacctttcttactgtgacgccaaatcttacctccgtgtacattgcgaaccacaggcctctttttactcatcttgcagtccggataggtggccggtacgtcgtggcagggaaaatgtcaatttcaccaaacaccacttacccgagcctccttgaggatggtagagtggagtaccgtgtggctctgactgaggaccgcctgcctcggttggaagagattcgtatctggggtccactgcaagaagatgcagacattcaggtgtaccgtcgctatggggaggaatacggtaatctcactcgtccagacatcacttttacctactttcaacctaagccccggcaagcgtgggtctgggcagcagtgcggggtccatgctcagtgtcctgcggtgcaggactcaggtgggtcaattactcatgtttggatcaggcccgcaaggagctggtggaaactgtgcaatgtcaaggaagtcaacagcctcccgcatggcccgaggcatgtgtgctcgaaccatgccctccttactgggcagtgggggacttcgggccgtgcagcgcttcgtgtggaggaggtcttagagagcgcccggtgagatgtgtggaggcacagggatcgctgctcaagactctccctcctgcgagatgtcgagcaggtgcgcagcaacctgccgtggccctggagacgtgtaaccctcagccttgtcccgccagatgggaagtgtccgaaccctcctcatgtactagcgccggtggtgcaggcctggccctcgaaaacgaaacctgcgtcccaggagccgatggcctggaggcacccgtgaccgaaggacccggatccgtggatgaaaagctgccagcacccgaaccttgtgtgggaatgtcatgcccccctggatggggacatctggatgccacctcagcaggtgagaaggcacctagcccatgggggtcgatccgcacgggcgcacaggcggcacatgtgtggaccccagccgcaggttcatgttcagtctcatgcgggcgcggactgatggaactgcgatttctgtgcatggattcagctctgcgggtccctgtccaggaagagctttgcggacttgcatcaaagcctggatcaagaagggaagtttgtcaagccgtcccttgtccggccagatggcaatacaagctggctgcctgttcggtttcgtgtggaagaggagtggtgcggcggattttgtattgcgcgagagcacatggagaggacgatggagaggaaatcctcctcgatactcaatgtcaaggcctcccaaggcccgaacctcaggaagcctgctcgcttgagccatgtcctcctcggtggaaggtgatgagtcttggaccttgttcggctagctgtggattggggaccgcacgccggtcggtcgcctgtgtgcaattggatcaaggccaggacgtggaagtcgatgaggctgcatgtgcggcacttgtgaggcctgaagcgagcgtgccatgtctcatcgcagactgtacgtaccgttggcatgtgggaacgtggatggaatgttcggtatcgtgcggggacgggatccagcggcgcagagacacctgtctcggaccgcaggctcaagcaccagtgcccgccgatttttgccagcacctgcctaaaccggtgactgtccggggatgttgggccggaccatgcgtgggacaaggtaccccttccctggtgcctcatgaggaagcggccgcccctggacggaccaccgcaacccccgcaggggcctcccttgaatggtcgcaggcgagaggactcctgttttcgcctgcaccccagccaagaaggctcctgcctggaccgcaggaaaactcggtgcaaagctccgcatgtggcaggcagcatcttgaacccactggtactatcgacatgcgcgggcccggtcaggcagattgcgccgtggccatcggacgtcctctgggcgaggtggtgactctcagagtgctcgaatcatcgctcaattgtagcgcgggggatatgctgttgctttggggtcgactgacttggagaaagatgtgccgtaagctgctcgatatgacttttagttcaaaaaccaacaccctggtggtgaggcaacgttgcggaaggccgggaggcggagtgcttcttagatacggttcgcaacttgccccagaaaccttttaccgggaatgcgacatgcaactgtttggcccatggggcgaaattgtgtcgccttccctgtctccggctacttcgaatgctgggggctgcagactcttcatcaacgtggccccccacgccagaattgccattcacgcgctggcaaccaatatgggtgcgggaaccgagggagcaaacgcatcctacatattgatccgggacacccacagcctcagaactaccgcctttcatggtcagcaggtgctttactgggagtctgaaagcagccaggcggaaatggaattctcggaaggatttctcaaggcacaggcgagtctcaggggacaatattggacccttcaatcttgggtcccagaaatgcaggatcctcagagctggaaggggaaggagggcacc

SEQ ID NO: 237958 - DNA, 4281 bp, Artificial Sequence
  derived and/or modified sequence
atgcaccagcggcatccccgggcaaggtgtcccccactgtgtgttgcaggtattcttgcctgcggtttcctgctgggatgttggggaccatcacattttcaacagtcatgtttgcaggcgctggaacctcaggccgttagctcctacctttcaccgggcgcccccctcaagggaaggccaccatccccagggtttcaacggcaaagacaacgacagaggagagcagcaggtggaatcctgcatctggaattgctcgtggctgtgggacctgacgtgtttcaagcacatcaggaagatactgagaggtacgtgctgaccaaccttaacattggcgcagaacttcttcgtgatccttcacttggcgcgcagttcagggtccatttggtgaagatggtcatactgaccgaaccggaaggggcacccaacattaccgctaatcttacttcatcacttcttagcgtgtgtggatggagtcagaccattaatcctgaagatgatactgaccctggtcatgccgacctggtcctttacattactcgttttgaccttgagttgccagacggtaataggcaggtgcggggagtgactcaacttggaggagcatgcagcccgacttggtcatgcctgattacggaggacaccggatttgatctgggagtcaccatagcacacgagattggacactcatttggccttgagcatgatggagcgccaggatccggatgtgggccatcgggccatgtgatggcgtccgatggagcggcacctagagccggtcttgcctggtcgccgtgcagcagacgtcagcttctctcgctgctttccgcaggtagagcacgttgtgtgtgggacccgcccaggccacaacccggaagcgcaggtcatccacccgacgcgcaaccaggtttgtactatagcgcgaacgagcagtgtcgggtcgcatttggaccgaaggcagtcgcctgtacttttgcgagggagcacctggatatgtgccaggcactgtcgtgtcacaccgatcctcttgatcagagctcgtgttctcgactgcttgtgccactgctggatggtaccgagtgcggagtggagaaatggtgttccaaggggagatgccggtcgctggtggagctgactcccatagcagccgtccatggaaggtggtcgtcctggggcccccgctcgccctgctcgcgctcgtgtggcggaggagtggtgacgcggaggcgtcaatgtaacaacccacggcctgccttcggaggtagagcgtgtgtcggcgcagatctgcaagccgaaatgtgtaatactcaagcatgtgaaaaaactcagctcgagttcatgtcccagcaatgtgcacggaccgatggtcagcctctgcggtcgtcccctggaggcgcatcgttctaccattggggagcagccgtgccacattcgcaaggagacgcattgtgcaggcatatgtgtagagcaattggagaaagtttcattatgaagcggggagactcattcctggacggaactagatgtatgccttcgggtccacgcgaggatggcaccctgagcctttgcgtgtccggatcttgtcggacttttgggtgtgatggtagaatggattcgcaacaagtctgggatcggtgccaggtgtgtggtggggacaactccacttgtagcccaagaaagggatcgttcacggcagggagagcaagagagtatgtaacctttctgactgtgactccaaatctcactagcgtgtacattgccaaccatagaccactctttacccatctggcagtgcggatcggtggccgatacgtggtggcagggaagatgtcaattagtccgaacactacctatccaagcctgctggaagatggccgagtggaatacagagtcgctctcactgaggaccgtctgcctcgacttgaagaaatcagaatctggggacccttgcaggaagatgcagacattcaagtgtaccggaggtacggggaggaatacggtaatttgacccgccctgatataacttttacttactttcagcctaagcctagacaggcttgggtgtgggcagccgtccggggaccttgctcggtgagctgcggtgcaggactgagatgggtgaattacagctgtcttgatcaggcccgaaaagagctggtggaaacggttcaatgccaaggatcacagcagccccctgcatggccggaagcatgtgtgctcgagccatgcccaccttactgggccgtcggtgactttgggccctgctccgcatcctgtggaggaggtctgcgagagcgccctgtgcgctgtgtggaggcgcagggttctcttctcaagacccttccgcctgcgagatgtagagcaggagcacagcaacccgcagtggcattggaaacttgtaaccctcaaccctgccctgcacgttgggaagtgtccgaaccttcgagctgtaccagcgcaggcggcgcgggacttgcgctggaaaacgaaacctgcgtgccaggcgccgatggcctggaagcacctgttactgagggtccaggatcagtagatgaaaagctccctgcgcccgaaccgtgtgtggggatgtcgtgcccaccaggttgggggcatctcgatgcaacctcagcaggagaaaaggcaccatcaccatggggctccatcaggactggtgcccaagccgcccacgtgtggactcctgccgccggctcctgcagcgtgtcgtgcgggaggggactcatggaacttaggtttttgtgtatggattcggcactcagggtcccggtgcaagaagaactgtgtggactggcgtcaaagcctggttcgagaagagaagtgtgtcaggcggtcccatgcccggctcgatggcagtacaagctggccgcttgttcggtttcgtgtggaagaggagtggtccggcggattctttactgtgcaagagcgcatggggaagatgacggcgaggaaattctgcttgatacccaatgtcaaggtttgccacgtcccgagccccaagaagcatgctcgcttgaaccatgtcccccacggtggaaggtgatgtctttgggcccatgctcagcatcatgtggtcttggaacggcccggcggtcggtggcctgcgttcagctggatcagggccaggatgtggaagttgatgaagcggcatgtgctgccctggtccggcctgaggcatccgtgccatgtcttatcgcagactgtacttaccggtggcacgtcggtacctggatggaatgctcagtgtcgtgtggagatggaattcagcggcgcagagatacctgcctgggaccccaagcacaagcccccgtccctgctgatttttgtcaacatctccctaagcctgtcaccgtgcgcggatgctgggcaggaccttgcgtcggtcagggcaccccttcgttggtgccccatgaagaggcagcagcgccaggccgcaccacggcgacgcctgccggagcttcacttgagtggtcgcaggcacgggggctcctgttttccccagcaccccaacccagacggcttctccccggacctcaagaaaattcggtgcagtcgagtgcatgtggccgacaacaccttgagcctactggtacgatcgatatgcgtggacctggccaagccgattgcgccgtcgcaatcggccggccactgggagaagtggtgaccttgcgagtgcttgaatcgtcgcttaactgctcagcgggggatatgctgcttctctggggacggctgacttggcgcaaaatgtgcagaaagctgctcgatatgaccttttccagcaaaactaataccctcgtcgtgagacaacgctgcggtaggcctggaggtggagtgctgctcaggtacggaagccaactggcaccggaaactttctacagagaatgtgacatgcaattgtttggaccttggggagaaatagtgtcgccatcattgtccccagcgacttcaaacgccggcggttgtagattgttcataaacgtcgctcctcacgcacggatcgctatccacgcgctcgccaccaacatgggtgcgggtacggaaggtgcgaacgccagctacattctcatccgagatacccactctctgcgcaccaccgcattccacggtcagcaagtgctctactgggagtcggagagctcccaggccgaaatggagttctcggaaggctttctgaaggcgcaagcatctcttcgtggtcaatactggactctccaatcgtgggtgcccgagatgcaagatccccaatcgtggaagggtaaggagggaacc

SEQ ID NO: 237959 - DNA, 4281 bp, Artificial Sequence
  derived and/or modified sequence
atgcaccagcggcatccacgtgctcggtgcccccccctgtgtgtggcaggcatcctggcctgcggcttcctgctggggtgttgggggccctcacattttcagcagagctgtctgcaggcgttagagccgcaggcagtgtcctcatatctatcacctggggcgcccctgaagggtagacctccatctccggggttccagcggcaacggcagcgccaacgccgcgccgcagggggaattctccacttggagctgctggtggctgtggggcctgacgtcttccaggctcaccaggaggacacagagcgatacgtgctcacaaaccttaatattggagcggagctgctgcgcgatccttccctgggcgctcaattccgggtgcatctggtgaagatggttattctcacagagcctgaaggggcgccaaacattacggccaacctaactagctcactgctgagtgtgtgcggatggtcccaaacaattaacccagaggacgacacggaccccggccatgcggatctggtactgtatattacccgattcgacctggagttgcccgatggaaatcgacaggtgcgtggcgttacccaacttgggggcgcctgcagtccaacctggtcctgtctgataaccgaggacactggcttcgacctgggggtaaccatagcccatgagataggacacagcttcggactggagcacgacggggcgcctgggtcaggatgtggcccgagtgggcacgtgatggcatccgacggtgcagccccacgcgctggattagcatggtctccctgttcccgccgccagctgctgtcactcctctcagctggcagggccagatgtgtctgggacccaccccggcctcagcccggctcagctggccacccgcctgacgcccagcctgggctctattatagtgccaatgagcagtgtagggtggcgttcggtcctaaagcagtggcctgtacctttgcccgcgagcacctggacatgtgccaggctctctcctgccacactgatccgctggaccagagctcttgttccagacttctggttcccttgctggatggcactgaatgcggagtggagaagtggtgctccaagggacgctgccgttccctggtagagttgactcctattgccgccgttcatggccggtggagcagttggggtccccgttctccttgcagtcgtagctgtggcggaggtgtggtcaccaggcggagacaatgcaataatccccgaccagcattcggcggccgcgcgtgtgtgggtgcggatctccaggccgaaatgtgcaacacccaagcctgtgagaaaactcaactcgagtttatgagccagcaatgcgccaggaccgatggccagcctctgcggtcttcacctgggggagcctcgttctaccactggggtgctgccgttccgcactcccagggcgatgctctttgtaggcatatgtgtcgcgctattggagaatctttcatcatgaaacggggagacagctttcttgacggcacacgctgcatgccgtccgggcccagggaagatggcaccctttcactatgtgtctcaggtagttgtcgcaccttcggctgcgatggtagaatggatagccagcaagtgtgggatagatgtcaggtgtgcggaggggataattccacctgcagccctaggaaaggcagctttacagccggccgtgcccgagaatacgtcacctttctaacagtgaccccaaacttgacaagtgtgtatatcgccaaccacaggccactcttcacccaccttgccgtaaggatcggtggcaggtacgtagtggccgggaagatgtcaattagccctaacacaacctacccatcactgctcgaggacggcagagtggagtaccgcgtggcactcacagaggaccgattgcccaggctggaggaaatccggatttgggggcccctgcaggaggacgccgatatacaggtctatcggaggtacggtgaggaatatggcaatctgacccggccagatataacgtttacatactttcagcccaagccgcgtcaggcttgggtctgggcagctgtccgagggccttgctcagtgtcgtgcggagctgggctgaggtgggtgaattattcctgcctagatcaggcccggaaggagctcgtagagacggtgcagtgtcaggggtcccagcagcctccggcatggccggaagcatgtgtgctagaaccatgccccccatactgggccgtaggcgatttcggcccctgctccgcttcatgtggcgggggattaagagagagaccagtaagatgtgttgaggctcagggatcactactgaaaaccctcccacccgccaggtgccgggctggggcacagcaacctgcagtggctctcgagacctgtaatcctcagccctgtcccgctagatgggaagtgtctgagccgagctcatgcacatctgccggaggcgcaggacttgccctggaaaatgaaacctgcgtgcccggagccgatgggctggaggcccccgtgaccgagggtccaggtagcgtcgatgagaaactgcccgctccggagccctgcgtaggaatgagctgcccacctggatggggacacctcgatgctaccagcgccggcgaaaaggcaccatctccctgggggtctataagaacaggagctcaagccgcccacgtgtggacgcctgccgcggggagttgttcagtgtcttgcggtcggggactgatggaactcagatttctttgtatggattccgccctgcgggttcccgtacaggaggagttatgtggcctggcgagcaagccggggtcccgtagggaagtttgccaggccgtgccatgtcctgcgcggtggcagtataagctcgctgcatgctcagtatcctgtggcagaggggtcgtgaggcgcattctttactgtgcaagggcccacggcgaggatgacggcgaggaaattctgctcgacacgcagtgccaggggctgccacgccctgagccccaggaagcgtgctcgctggagccctgtcctcccaggtggaaggtcatgtctttgggaccatgtagcgcctcatgcgggctcggaaccgcaagacggtccgtggcctgcgtgcagctggaccagggccaggatgtggaagtcgacgaagcagcatgcgccgccctcgtccgccccgaggccagcgtgccctgtctgatcgctgactgtacatatcgatggcacgtcggcacttggatggagtgctctgtgagctgcggggatggaattcagcgacggcgtgatacttgcttggggccccaggcccaagcaccagtccctgcagatttctgtcagcaccttccaaagccagtgaccgttcgtggctgctgggcaggtccttgtgtcggacagggaacaccatcccttgtcccacacgaagaagccgccgctcccggacgaacaacagcgacgcccgcaggcgcatcactcgaatggtctcaggctaggggcctgctttttagccccgccccacagcctagacggctgttgcctggaccccaggagaattccgtgcagagttcagcttgcggccggcagcatcttgagcctacagggaccatcgacatgagaggtccaggacaagctgattgcgctgtggctatcggtagaccgctgggcgaggttgtgacactgagggtcctggagtcgtccctcaactgttcggccggcgacatgctactgctgtggggccgtctgacatggagaaagatgtgtaggaagctgttggacatgactttctcgtccaagactaataccctggtggtcaggcaacgctgcgggcggccaggtggcggcgtccttctccgctatggaagccagctagcacccgaaaccttctacagagagtgtgacatgcagctgtttgggccatggggtgaaatagtgtcaccttccttgtcaccagccacatcaaatgctggggggtgccgactctttataaatgttgcgccgcatgcgcgtattgcaattcacgctctggcgactaacatgggcgcaggtactgagggagccaacgccagctacattttaatacgcgacacacactccctgaggaccacagcttttcacgggcagcaggtcctttactgggagagcgagagtagccaagcagaaatggaattcagcgaaggcttccttaaagcccaggccagtctcagggggcaatattggaccctccagtcctgggtgcctgagatgcaggatccccagagttggaaaggcaaggaaggcacc

SEQ ID NO: 237960 - DNA, 4281 bp, Artificial Sequence
  derived and/or modified sequence
atgcaccaaagacacccacgggcccgctgcccacctctgtgcgtggcaggaatcttggcatgcggattcctgcttggctgctggggcccctcccacttccagcaaagctgccttcaggctctggaaccgcaggcagtgtcctcttacctctcacctggagcgcccttgaagggacggcctccttcgcccggctttcaaagacaacggcagcggcagcgccgcgcagcggggggcatcttgcatctggaactgctggtagctgtgggtccggacgtgttccaggcgcaccaagaggacaccgagcgatatgtgctgactaacctgaatatcggagcggaactgctccgagatccgagcctgggagcacagttcagagtgcatctggtgaaaatggtcatactgaccgagcctgagggggcaccaaatatcaccgctaacctgacctcgagcctgcttagcgtgtgcggctggtcgcagaccatcaacccagaggacgacacggacccagggcatgctgacctggtactgtacatcacccggttcgacctggaactgccggatggcaaccgtcaggtgagaggcgtcactcagctcggcggagcctgttcgcctacctggtcatgcctgattactgaagataccggattcgatctcggggttactatcgcgcatgagatcggacactcatttggattggaacatgacggagcgcccgggtccggttgcggaccgtcgggacacgtgatggcatcggacggagcggcaccacgggccggcctggcatggagtccgtgtagccggaggcagctgctgtccctgttgtcagctggtcgggctagatgtgtgtgggacccccctcggccacagcctggatcggccggtcatccgcccgatgcgcaacctggtctgtattactcagcaaatgagcagtgcagagtggcctttggaccgaaggcagtggcatgcaccttcgctagagaacatctggatatgtgccaggcgctctcatgtcatacggaccctctcgaccagtcaagctgctcgcggctcctcgtcccgctcctggacgggactgagtgcggagtggagaaatggtgttcgaagggtagatgcaggtcgttggtggagttgaccccgattgcagctgtccacggcagatggtcatcgtggggaccgagatccccctgttcccggtcgtgcgggggaggggtggttacccgccgacggcagtgcaataatccgcgccctgcgtttggaggtagggcatgcgtcggagccgacctgcaggccgagatgtgcaacacgcaagcctgcgaaaagacccaacttgagttcatgtcgcagcaatgcgcccggactgacggacagccgcttaggtccagcccaggcggggcctcattctaccactggggcgctgctgtgccgcactcgcaaggggacgctctgtgtcggcacatgtgtcgcgcaatcggagagtcattcatcatgaagcggggagattcgttcctcgatggaactcgctgcatgccttccggccccagagaagatggcactttgtccctgtgtgtgagcggctcctgccgcacttttggctgcgacggtaggatggattcccagcaagtttgggaccggtgccaagtgtgtggaggggataatagcacttgctccccacgcaaagggagctttactgcgggacgggctagagaatacgtcaccttcctcaccgttactccgaacctcacctccgtctacatcgcaaatcacagaccgctcttcacccatctggcagtgcgcatcgggggtcgatacgttgtcgcgggaaaaatgtcgatcagccccaacaccacctacccgtccctgctggaggacggccgcgtggagtaccgcgtggctctgaccgaggacagacttcctcgcctcgaagagatccgcatctggggccctctgcaagaggatgctgatattcaagtctaccgacggtacggagaagaatacggaaacctgactaggcccgacatcactttcacttacttccagccgaagccgagacaggcctgggtgtgggccgccgtgaggggaccgtgttccgttagctgcggagccggacttagatgggtcaactactcgtgcttggaccaggcccggaaggagctggtcgagacggtgcagtgtcaggggtcccagcagccccccgcttggccagaagcgtgcgtgctggaaccgtgccctccttactgggctgtgggagactttggaccatgctccgcctcctgcggtggtggactgagagagcgccccgtgcgttgcgtggaagcccaaggatcgctcctcaagactctccctccggcaaggtgcagagccggggcccaacaacccgcggttgccctggaaacgtgcaacccacagccgtgcccagcgagatgggaggtgtcggaaccctcgtcgtgtacttcggctgggggtgccggattggctctggaaaatgaaacctgcgtgccaggagctgatggcctggaagcgccggtgactgaagggccgggaagcgtggatgaaaaactcccggcgcctgaaccgtgcgtgggaatgtcgtgcccgccgggatggggacacctggacgccacctcagctggagaaaaggcgccaagcccctggggatcaatccggaccggagcccaggcagcgcacgtctggactcctgccgcgggatcctgctccgtctcgtgtggtagagggctcatggaactccgattcctgtgcatggactccgcgctgcgtgtgcctgtgcaggaggagctttgcggactcgcatccaagcccggatcacggcgggaagtctgccaagcagtcccatgtccggcgcggtggcagtataaactcgcggcgtgttcggtgagctgtgggaggggggtggtgagacggatcctctattgcgccagagcacatggggaggacgacggggaagagatccttctggacacccagtgccagggcctcccgcgcccagagccccaggaggcttgttcactggagccctgtccgcctcggtggaaggtgatgtcgttgggaccgtgcagcgccagctgcggtctgggcactgcgcgccgatcagtggcttgcgtgcagctcgaccagggacaggacgtggaagtggatgaagcggcttgcgccgccctggtgcggcctgaggcctcggtgccgtgtctgatagcagattgcacctacagatggcacgtgggaacctggatggaatgctcagtctcatgcggcgacggaattcaaagacggcgtgacacctgcctggggccgcaagcccaggcccctgtccctgcggacttctgtcaacatctgccgaagccggtcaccgtgcgcggatgctgggcagggccatgcgtgggacagggaaccccatcactggtgcctcatgaagaggctgccgccccgggacgcactacggctactccggcaggagcgtcgctcgagtggagccaagctcggggactgctgttctcaccggcgccgcagccacggcgcttgctgccgggcccacaggaaaacagcgtgcaatcatcagcctgcggcaggcagcacctggagccgactggaactattgacatgcggggcccaggacaggcggattgcgcggtggccatcggtcgaccgcttggcgaggtggtgaccctgcgcgtcctggaatcgtccctgaactgctcggccggtgacatgctgctgctgtggggcagactgacttggcgcaaaatgtgccgcaaattgctcgacatgaccttttcgagcaagactaacactctcgtcgtgcgtcaacgctgcgggcggcctggaggaggagtccttttgcgctacgggagccagctcgcgcccgaaactttctacagagaatgcgatatgcaactgttcggcccttggggtgaaatcgtgagcccttcgctgtctcctgcaacctcgaatgccggcggctgtcgactgttcatcaatgtcgccccacacgcaaggatcgccattcatgccctcgcgaccaatatgggcgccggaactgaaggagccaacgcgtcctacattctcatccgggacactcatagcctgaggaccaccgctttccatggacagcaggtcctgtactgggaatccgaaagttcgcaggcagaaatggaattcagcgaggggttcctcaaggcgcaggcgtcactgcgcggacagtactggaccctgcagtcctgggtgcctgagatgcaggaccctcagagttggaagggaaaagagggaacc

SEQ ID NO: 237961 - DNA, 4281 bp, Artificial Sequence
  derived and/or modified sequence
atgcaccagcgccacccccgagcgagatgccctcccctgtgcgtcgccggcatcctcgcctgcgggtttctccttggctgctggggtcccagtcactttcagcaaagttgtctccaagcccttgagcctcaggctgtgagtagctacctttcccccggggcaccgctcaaaggcagaccacctagcccagggttccagcggcaacgtcagcggcagcgccgtgctgcgggcggaatactgcatctagagctgctggtcgccgtgggccctgatgtgttccaggcccaccaggaagataccgaacggtatgtactgaccaacttgaacatcggtgcggagctgctccgggacccttctttgggggcacaattcagagtgcatctggtgaaaatggtgatcctcacagaaccggagggcgctccaaacattaccgcgaaccttacaagttctctcctgtcagtgtgtggctggagccaaaccattaacccagaggatgatacggatcctggacacgcagacctggtcctgtatatcaccagatttgatcttgaactgcccgatggcaacagacaagtgcggggtgtgacacaattggggggagcttgtagtccgacttggagctgcttgatcactgaggataccgggtttgatcttggcgtgacgattgcgcacgagatagggcacagttttggccttgagcatgatggggcacctgggagcggctgcggaccatctggccatgttatggcttccgacggcgctgccccccgcgccggcctggcctggtcaccctgttcacggcggcaacttctgtctctgttgtccgccgggcgcgcgagatgtgtgtgggaccccccacggccccagccgggaagcgccgggcacccacctgatgcacagccaggcctgtactactcagcaaacgagcaatgcagggtcgcattcggacccaaagctgtcgcttgtacttttgcgagggaacacctggatatgtgccaggcgctctcgtgccatactgaccctcttgaccaatcctcttgctctcgcctgttagttccactcctcgatggtactgagtgtggagtcgaaaaatggtgtagtaaaggccgctgtcgctcacttgtcgagctcacacccattgcggccgtgcacgggaggtggtcttcttgggggcccagatctccctgctctcgatcctgcggcgggggcgtggtgaccaggcgacgccagtgcaacaaccccaggccagcttttggaggacgagcctgcgtgggtgcggacctgcaggcagagatgtgtaacacacaggcctgtgagaagactcaacttgaatttatgtcccaacagtgtgccagaaccgacgggcagccattaagatcatcacccgggggcgctagcttctaccattggggtgctgctgttccccatagtcagggggacgctctgtgcaggcacatgtgcagagctatcggagaaagctttatcatgaaaaggggagacagttttttagacggcacgaggtgcatgcccagcggcccacgcgaagatgggactctgagtctctgtgtcagtggttcatgtagaactttcggctgcgatggacgtatggatagtcagcaggtatgggataggtgccaggtgtgcggaggggacaactcaacttgtagcccaagaaagggaagcttcaccgcaggccgtgcccgagagtacgtgaccttcctgaccgtaactcctaatctcacttcagtctatatcgccaaccacagaccactgtttacacacctggctgtgagaataggcggcaggtatgtggttgctggcaagatgtccatatcgcctaatactacatatccctctctcttggaagatggtcgagtggagtacagggtagcactgaccgaagaccgccttcccagactcgaagaaatacgaatttgggggccactgcaggaagatgcagatatccaggtgtaccgacgctacggcgaggagtatggtaatctaacccgccccgatatcacgttcacatatttccaacctaaaccccggcaggcttgggtgtgggccgctgtgagggggccctgttctgtgtcatgcggcgcgggtctgcgttgggtgaattattcttgtctagaccaggccaggaaggagttggtggagacagttcagtgtcaggggagtcagcagccaccagcatggcctgaagcgtgcgtcctggagccctgcccgccatattgggccgtgggagactttgggccctgctccgcttcctgtggtggcggacttagagagaggccggtccgatgtgttgaagctcagggttcgctgttgaagacactccctcctgcccgatgccgagcgggggcacagcagcccgcggtggctcttgaaacatgcaacccacaaccttgtcctgcccgatgggaagtatctgaacctagctcctgtacgtcagccggcggtgccggtctcgccctagagaacgagacctgtgtccccggagcggatgggctagaagccccagtgacagagggaccaggaagcgtggatgaaaagctgccagccccagagccgtgcgtgggaatgagttgtcctccaggctggggacacctggatgcaacttccgccggtgagaaagcaccatctccctggggttcaattaggactggagcgcaggcagcccatgtttggacacccgccgcgggatcatgttcagtctcatgtggccgcggactgatggagttgagatttctctgcatggattccgctttacgcgtgcccgtgcaagaggaactgtgcgggctggccagtaaaccagggagccggcgggaggtgtgccaggcagttccgtgtcccgcccggtggcagtacaaactcgcggcctgcagtgtctcatgtggcagaggcgtcgtgcggcggatcctatattgtgccagggcccatggcgaggacgatggcgaggaaattcttctcgacacccaatgccagggcttgcctcggccggagcctcaggaggcatgttccctggagccctgtccgccgaggtggaaggttatgtcactggggccctgttccgcgagctgtggacttggaacagctcgacgatcagtggcgtgtgtccagttggaccagggacaggatgtggaggtagatgaagctgcctgcgccgccctggtcagacctgaggccagcgtcccgtgtttgattgccgattgtacatatcgctggcacgtgggtacttggatggagtgctctgtttcttgtggcgatggcatccagaggcgacgcgatacctgcttgggccctcaagctcaggcccccgttccagccgacttctgtcaacacctaccgaagcctgttaccgtccgaggctgttgggctggcccctgtgtcgggcaggggacaccatctctcgttccgcatgaggaagcggccgccccaggccggacgactgccacacccgcgggggccagcttggaatggtcccaggcccgcggcctgctcttctcgcctgccccccaaccaaggcgccttctaccaggccctcaggagaattctgtgcagtcttctgcgtgtgggcgccagcacctcgaacctacaggcacaatcgatatgcgaggcccagggcaggcagactgcgcggtcgccattggtcggccactcggagaagtagtgacccttcgcgtattggagtcgagcctcaactgctctgccggcgacatgctcctgttgtggggacgtctgacctggcggaagatgtgcaggaagctgctggatatgacatttagtagtaaaacaaatactctggtggtacgacagagatgtggccgcccgggaggcggagtattgttgagatacgggtcacagttggctccggagaccttttatcgggagtgtgatatgcagctgtttggaccttggggagagatcgtgagcccatctctgtcgccagctacgtccaacgccgggggttgccgactatttattaatgtcgctccacatgcccgaattgccatccacgctctggctactaacatgggggccggtacggaaggtgctaacgcctcctatatcctcatccgggatacccattctctgcggacaactgcatttcatggccagcaggtgctgtactgggaaagcgaatcctctcaggctgagatggagttctccgagggctttctcaaagcacaggctagcctccgaggacaatattggacgttgcagtcttgggtgcccgaaatgcaggacccccagtcttggaaggggaaggaggggacc

SEQ ID NO: 237962 - DNA, 4281 bp, Artificial Sequence
  derived and/or modified sequence
atgcatcagaggcatccgcgggcccggtgcccacccctgtgcgtggcgggtatattggcctgtggatttctactcggatgctgggggccttcccatttccagcaaagctgtttgcaggccctggagccccaggcggtctcttcttacttgtcacccggtgcgccactgaaagggcgtccaccctcaccaggcttccagcgccagagacagcggcagcggagggcagccgggggaatcctgcacctggagctcctagtagccgtaggcccagacgtgtttcaagcccaccaagaagacaccgaacgctatgtcctgaccaatctgaatattggggctgagctgttaagagatccaagtctgggagctcagtttcgagttcatctagtaaagatggtcatcttaacggaacctgagggtgcccctaacataactgctaatctgactagctctctcctgagtgtgtgcggatggagccagaccatcaatccagaggatgataccgacccgggccacgcagatctcgtactgtacatcacccggttcgatctggaactgcccgatggtaaccggcaagtgcgtggagtgactcagctggggggggcttgttccccaacttggtcttgcctcattacagaggacaccggtttcgacctaggggtaactatcgcccacgagattggccattctttcgggttggagcacgacggcgcaccaggatctggttgtgggccctcgggccacgttatggcgagcgatggagcagccccacgtgcaggactagcctggtcaccttgctccagacggcagctcctgagcttgctaagtgcaggtagagcacgatgcgtgtgggatcctcccagaccacagccgggaagtgccggccaccctcctgatgcgcagcccggactatactattcggcaaatgagcagtgtcgggtcgcctttggcccaaaagccgtagcttgcacgttcgccagagagcatttagacatgtgccaggccctgtcctgtcacaccgatccactggatcagtcatcttgtagcaggctgctggtgcctctgctggatggaactgagtgcggcgtggaaaagtggtgcagtaaggggaggtgcaggtctcttgttgagttgacccccatcgcagccgttcatggaaggtggagctcgtggggaccgcgaagcccttgctcacggtcttgcgggggcggtgtggtgaccagacgacggcagtgcaacaatccgcgcccagccttcggaggaagagcatgcgtaggtgccgatctgcaagctgagatgtgtaacacccaggcctgcgagaaaacgcagctggagttcatgagccagcagtgtgctaggacagacggccagcccctgcggtcctctccagggggtgcctccttttaccattggggcgcggcagtgccccacagtcaaggagacgctttgtgcagacacatgtgccgcgccatcggcgaatcttttataatgaaacggggcgattcctttttggatgggactagatgcatgccttcaggcccccgggaggatggaacactgagcctctgcgtgagcggctcttgccgtaccttcggctgcgatgggagaatggacagccagcaggtatgggatagatgtcaagtatgcggcggtgacaactcaacatgtagcccccgcaaggggagctttactgccgggagggcacgggaatatgtgacttttctaactgttacacctaacctgacatccgtttacatcgctaaccaccggccgctcttcactcaccttgctgtgagaatcggaggccgctacgtcgtcgccgggaaaatgagtatcagcccaaacacgacctacccgtcgcttctagaagacggaagggtggagtaccgggttgctctgactgaagatcgcctgccaagactggaagagattcggatttggggccctttgcaagaagacgccgatatccaggtttatcgtcggtacggcgaagagtacgggaacctgacgagacccgacataacgttcacttacttccagcccaaaccgagacaagcttgggtatgggctgctgtcagaggaccatgctcagtgagttgcggggctggccttcggtgggtgaactacagctgtttggaccaagctcgaaaggaactggtcgaaaccgtgcagtgtcagggcagtcagcagcctccagcttggccagaggcttgcgtgctcgagccctgcccaccttactgggcagtgggagactttggaccgtgttccgcctcatgcggtggcggtctcagagagcgtccagtaagatgtgtggaagcccagggaagcctactgaaaaccctgccaccagcaaggtgtagggctggggcgcagcagcctgctgtcgcattggagacgtgtaatccccagccatgccctgccagatgggaggtatctgaaccttcctcctgcaccagtgctggcggagctggcttagcgctcgaaaatgagacttgtgtaccaggagccgacggactggaggcccctgtaacagagggtcccggatcagttgacgaaaagcttcccgcaccagagccatgcgtggggatgtcatgcccccccggatggggacatctcgatgccactagcgccggagaaaaagctccatcaccatggggcagcatcagaacaggggctcaggcagctcacgtatggacccccgccgcgggctcttgttccgtgtcctgcgggcgcgggctgatggagctgagattcctctgtatggatagcgctctgcgcgtaccagttcaagaggaattgtgtggactagcttcaaaaccggggtccaggcgagaggtgtgccaggctgtaccctgtcccgctagatggcagtacaaattggccgcctgctctgtttcttgtggtcggggggtggtgcgccgcatcctttattgcgcaagagctcatggagaggacgacggcgaggagatcctgcttgacacacagtgccagggtttacctcggcccgaaccgcaagaggcctgctcattggagccttgtccccctagatggaaagtgatgagccttggaccctgcagtgcctcttgtgggctggggacagctcggaggagcgtggcttgtgttcagctggaccaggggcaggacgtggaagtggatgaagcagcttgcgccgcgttggttagacccgaagcctcggttccctgtttgatcgcagattgcacttaccgttggcatgtcgggacctggatggaatgcagcgtgtcttgtggcgacggtatccagcggcggcgggacacctgtttaggccctcaggctcaggctcctgtccctgcagacttctgccagcacctgccaaaaccagttacagttagggggtgttgggcagggccctgcgtcggacaggggactccaagcctggtgccgcacgaggaggctgccgcacccggacgcaccactgcgacaccagccggggcttccctggagtggtcccaggctcgcggcctgctattcagtccagccccccagccccggcggttacttcccggtcctcaagagaatagcgtgcagtcttctgcctgtggccggcagcacctcgaacccaccggcactatcgacatgcggggaccgggtcaggccgactgcgcagtagcaatcggcagaccactgggagaggtggttacacttagagtgctggagagtagccttaactgctcagctggcgatatgctgctcctatgggggaggctcacttggcggaaaatgtgtagaaagttgctcgatatgactttttcgtctaagacaaacaccctggtagtgagacagaggtgcggccgcccggggggcggcgtccttctgaggtatggtagtcagctcgcccctgagaccttctatagggagtgtgatatgcagctctttggcccatggggggagattgtgtcaccatccctttcccccgccacaagcaacgccggaggatgccgactgtttatcaacgtggctcctcatgcacggattgctatccacgccctggccactaatatgggcgcaggaacagagggagccaatgctagctacattctgatccgggatactcactctttgcgaaccaccgcctttcatggacagcaggtactttattgggaatccgagtctagccaggcagaaatggaattctcagaggggttcctaaaagcgcaagcttcattgcgcggacaatactggacacttcagtcttgggtcccggagatgcaagaccctcagagctggaaaggcaaggaaggaact

SEQ ID NO: 237963 - DNA, 4281 bp, Artificial Sequence
  derived and/or modified sequence
atgcatcaacgccatcctagagctcgctgcccacctctgtgtgtggcgggaatcctggcatgtggctttctgctgggatgctggggaccttcgcacttccagcagagctgtctgcaagcactggaacctcaagcagtctcgtcctacctgagcccgggggccccactcaagggcagaccaccgtcgcctggatttcagagacagagacaacgtcagcgccgagcagccggggggatcctgcatctcgaacttctcgtggcagtgggtcctgatgtgtttcaggctcaccaagaagatactgagcggtacgtcctgactaacctgaacattggtgcagagctgctgcgcgacccttcgcttggtgcacaatttcgggtccacctggtgaaaatggtgattctgaccgaaccagaaggagcaccaaacatcacggcaaacctgacctcttccctgctctcggtgtgtgggtggagccagactatcaatcctgaggatgacaccgacccagggcatgcagatcttgtcctgtacatcactaggttcgatcttgaattgcccgacggtaaccgccaggtgcggggagtcacccaactgggtggtgcatgttcgcctacctggagttgtctcatcactgaagatactgggtttgatctcggggtgactattgcacatgaaattgggcattcattcggacttgaacatgacggggctcctggtagcggttgtggcccatcgggacatgtgatggcttcggatggtgcagcacctcgtgcaggactggcctggtcgccatgttcacgtcggcagcttctctcgctgctttcggcggggcgggcaagatgtgtctgggatcccccaagaccccaacctggctcggcaggccacccaccagacgcacagcccggtctttactattcggctaacgagcagtgtagggtggcgttcggacctaaggcagtcgcatgtacttttgcccgggaacaccttgatatgtgccaagccctgagctgtcatactgatcccctggatcagtcgtcctgttcgcgcctgcttgtgccccttctggatggaactgaatgtggcgtggaaaagtggtgctcgaagggtaggtgtcggtcgctggtggaacttactcccatcgcagctgtgcatggaaggtggtctagctggggtccacgctctccatgttcaagatcctgcggtggaggtgtcgtcactcgtagaaggcagtgcaataacccaagaccagcatttgggggcagagcctgtgtgggagcggacctccaggcagagatgtgtaatactcaggcatgcgagaaaactcagcttgaattcatgtcccaacagtgcgcccggacggacggtcagccccttagaagctcacctgggggtgcgagcttctaccattggggagcagcagtgccgcatagccaaggtgatgcactgtgtcgccacatgtgtcgtgcaattggtgagagcttcattatgaagcgcggggattcatttctcgacggaacgcgctgtatgccaagcggacctagggaagatggtactctgtccttgtgcgtctcgggcagctgtagaacttttggctgtgacggccggatggattcgcaacaggtgtgggatcgctgtcaagtctgtggaggtgacaattcaacttgttctcctagaaaaggtagctttaccgcaggtagagccagagaatacgtgacctttcttaccgtgaccccgaacctgacctccgtgtacatcgcaaaccacaggcccctctttacgcacctggccgtgcgaatcggcgggaggtatgtggtggcagggaagatgtcaatcagccccaatactacctacccctcgctcctggaagatgggagggtggaataccgagtcgcacttaccgaggatcgactcccaagattggaagaaatcagaatctggggtccccttcaggaagatgccgacatccaagtgtacaggcgctacggcgaagagtacgggaaccttactagaccagatattaccttcacctactttcaaccaaagcctagacaggcctgggtgtgggcagcggtgcggggaccctgcagcgtcagctgcggcgcaggtttgagatgggtgaattactcatgcctggatcaagcacgaaaagaactcgtggagactgtgcaatgtcaaggaagccaacagcctcctgcatggcctgaggcctgtgtgctcgagccttgtcctccttactgggccgtcggagattttggtccttgttcggcatcctgcggcggaggtttgcgcgaaagacctgtccgttgtgtggaagcacagggaagtttgctcaaaactctgccccctgcacgctgtagagccggtgcacaacaacctgcagtggccctggaaacctgtaatcctcaaccgtgccctgctagatgggaagtgtcggaaccctcttcgtgtacctctgcgggaggggctggactggcactcgaaaatgagacttgcgtcccaggagctgatggtctggaggcgccagtgactgaaggacccggtagcgtggatgaaaagctcccagcaccagagccttgtgtgggaatgagctgtccccccggatggggacatctggacgcaacgtccgccggagagaaggccccatcgccatggggaagcattcgaactggtgcacaagcagcccatgtgtggacccctgcggcaggctcatgttcggtgagctgtgggcgaggtcttatggagttgcgttttttgtgtatggattccgcccttcgggtgcccgtccaagaggaactttgtggtctggcatccaagcctggttcgaggcgagaagtgtgccaagccgtgccatgtcccgcaaggtggcaatacaagctggcggcttgttccgtttcttgtgggcgcggagtcgtgagacgaatactttactgcgcacgagcacacggggaagatgatggagaggaaattctgctcgacactcagtgccagggtttgcccaggcccgagccacaagaagcatgttcccttgaaccatgtccaccaagatggaaggtgatgagcttgggaccctgttccgcatcatgcggactcgggaccgcaaggcggagcgttgcatgtgtgcaacttgatcaaggacaggatgtcgaagtggacgaagcggcttgcgccgcacttgtcagaccggaagcaagcgtcccttgtctcatagcggattgtacttaccgctggcacgtgggcacttggatggagtgttccgtcagctgtggagacggaatccaacgcagacgggatacttgtcttggcccacaagcccaggcccctgttccagcagacttttgtcaacatctgcccaaacccgtgaccgtccggggctgttgggcaggaccatgtgtcggtcaagggaccccctcactggtccctcatgaggaagcagctgctcccggacgtaccaccgcaacccccgcaggcgcatcacttgaatggtcacaagcacggggtttgctgtttagcccagcaccacagcctcgcagacttctgccagggccgcaagagaattcggttcaatcctcggcatgcggtagacagcacctcgagccaactggaactattgacatgagagggcctggacaggcagattgtgcagtggcaatcggccggcctcttggggaagtggtgaccctgagagtcctggagtcatcccttaactgttccgcgggtgatatgctcctcctgtggggtcggcttacttggagaaagatgtgtagaaagctccttgatatgaccttttccagcaagaccaacacgctggtcgtcagacaaagatgtggcaggccaggtggtggcgtgttgcttcgctacggctcccaactggcaccagaaaccttttatcgtgaatgtgacatgcaactgttcgggccgtggggagagattgtgtcaccttctctttcccctgctaccagcaacgcaggtggctgtcgtctgttcattaacgtggcccctcatgctcggatcgcaattcatgcacttgcaaccaacatgggtgccggaactgaaggggccaacgcatcatacattctcattagagatactcattcgcttcgcaccacggcattccatgggcagcaagttctgtactgggaatcggaatcatcgcaggcagaaatggagttttcggaagggttcctcaaggcacaagcatccctgcgtggtcagtactggactcttcagtcatgggtgccagagatgcaggaccctcaatcatggaagggaaaggaaggaact

SEQ ID NO: 237964 - DNA, 4281 bp, Artificial Sequence
  derived and/or modified sequence
atgcaccagcgtcaccctagagctcggtgcccacctctgtgcgtggcaggtattttagcttgcggatttttgttaggctgctggggtccttcccactttcagcagagctgtcttcaggccctggaaccccaggctgtgtcttcttacctttctcccggagcgcctctcaagggaaggccacctagtcctggattccaacgacagaggcagagacagaggagggccgcaggaggtatcctgcatctagagctgcttgtagcagtgggcccagacgtctttcaggcccatcaggaagatactgagaggtacgtacttactaacctgaacattggcgctgaactgctgagggacccaagtctcggagcgcaattcagagtgcatctggtcaagatggttatactaactgaacctgagggcgccccgaacatcaccgcaaacctcacttcttctctccttagcgtatgcgggtggtcacagaccatcaatcctgaggatgacaccgaccccggacatgccgacctggtgctgtatattacgaggttcgacctggaacttcccgatggaaaccggcaggtgcgtggtgtgacccagttagggggggcatgttccccaacttggtcttgcctgatcaccgaagatacggggtttgatctgggagtgactatcgctcacgagatcggacatagcttcggtctggagcacgatggcgcccccgggagtggctgcggcccaagtggacacgtaatggcctcagatggtgccgcaccacgcgcagggctggcttggagcccgtgttctaggcggcagctgctatctctgctatccgctggccgggcgcgttgcgtttgggacccaccgaggcctcagcccggatctgctggccatcctccggatgcacaacctggcttatattacagcgctaatgagcagtgccgcgttgcgtttggacccaaggctgtagcatgtactttcgctagggagcatctggacatgtgtcaggcacttagttgtcacacagacccattagatcaatcctcatgcagcaggttactggtcccgttgctggatggaaccgagtgcggagttgagaaatggtgcagtaagggacgctgtcgaagtttggtggaattaaccccaatagcggccgtccatgggagatggtcatcatgggggccccgtagtccttgctcacgcagttgcggcgggggcgtggtgacccgaagacgtcagtgcaacaaccccaggcctgctttcgggggcagggcctgcgtgggggcagacctgcaggctgagatgtgtaacacccaggcctgtgagaagacacagctcgagtttatgtctcagcagtgtgctcgcacagatgggcagccactacgatcgtccccaggaggggcgagtttctaccactggggagccgccgtgcctcacagtcagggcgacgctctgtgtagacatatgtgcagagcaattggggaatcttttattatgaagaggggcgacagttttctcgatggaacgcggtgtatgccttctgggccccgggaagatgggacactgtccctttgtgtgagtggctcttgtcgcacctttggctgcgacggcagaatggactctcaacaggtctgggataggtgtcaagtatgcggtggcgataattctacatgcagcccaaggaagggatccttcacagcaggcagagctcgcgagtatgtgacctttctcacagtaacccccaatttaaccagtgtctatatcgcaaatcatcgacctctctttacccatctggctgtgaggatagggggtcgctacgtcgtggccggaaaaatgtctatctcccccaacaccacttacccctctctgctggaggacggtcgagtagaatacagagtggcactgactgaggatcgtctgcccaggcttgaggaaataagaatctgggggccattgcaggaggatgccgacatccaggtgtaccggagatatggcgaagaatacgggaatctgacaagacctgacattacgtttacttattttcagcccaaaccaaggcaggcatgggtgtgggcagccgtgagagggccctgtagtgtgtcgtgcggagctggcctgcgctgggtgaactacagttgcctggaccaggctcgtaaagagctcgttgaaacagttcagtgtcagggttctcaacagcctcccgcgtggcctgaagcttgtgtcctggaaccttgcccgccgtattgggcagtgggcgacttcggcccctgttccgcttcgtgcggaggcggcttgagggagaggcctgtacgctgtgtagaagcacagggaagcctactcaagacccttcccccggctagatgtagagcaggagcacagcagcccgccgttgccctcgagacctgtaaccctcagccctgccctgcgagatgggaggtgtcagaacccagcagctgtacatcagctgggggcgccggactggccctggagaacgaaacctgtgtgcccggggctgatggactggaagcccccgtgaccgagggaccaggctcggtggatgaaaagctcccagctcccgagccgtgcgtgggaatgagttgccctcctggctgggggcacctcgacgccacctccgctggcgagaaagccccttcaccatgggggtcgattcgaaccggtgcccaagctgcacacgtgtggaccccagccgcaggtagctgctccgtgtcctgcggccgcggattgatggagctgcgatttctgtgtatggactccgccctgagagtaccggtccaggaagaactgtgtggactggcttcgaagcctggcagtaggcgtgaggtgtgccaggccgtcccttgcccagcacggtggcagtacaagcttgccgcttgctcagtgtcttgcgggcgtggcgtggttcgaagaatactctattgcgccagggcgcacggtgaggatgatggtgaggagatcctgctagatacgcaatgccaaggtctccctcgtcctgagccgcaggaggcatgtagtttggaaccttgcccaccccggtggaaggtgatgtcactgggcccttgtagcgcgtcctgtggccttgggaccgctagacgctcagtggcatgtgtgcagctggaccagggtcaggatgtggaagtggatgaagccgcctgtgccgcactagtgaggcctgaggcgtccgtgccttgtctcatagccgattgtacctaccgatggcacgtggggacctggatggaatgctcggtgagctgtggagacggaattcaaaggagacgcgacacctgccttgggccacaggcccaggcccctgtcccagccgacttttgtcagcacctgcccaaacctgttaccgtgcggggctgctgggctggaccctgcgtcggccagggcaccccgtctctggttcctcacgaagaggctgctgcccctgggcgtacaactgctaccccagccggggcgtctttggagtggtcacaggctaggggtttgctgttcagcccagccccacaacctagaagactactgcccggcccccaggaaaacagcgtgcagtcatctgcatgcggccgccaacaccttgagcctactggcactattgatatgcggggacccggacaagccgattgtgcagtcgccatcggacgtcctcttggggaagtagtcacactgcgggtgcttgagtcatcccttaattgctctgccggtgatatgctgctattgtggggcaggttgacctggcgaaagatgtgcaggaaactacttgatatgacgttttctagcaagaccaataccctcgtggttaggcagagatgtggacgacccggaggaggagtgttgctgcggtacggctcacagctagctcctgagacgttctaccgggaatgcgacatgcagctgtttggaccgtggggcgagattgtcagccccagccttagtccagcaacatctaatgccggcggctgcagattgtttattaatgtagctccccatgcacgcatcgctattcatgccctcgccacaaatatgggcgcagggactgagggcgcaaacgcctcctatattctgattcgcgacacccacagcttgagaactactgcgttccatggacagcaggttctctactgggaatctgagagctctcaggctgagatggagttcagtgaaggattcctaaaggcacaagcctcattgcgcggacagtactggacccttcagtcctgggtgcccgaaatgcaagatccacagtcttggaaggggaaagaaggcacc

SEQ ID NO: 237965 - DNA, 4281 bp, Artificial Sequence
  derived and/or modified sequence
atgcatcagaggcatcctcgcgctaggtgtcctcctctgtgcgtcgcaggaattttggcctgcggcttcctcctcggctgctgggggccaagccactttcagcagagctgtttgcaggctctcgaacctcaagccgtgtcatcctacctgtcccccggcgcccctctaaagggacgacccccaagtcctgggttccagagacaacgacagcggcagcgccgtgcagcgggcggtatattgcatctggagctgctggtagccgtgggacctgacgtgtttcaggcccaccaggaggataccgaacgctatgtgctgaccaacctcaacattggcgcggagctgcttcgggatccttccctcggtgcccagtttagagtacacctagttaagatggtgattctgaccgaacccgaaggcgcacctaatattaccgctaacctaacgagtagtctgctgagcgtgtgtggttggtcccagacaattaaccctgaggacgataccgatccaggccacgccgatctagtgctttacattacccgatttgaccttgaattaccggacggaaaccggcaagtccgcggggtaactcagcttgggggtgcatgctcaccaacttggtcctgtctaatcacggaagacaccggctttgacctaggggttacaattgcccacgaaattggtcacagctttgggctcgagcatgacggggcaccgggatccggatgtgggccttcaggacatgtcatggcgtctgacggggctgcacctcgcgcaggactggcctggagcccatgttccaggaggcaactgctttctctcctttccgccggcagggcacgatgtgtgtgggatccacctcggccccagcccggaagcgccggtcaccccccagacgctcagcccggactctactacagtgccaacgagcagtgtagggtagcgttcggacccaaggcagtcgcctgtacattcgcccgggagcatctggatatgtgccaggcactatcctgccataccgaccctctggaccaatcttcttgctctagactcctagtgccactacttgacggcaccgaatgtggagtggagaagtggtgcagcaaggggcgctgtagaagcctggtcgaattaactccgatcgctgccgtgcacgggcgttggtcaagttgggggcccaggtccccttgcagccgaagttgtggaggcggggttgtcaccaggcgacgccaatgtaataaccctaggcctgcctttggaggccgggcttgtgtgggagcggatctgcaggcagagatgtgcaatacccaggcgtgcgagaagacccagctagagtttatgtctcagcaatgcgcccgaactgatgggcagcctctccgatcatcccccgggggtgctagcttttaccattggggggccgctgtccctcacagtcagggcgatgccctgtgccggcacatgtgtcgcgcaatcggggagtcatttatcatgaagcgaggagactcgttcctggatggtacgcgctgtatgccctctggccctcgcgaggacggaacactttccctgtgtgtcagcgggagctgcagaacgttcgggtgtgatggccggatggactctcagcaggtgtgggacaggtgccaggtatgtggaggcgataactctacttgctcacctcgaaaagggagcttcaccgcaggccgtgctagagaatacgtgacgttcctaaccgtcaccccaaatttgacgtccgtgtacattgctaatcacagacccctattcacacatctggctgtgcgaattggtggcagatatgtcgtggcagggaagatgagtatctcaccgaatacaacgtacccttcactgcttgaggatgggcgtgtggagtacagggtcgcattgacggaggaccggctgccccgcctcgaagaaatcaggatctggggccctctgcaagaggatgccgacatccaggtgtacaggaggtatggcgaggaatacgggaacctgactcgtccggatatcactttcacatatttccaaccaaaaccaagacaagcctgggtctgggcggccgtaaggggcccttgttctgttagctgtggagcaggccttagatgggtcaattatagttgcctggatcaagccaggaaggagctggtggagaccgttcagtgtcaggggtctcaacagccacctgcttggcccgaggcatgcgtgctcgaaccttgccccccatactgggccgtgggagatttcggcccatgttcggcctcttgtggtgggggactccgggagaggcccgtacggtgcgtggaggcccaagggagtctgctaaagactttgcccccagcgaggtgtagagcgggtgctcagcaaccagccgtcgctctggagacgtgtaatccacaaccttgccctgcccgctgggaggtttccgagcctagttcctgcacgtctgctggaggcgcagggctcgccctggaaaatgagacgtgtgtccctggcgccgacggtctagaggctcctgtgactgagggtccaggatccgtggacgagaaattgccagccccggagccttgtgtcggcatgtcttgtccccctggctgggggcatctggacgctacctccgcgggtgaaaaagcacccagcccctggggatctatcaggactggagcgcaggccgcgcacgtgtggaccccagccgcgggtagctgtagcgtgtcttgcgggcgtggccttatggaacttaggttcttatgcatggacagtgccctcagggtacctgttcaggaggaattatgtggtttagcctcgaagcctggttcacgccgcgaggtttgtcaggctgtgccatgccccgccaggtggcagtataagctggccgcttgtagcgtgtcctgcggtaggggcgttgttagacgtatcctttattgcgcccgcgcccatggcgaagacgacggcgaggagatccttctggacacgcagtgccaaggcctccctcgccccgagcctcaagaagcctgttctctggaaccctgccctccacgctggaaggttatgtccctgggaccatgctccgctagttgtggcctggggaccgctcgccggagtgtcgcctgcgttcagttggatcagggacaggatgttgaggttgacgaggctgcctgtgcagcactggtgagaccggaagcgtcagtgccatgtttgatagccgactgcacatacaggtggcatgtgggcacctggatggagtgttccgtgagttgcggcgatggcatacaacggagacgcgacacttgtctagggccccaggcccaggcaccagtccctgctgatttctgccagcacctcccgaaaccagtgaccgtgagaggctgctgggccggtccgtgcgtgggccagggtaccccaagcctcgtcccccatgaagaagcagcagcccccggccgtactaccgcaacccctgccggagctagtttagaatggtcccaagccagaggactgctcttttccccagctccacagccaaggcggcttctccccggaccccaggaaaactccgttcagtcttctgcctgcggcaggcagcacctagagcctacggggacgatcgatatgcggggtcccggacaggccgactgtgctgtggcaattggaagaccactcggcgaagtagtcaccctccgagtacttgagagctcactgaactgctctgctggcgacatgcttctgctgtggggacgcctgacatggagaaagatgtgtcgaaagctgctggacatgacattctcttctaaaacaaacactctggttgtgagacaacgctgcgggaggcctggggggggggtcctcctgcgctatggttctcagctcgcccctgaaaccttttatagggaatgtgatatgcagcttttcggcccctggggtgaaatagtgagtccttccctatctccagctaccagcaacgccggtggctgccggctgtttataaacgtcgctccgcatgcaaggatagcaattcatgcccttgctactaatatgggcgctggaacagagggtgccaacgcttcttacattctcatacgcgacactcacagcctacggactaccgcgttccacggacagcaggtgctgtattgggagtctgagagcagtcaggccgagatggagttttccgaggggtttcttaaggcccaggccagtcttcgtggccaatactggactctccagtcgtgggtgccggaaatgcaagacccccaaagctggaagggcaaagaaggcacc

SEQ ID NO: 237966 - DNA, 4281 bp, Artificial Sequence
  derived and/or modified sequence
atgcaccagagacatccacgggcacgctgtcctcctctgtgtgtggcaggcattctggcttgcggctttctcctcggatgctggggaccgtcccactttcagcaatcgtgccttcaggccctggaaccacaggcggtgagcagctacctgtcgccgggagcacctctgaagggaaggccgccgtcgccagggttccagcggcaacgccagcgccagcgcagagccgcaggcggcatcctccacctcgaactcctcgtggccgtcggcccagatgtctttcaggcacaccaggaggacactgaacggtacgtcttgaccaacctgaacatcggagctgagctgctgagagatccatcactgggcgcgcagtttcgggtgcacctggtgaagatggtgatcctgactgaaccggaaggcgccccaaatatcaccgcaaatctcacgtcgtcgctgttgtccgtctgcggttggtcccagaccatcaaccctgaagatgataccgatccaggacatgctgacctcgtgctgtacatcactagattcgatttggagctcccggacggaaaccggcaggtccgcggcgtgacgcaactgggtggagcctgcagcccaacttggagttgccttatcaccgaggataccggttttgacctcggtgtgaccatcgcccatgaaatcggccacagcttcggcctggaacatgatggggccccggggtcaggctgcggaccgagcggacacgtcatggcatcagacggtgccgccccgcgcgctgggctcgcttggtccccctgcagccgccgccagctgctgagtctgctctccgctggacgggcaagatgtgtgtgggaccctccgcggccgcagccaggatcggcaggacacccgccagatgcccagccaggcctttactattctgccaacgaacaatgccgcgtggccttcggaccgaaagcggtggcctgtactttcgccagggagcacctcgacatgtgccaggcgctctcctgtcacactgacccactcgaccagtcgtcctgcagcagactgctggtcccgctgctcgatggtactgagtgcggtgtcgaaaagtggtgctcgaagggaaggtgccggtcattggtggagttgactcccattgcggcagtgcacggaaggtggtcgtcttggggcccccgctctccgtgttcccgctcgtgcggaggaggggtagtcaccagacgacggcagtgcaataacccgcgcccggcatttgggggacgggcctgcgttggtgcggatctgcaagccgagatgtgcaacactcaagcatgtgagaaaacgcagctggagttcatgtcccagcaatgcgcgcggactgatggacagccgctgcgctcgtccccaggaggtgcgtcgttctaccactggggggccgcggtgccccattcacagggggatgccctctgtcgccatatgtgccgcgcaattggagaatcattcatcatgaaaaggggtgattccttcctggacggaacccgctgcatgccgtccggacctagggaggacggaaccctctcgctgtgtgtgagcggaagctgtcgaaccttcgggtgtgacggtcggatggacagccaacaagtctgggaccgctgccaagtctgcggaggtgacaattcgacctgctcaccacgcaaaggctcgttcaccgcgggaagagcgcgggagtacgtgactttcctgaccgttactccaaatctgacttcagtctacatcgcgaatcacaggccgctgtttacccacctcgccgtcaggattggcggacgctacgtggtggcagggaagatgtccatttcaccgaacactacttacccttcactcctcgaggacggcagagtcgagtaccgggtggcgctcactgaagatcgcctgcctcggctggaggaaatacggatttggggtcccctgcaggaagatgctgatatccaagtgtaccgcaggtacggcgaagagtatggaaacctgacccgcccggatatcactttcacctactttcaacccaaaccacggcaggcgtgggtttgggcggccgtgcgcggaccgtgcagcgtctcctgcggagccggactgagatgggtgaattacagctgcctggaccaagcacgaaaagaactcgtggaaaccgtccaatgtcagggatctcaacagcccccagcatggcctgaggcctgcgtgctcgaaccgtgcccgccgtactgggctgtgggagacttcgggccgtgctcagcatcctgcggagggggactgcgggaacgcccagtccggtgtgtcgaggcccagggctctctgctcaagaccctgccgccggcccgctgcagagccggtgctcaacaacctgcggttgcgctggaaacgtgcaatccacagccctgccctgcaagatgggaggtgagcgagccctcgagctgcacctccgcaggcggcgcaggcctggccctggaaaacgagacttgtgtgccgggggccgatggtcttgaggctccagtcaccgaaggccccggaagcgtggacgaaaaactgcccgcgccggagccgtgcgtgggaatgtcctgcccgccgggatggggacacctggatgcaacctcagccggagagaaagcaccgtcgccatggggctcaatccggaccggggcgcaggcagctcacgtctggactccggccgccggtagctgctcggtgtcatgcggcaggggcctgatggagctgcggttcttgtgcatggattccgcgctgcgcgtgccggtgcaggaggaactctgcggcctggcctcgaagcccggaagtaggagggaggtgtgccaggccgtgccatgcccggcgcgctggcaatacaagctcgcggcatgctcagtgtcctgcggccggggggtggtccgccggatcctgtactgcgctagagcccacggggaggacgatggcgaagaaatcttgctggacactcagtgccagggactccccagaccggagccacaggaagcatgctctctggagccctgcccgccccgctggaaggtgatgtcactgggtccctgttccgcctcatgcgggttgggaactgcccggcggtcggtggcctgtgtgcagctggatcaaggccaggacgtcgaagtcgatgaggctgcgtgcgcagccctggtgcgcccagaggcctcagtcccatgcctgatcgcggactgcacttacagatggcacgtggggacgtggatggagtgctcggtgtcgtgcggagacgggatccagcgacggcgggacacgtgcttggggccgcaggcgcaggccccagtgccggctgatttctgccagcatctgccaaaacctgtgactgtcagaggatgttgggccggcccgtgtgtgggacagggtaccccttcccttgtccctcatgaagaagccgctgcaccgggacgcaccactgccaccccggcaggtgcatccctggaatggagccaagcccggggactgttgtttagccccgctccccaaccgcggcgcctgctgccgggcccgcaagaaaatagcgtgcagagcagcgcatgcggacgccagcatctcgaaccgaccggaaccatcgacatgcgcggtcctggacaagccgactgcgctgtggctatcggtcgccctttgggagaggtggtgactctgagggtgttggaatcgtcactgaactgctcggctggagacatgctcctgctgtgggggcgccttacctggcggaagatgtgccggaagctcctcgatatgaccttctccagcaagacgaacacccttgtggtgagacagcgctgcggcagaccgggaggtggagtgctgctgcgctacggatcgcagttggctcctgagacgttttatcgcgaatgcgacatgcagctttttggaccttggggagagatcgtgtcgccttctctgtcgccagcgacctcgaatgcgggcggatgtcggctgtttatcaatgtggccccacatgcgaggatcgcaatccacgccttggccactaatatgggagcgggaactgaaggggcgaacgcatcctacatcttgatccgggatacccactccctccgcactactgccttccatggccagcaagtcctgtactgggaatcggagtcaagccaagcggaaatggagttctcagagggtttcctcaaggctcaggcctcgctgcgcggacagtactggacccttcagtcgtgggtccccgaaatgcaggacccacagtcatggaagggaaaggaaggcacc

SEQ ID NO: 237967 - DNA, 4281 bp, Artificial Sequence
  derived and/or modified sequence
atgcatcaacgacatccaagagcgcggtgcccaccactttgcgtggccggaatacttgcctgtggatttctgctgggttgctggggaccttctcatttccaacaatcatgtctgcaggcactggaaccacaggccgtgtcctcatacctgagccctggagcgccactcaaagggcgaccaccttcgcctggatttcagaggcaacgtcaaagacagagacgggctgccggaggaattcttcatctggagctgctggtggcggtcggtcctgatgtgtttcaagcacaccaagaggataccgaacgctacgtccttactaacctgaacattggagcagaacttttgcgagatcctagcctcggagcgcagtttcgagtccatcttgtgaaaatggtcattcttaccgagccagaaggtgccccgaacataaccgctaacctgaccagctcactgctctctgtgtgtggatggtcgcaaactatcaaccctgaagatgataccgatcctggacatgcagatctggttctgtacataacgagatttgatctggagcttcctgatggtaacagacaagtccggggagtcacccagctgggcggtgcatgttcaccgacttggagctgcctgattaccgaggatactggctttgatctcggagtgaccattgcacacgagatcggacattcctttggcctggagcatgacggcgctcctggtagcggatgcggaccttcgggacatgtcatggcaagcgatggtgcggcaccaagggcaggacttgcctggagcccttgctcgagacggcaattgttgtcgctcctgtccgcaggccgcgcccgctgcgtgtgggatccaccgaggccgcaacctggaagtgctggccatccaccggatgcgcaaccaggtctgtactactccgctaacgagcaatgtagagtggcctttggccccaaggccgtcgcatgtacttttgccagagaacacctggatatgtgtcaagcgctctcgtgccataccgatccactggaccaatcgagctgctccagattgttggtgcccctgctggatggtactgaatgcggcgttgaaaagtggtgttcgaagggcagatgtcgttccttggtggagctcactccgatcgcggcggtgcatggacgttggtcatcttggggtccccggtcaccttgttccaggtcatgcggtggaggagttgttactcgcaggagacagtgcaacaaccctaggcctgcattcggtggtcgcgcatgcgtgggagcagacttgcaagccgagatgtgtaatacccaggcatgcgaaaagacccaactcgagtttatgtcccaacagtgtgcacggaccgacggccagcctcttaggagctcccctggaggggcctcattttaccactggggggccgcagtgccacatagtcagggagacgccctctgtaggcacatgtgtcgagcaataggagagtcctttatcatgaaaaggggagactcctttcttgatggaactaggtgcatgccctccgggcctcgagaagatggtaccctcagcttgtgtgtgtcgggatcgtgtcgtaccttcggatgtgatggaagaatggactcgcaacaggtctgggatagatgtcaggtctgcggaggcgacaactccacttgcagcccccggaaaggatcatttaccgcaggtagggcacgggaatacgtgacgtttctgaccgtcactccaaaccttactagcgtgtacatagccaatcaccggcctctgttcacgcaccttgctgtacgcatcggtggacgatacgtggtggcgggtaaaatgtccatatcgcctaataccacttatccttcccttctcgaggacggacgggtcgagtacagggtggcactgactgaagatagacttccaagacttgaggagatccgcatttggggaccacttcaggaagatgcagacattcaagtgtaccgtcggtacggtgaagaatacgggaatcttacgcgaccggatattacttttacctactttcaacccaagcctcgccaggcatgggtctgggcagcagtgcgcggtccgtgctccgtgtcatgtggagcagggcttcggtgggtgaattactcgtgtctggaccaggcacgaaaagaactggttgaaactgtgcagtgccaagggtcgcagcaacctccggcatggccagaggcatgcgtgctcgaaccctgtccaccttactgggcagtgggggacttcgggccttgttcggcatcttgcgggggcggtttgagagaacgccctgtgagatgtgtggaagctcaaggttcccttcttaagacgctccctcctgcaagatgcagagcaggtgcacaacaacccgcagttgcgctggaaacctgcaacccccaaccatgtcccgcgcgttgggaagtgtcagaaccctcatcctgtactagcgcgggtggagctggacttgcactggaaaacgaaacttgtgtgccaggagccgatggccttgaagcccccgtcacggaaggtccaggctcggtggatgaaaagctgcctgcacccgaaccttgcgtggggatgtcgtgtcctccaggttggggtcaccttgatgcaacttcggccggagaaaaagcacctagcccctgggggtccatcagaactggagctcaggcagcacacgtgtggactcccgccgcaggttcctgttcagtgagctgcggtcgaggcctcatggaactccgttttctgtgtatggacagcgcacttcgggtgccggtccaagaggagctttgcgggcttgcaagcaaaccaggctcgcggagagaagtgtgtcaggcggtgccttgtccagcccgctggcagtacaagctggcagcatgttcagtgtcgtgcggtagaggggtggtccggcggatcttgtactgtgcgagggcgcatggcgaagatgatggagaagaaatactccttgatactcaatgtcaaggactgcctagaccagagcctcaggaggcatgttcccttgaaccgtgcccaccccgttggaaagtgatgtccctgggaccatgtagcgcgagctgtggactcgggactgcccggcgtagcgtggcctgtgttcagcttgatcaaggacaggatgtggaggtggacgaggcagcctgtgcagcactggtgaggcctgaagcatcggtaccgtgcttgatcgcagattgcacctaccggtggcatgtgggaacctggatggaatgttccgtgtcctgcggtgacggaatccaaagacggcgcgatacttgcctgggacctcaggcccaagcccccgtgccagcagatttctgtcaacatctccctaagcctgtgactgttaggggatgctgggccggaccttgcgtcggccaaggtaccccatcactggtccctcatgaggaggcagcggcaccggggcggaccaccgcgacccctgccggagcgagccttgaatggtcacaagcgcgtggactgcttttttcgcctgccccacaaccgcggcggttgcttccaggtccacaggagaactcagtccaatcatcggcatgtggacgacaacatctggagcctaccggtaccattgatatgaggggacccggtcaggcggattgcgcagtggcaatcggacggcccctgggcgaggtggtgactctgagagtccttgagtcatctctgaactgttcggcaggcgatatgcttcttctctggggacgcctcacttggcggaaaatgtgcagaaaactccttgatatgactttttcgagcaagactaacaccctggtggtgcgccagcggtgcggacgaccaggtggaggtgttttgctcagatacggctcacaacttgcacctgaaactttttacagagagtgcgatatgcaactctttggcccttggggagaaattgtgagcccatcactgtcccctgcaacttccaatgcaggtggatgtagacttttcattaatgtcgcacctcacgcaaggatcgcaatacacgcgctggcaaccaacatgggtgccggaactgagggagccaatgcaagctacattctgattagagatactcactcgctccgtactacggccttccacggacagcaagtgctctactgggaatcggaaagcagccaagccgaaatggagttctccgaaggtttcctgaaggcacaggcatctcttcgcggacagtactggactctccaatcctgggtgccagaaatgcaggacccacagtcgtggaagggcaaggagggcact

SEQ ID NO: 237968 - RNA, 4427 nt, Artificial Sequence
  derived and/or modified sequence
gggaaauaagagagaaaagaagaguaagaagaaauauaagagccaccaugcaccaacgacauccacgagcacgaugcccuccccugugcguagcgggaaucuuggcaugcggguuucuucucgguugcuggggaccaagccacuuccagcaauccugccuccaagcgcuugagccccaggcggugucguccuaccugucgccuggggcaccccucaaggguagacccccuucccccgguuuccagaggcaacgacagagacagcggcgggccgcggguggcaucuugcaucuggaacugcuggucgcuguaggaccggacguauuccaggcgcaucaggaggacacagagcgauauguccugacuaacuugaacaucggugcagaauuguugagggacccuucguugggggcgcaguuucggguacaucuuguaaagaugguaauccugacagaaccggaaggagcgcccaauaucacggcaaaucugacaucgagcuuguugucggucugcgguuggagccaaaccaucaaccccgaggacgacacagaucccggccacgcggaccugguccucuauaucacacgauucgaccuugagcugcccgaugguaaccgacagguccgaggagucacacaguuggguggagcaugcuccccuacuuggucaugcuugaucacggaggacaccggguuugaccuuggggugacgaucgcacaugagauuggccauucguucggauuggaacacgacggggcccccggaagcgggugcggaccgucgggacacgugauggcgagcgauggggccgccccgcgagcaggacucgccuggagcccguguagccgccgacagcuccucucccuucuuucggcgggacgcgcgaggugcgugugggaucccccucgaccgcagcccgggagcgcgggucauccgccagacgcacagcccggucuuuacuauagcgcaaacgagcagugcagggucgccuucggaccuaaagccguagcguguacauucgcgcgagaacaucucgacaugugccaggcacucagcugccauaccgacccgcuggaccagucauccuguucaaggcuuuuggucccccuccuggauggcacagagugugggguggaaaagugguguucaaaaggucgguguagaucacuugucgaauugacgccaauugccgccguccacgggagguggucaucauggggcccucgcagcccgugcucgcgaucguguggagggggcgucgugacucggaggagacagugcaacaaccccagaccggccuucggcgguagagccugcgucggggcggaccuucaagcggagauguguaacacgcaggccugugaaaagacucaguuggaguuuaugagccaacagugugccagaaccgaugggcaaccccugcggucaucgccaggaggggcgucauuuuaccacuggggagccgcagugccucacucacaaggggacgcgcugugccggcauaugugcagggccauuggggaaucauucaucaugaaacggggugacucauuccuugacggaacacgauguaugccuagcgggccuagagaggacggaacccuuuccuugugugugucgggaucauguagaacauuugggugcgauggucggauggacagccaacaggugugggacagaugccaagugugcgggggugacaacucgacgugcucgccacgaaaaggcucguucaccgccggucgagcccgggaguaugugacauuccucacgguaacgcccaaucugacgagcgucuacaucgccaaccacagaccccucuuuacccaccuugcugugcggaucggagggcgcuacgucguagcggggaagaugucgaucucgccaaauacuacauacccgucgcuucucgaagaugggcgcgucgaguacaggguggcguugaccgaggaccggcucccgcgcuuggaagagauuaggauuuggggaccucuucaagaggaugcggauauccaaguauacaggcgcuacggagaggaguacggaaaccucacaagaccggauauuacguuuacguauuuucagccgaagccucgacaggcgugggucugggcagcugugcgcgguccuuguucagucucauguggugcgggguugaggugggucaacuacucgugccucgaccaggcgcgaaaggaacucguggaaacaguacagugucaggggucccagcagccgccagcauggccugaagcguguguguuggaaccuuguccgcccuauugggcggugggagacuucgggcccuguucggcuucgugcggugguggacugagagaacgcccggugagaugcgucgaggcccagggcucacuucuuaagacucuuccuccagcaagauguagagcgggagcgcagcagcccgccguggcacuugaaacuugcaacccgcaaccaugcccagcuaggugggaggugucggaaccgucgucgugcacgucagccggaggugcaggguuggcgcuugagaaugagacuugcguaccgggagccgacgggcuugaggcaccugucacugagggaccggguucggucgacgaaaaacuccccgccccugagccuugcguaggcaugucgugcccgccaggauggggacaccuggacgcgaccagcgcaggcgaaaaagcuccgucgccgugggguuccauucgcaccggagcucaagcagcacacgucuggaccccggcagcggggucaugcuccguaucgugcggcagagggcugauggaacucagauucuuguguauggauucggcgcugcgggugccugugcaagaagagcuuugugggcucgccucaaagccugguagcagacgcgaagugugucaagcggugccgugcccagcaagauggcaguacaaacuggcagccugcucgguaucgugugguagaggagucguccggcgaauucucuauugcgcacgggcgcacggagaggacgauggggaggagauccuuuuggauacucagugccagggauugcccaggcccgaaccccaagaagcguguucgcucgaacccuguccgccacgguggaaaguaaugucgcucgggccgugcucagcgucguguggguugggaacugcacggcggagcguggcguguguccaguuggaucaagggcaggauguggagguggacgaggcagcgugugcggcacuuguacggcccgaagcgucggugccgugcuugaucgcagauugcacauaccgcuggcaugucggcacguggauggaguguuccgugucaugcggggacggaauccagcggcgacgcgauacgugucuugggccgcaggcgcaggcaccggucccggcugacuucugccagcaccucccgaagccugucacggugcgcgggugcugggcgggacccugcguggggcagggaacucccucacucgugccgcaugaggaagcagcugcuccgggacggacuacugcgaccccggcaggggcaucauuggaauggucacaggccagaggguuguuguucucgccugcaccacaaccgcgcagacuccucccuggaccacaagagaacagcguccagucaagcgcauguggacgacagcaccuugaaccgacuggaacgaucgacaugagggguccggggcaggcagacugcgccguggccaucgguagaccguugggugaggugguaacgcuuaggguccucgaaucaucgcuuaauugcucagccggugacaugcuccuguugugggggaggcugaccuggcggaagaugugucgcaagcuccucgauaugacguuuucguccaaaacgaauacacuuguggugagacagagauguggucgaccggguggcggugugcugcucagauauggcucgcaguuggcacccgaaacauucuaccgagaaugugacaugcaacuguuugggccauggggagagauugucagcccgucgcucucaccggcaacuucgaacgccggaggcugucgacucuucaucaauguggccccucaugcccgcauugcaauccacgcucucgcgacgaacaugggggcaggaacugaaggggcgaaugcguccuauaucuugaucagggauacacacucauugcgaacaacggcguuucauggucagcaaguacuguauugggaaucggaguccucgcaagcggagauggaguuuucggaaggcuuucuuaaagcccaggccucgcuuaggggccaguauuggacccuucagagcugggucccugaaaugcaagacccccagucguggaaagggaaagagggaacgugauaagcugccuucugcggggcuugccuucuggccaugcccuucuucucucccuugcaccuguaccucuuggucuuugaauaaagccugaguaggaag

SEQ ID NO: 237969 - RNA, 4284 nt, Artificial Sequence
  derived and/or modified sequence
augcaucaacgccacccccgggcccgauguccgccucugugugucgcugggauccucgcuuguggcuuccugcugggaugcuggggucccucacacuuucaacagucuugccugcaggccuuggagccacaggcugugucuuccuaccucuccccgggagcgccccugaagggaagaccaccaucacccgguuuccaaagacagcgucaacgccaacguagggcagccgguggcauccuacaucucgaguugcugguugcugugggccccgacguuuuccaggcccaccaagaggacaccgagcgcuacguccuuacuaaccucaauaucggggcggaauuauuaagagaccccucacuuggagcgcaauuuagagugcaccuugugaagaugguuauccugacggaaccagaaggcgccccgaacaucacugcaaaucuuaccagcucucuuuuauccgugugcggcuggucucagacaauuaacccugaggaugauaccgacccagggcaugcagaucucgugcuauauauuacccgguucgaucucgaguugccugacggcaacagacaggucagaggcgugacucagcucggcggggcaugcucacccaccuggagcugucugaucacugaagauaccggcuuugauuugggcguaaccauugcucacgaaaucggacacuccuuugggcuugagcacgauggggcuccaggaagcggcuguggaccaagcggccacgugauggcguccgauggggccgcuccccgggccggguuagcuugguccccuugcucucggagacagcugcucucucuuuuaagcgcuggaagagcuagaugcguaugggaucccccacgaccacagccuggcucugccggucacccuccugaugcccagccaggccucuauuauagcgcuaaugagcagugucgagucgccuuugggccuaaggcagucgcguguaccuuugccagagagcaucuugauaugugucaggcucuaucuugucacacugauccccuugaccagagcuccuguucccgccuccuuguuccccuucuggacggcacugaaugugguguagaaaaauggugcaguaaagggcggugucgaagucucguggagcugacaccaauugcugccguccacggccgcuggucaaguuggggcccgaggagcccuugcucccgauccuguggaggugguguggugaccagaagacgacaaugcaauaauccucggccagcuuuugguggccgagcaugcgugggggccgaccugcaggcugagaugugcaauacucaggccugcgaaaagacccagcucgaguuuaugagccagcaaugugcucgcacugauggccagccauuaagauccucaccaggaggagcaagcuucuaucacuggggagcggcaguuccccauucccagggugaugcucugugcaggcauaugugccgagcuaucggcgagucguuuaucaugaaacggggagauaguuuccuugacggcacaagguguaugcccucugguccacgggaagauggcacccugucccuaugugugagcggaaguuguaggacuuuuggcugcgacggaagaauggauagccagcaaguuugggaucgaugucaggugugcgggggagacaauuccacauguucaccccgcaaggggucauuuacugcagggcgcgcccgggaauauguaaccuuccucacugucacaccuaaccugacauccgucuauaucgcaaaucauagaccccucuuuacucaucuggccguccggauaggcggcagguacguuguugcaggcaagaugagcauuaguccaaacacaacauaccccagccuccuggaagacggaaggguggaguaucgcguggcucucacggaagacagacuaccucgacuugaagagauaagaauuugggguccucugcaggaagacgcggauauccagguguaccggagauacggcgaagaguacggcaacuugaccaggccugauaucacguuuaccuacuuccaaccaaagccccgccaggcgugggugugggcagccgugcggggccccugcucuguuagcuguggggccgggcugaggugggugaauuauucgugccuagaucaggcuaggaaagaacuggucgaaaccguccagugucaggguagccagcagccaccugcauggcccgaagcaugcgugcuugagccgugcccgccauacugggccguuggugacuuuggacccugcucugcuucuugcgguggcggucugcgagaaaggccagugaggugcguggaagcccaagguucgcugcuuaaaacacuucccccugcucgguguagagcuggcgcucagcagccagcgguugcccucgagaccuguaacccccagccauguccggcccguugggaagucagcgagccauccuccuguacgucagccggaggggccggcuuggcacuugagaaugagaccugcgugcccggagcugacggcuuggaagcucccgugacagaaggcccugguuccguggacgagaaacucccggcaccugaacccugcgucggaaugaguugcccuccugguugggggcaccuggaugcaaccuccgcuggagaaaaagccccaucucccuggggcucaauuagaaccggggcacaggcugcacacguauggacaccugcagcagguagcuguucugucuccugcggccgcggccuuauggagcugcgcuuccugugcauggauucagcccugcgggucccugugcaagaggaguugugcggucuugcuaguaagccaggauccaggcgugagguuugucaagcugugccuugcccugcccgguggcaguacaagcucgcggcuugcagcgucucuugcggcagaggcguggugaggaggauccuuuacugugcaagggcacacggggaggacgauggggaagaaauacuucuugauacacagugucaagggcugccuagaccggagccucaggaagcuugcucacuagagcccugcccaccgcgguggaaagugaugucucucggaccguguucugcuucuuguggucuggggaccgcaaggcgaaguguggcuugcguucaacucgaccagggccaggaugucgagguugaugaggccgcaugcgcugcuuugguucggcccgaggccagugucccuugccugauugcugacuguacuuaucgcuggcacgugggcacuuggauggagugcagcgugucauguggggacggaauacagcguagacgugauaccugccuggguccucaggcacaagccccagucccagcggacuucugucagcaucugccaaaacccgugacaguccggggaugcugggcuggucccugcgucggacaggggaccccuagccucguaccacacgaggaagccgcugcucccggucggacuacggccacgccagcuggagcaucuuuagaguggucacaggcacgaggccuccucuucagcccugcgccccagccaaggcgccuguuaccuggaccucaagaaaacagugugcagagcagcgccuguggcagacagcaucucgaacccacagggaccauagacaugcgcggccccggacaggcagacugcgccgucgccauaggcagaccgcuuggcgagguggugacacugagagugcuugagucuuccuuaaacuguagugcaggcgauauguuacugcuguggggacgucugaccuggcggaagaugugucgcaaauugcucgacaugacauuuagcagcaaaacgaacacacuggucgugaggcagagaugcggucgucccgggggcggggugcuacugcgauacgggucccagcuagcuccggagaccuuuuaucgagaaugugacaugcagcuguuuggccccuggggagagauuguuucuccuagccucagccccgccacaucuaacgcagguggauguagguuauucauuaacgucgccccccaugcccggaucgcuauccaugcucuugccacgaauaugggugccggaaccgaaggugcaaacgcuaguuacauccucauucgggauacacacucccuucgcacaacggcauuccacggucagcaggugcuguacugggagucugaauccucccaggccgaaauggaguucucugagggauuucucaaggcccaggcuagccucagaggacaguauuggacuuugcagucuuggguccccgaaaugcaggacccacaaagcuggaaggggaaggagggcacauag

SEQ ID NO: 237970 - RNA, 4284 nt, Artificial Sequence
  derived and/or modified sequence
augcaccaacggcacccacgagcacgauguccuccacucuguguugccggcaucuuggccuguggauuucuucugggauguuggggccccagucacuuccagcaguccugccugcaggcccucgaaccacaggccgugucaagcuauuuaagucccggagccccucugaaaggcagaccucccagcccaggauuucagaggcagaggcagcgccagagacgcgcugcuggggguauccugcacuuggaacuguuaguagccgugggucccgauguguuccaggcacaucaggaagacacugaacguuacguuuugaccaaccugaauauuggcgccgaauuacucagggauccuagccuuggagcccaguuccgaguccaucuuguuaaaauggugaucuugacugaacccgagggcgcucccaauauaacugcuaaccucaccucaucacucuugagugucuguggcuggucucaaacuauuaacccagaggaugacacagauccuggacacgccgaccugguccuguauaucacccguuuugaucuggaacugccugacggcaaccggcaggucagaggcgugacucagcucggcggggccugcuccccuacauggucuugcuuaaucaccgaggacaccggcuuugaccugggaguuacgaucgcacaugagaucggccacucuuucggacuugagcaugauggugcccccggcuccgguugcggaccuaguggacauguaauggcguccgacggcgccgccccgcgcgcuggccuggccuggucgccaugcagucgucggcaacuguuaucacugcucucugcugggcgggcucguugcgugugggauccaccccgcccccagccaggcuccgcaggccauccacccgaugcacaaccuggccucuacuauagcgcgaaugagcagugucguguagcuuucggaccgaaggcuguagcgugcaccuuugcacgcgaacaccuggacaugugccaggcccugucaugucauacagaucccuuggaccaaucuaguugcucaagguuauuagugccucuucuggauggcacagaguguggaguggagaaaugguguucgaaaggcaggugccgauccuugguggagcugacgccaaucgccgccgugcauggcagguggucaagcuggggaccuaggagucccuguucccgaaguugcggcgggggcguggugacccgccggagacagugcaauaauccacgaccugcauucggaggaagggcaugcgugggcgccgacuugcaagcugagauguguaacacacaagccugcgaaaagacacaacuggaauucaugagccagcagugcgcacguacugauggccagccucuacgcucaaguccagguggugccucguucuaccacuggggagcagccgucccccacucacagggggaugcccugugcaggcacaugugccgcgccauaggagagucuuuuaucaugaaacguggggacucuuuccuagacggaacccgguguaugccuagcggcccacgugaggaugggacacucucccucugugucuccgguuccugucggacuuucggaugcgacggaaggauggauucccagcaggucugggaucgaugccaggugugcggcggagacaacucuacauguucucccaggaaaggcucauucaccgcaggccgggcacgcgaauacgugaccuuucucaccgugacccccaaccuuaccuccguauacauagcaaaucaucggccacuguuuacacaucucgcuguccggauagggggacgcuacguaguggcagggaagaugaguauuuccccuaauacuaccuacccuucguugcuggaagacggccguguugaauauagaguggccuugacagaagauagauugccacgacuggaagaaauccgcaucugggggccacugcaggaggaugcggauauccagguguacaggcgcuacggagaagaguaugggaaucucacaagaccugacauuacuuuuacguacuuccagccaaagccuagacaggcuugggugugggccgcugugcgaggaccuuguagcgucuccuguggagccggccuacgauggguuaauuacuccuguuuagaucaggcacguaaggagcugguagagaccguacaaugccagggcucacagcagcccccggcuuggccugaggcuugcguacuugagccauguccuccauacugggcagucggggauuuuggaccuuguagugcuaguuguggcgguggauugagggagagaccuguaagaugcguggaagcucagggcagucucuuaaagacgcuuccucccgcccgcugucgugcuggugcacagcagcccgcuguugcuuuggaaacuugcaauccccaacccugcccagcuagaugggagguauccgaaccuuccuccuguaccagugccggcggcgcaggacuggcucuugagaaugaaacuugugugcccggcgccgauggcuuggaggcccccgucacagagggaccaggcucuguugacgagaaacugcccgcaccagaaccaugcgugggcaugucuuguccacccgguuggggacaccuggacgcgacuagugcuggagaaaaagcaccgucaccuuggggauccaucagaacaggggcccaggcugcgcacguguggaccccagccgccgggucuugcagugugagcuguggacgcggacugauggagcugagguuccuguguauggacagcgcccucagggugccaguucaggaggaauuaugcggauuggccagcaaaccagguucacgacgggaggugugccaggccguuccauguccagcccgcuggcaguacaaacuggccgcaugcucagucucaugcggaagaggcgugguuagacggauccuguauugcgcucgcgcccacggcgaggacgacggagaggagauccugcucgacacccaaugccagggccuuccccgacccgagccgcaggaagcaugcucccuugagccuugcccgccucgauggaagguuaugagccuggguccuugcagcgccuccugcgggcuggguaccgcgcgccguuccguggccugugugcagcucgaucagggccaggauguugagguagacgaggcugcaugcgccgcuuugguccgcccagaggcauccgucccaugccugaucgcagauuguacuuaucguuggcacguuggaaccuggauggaguguucugugagcuguggcgacgggauccagcgaaggcgcgauacuugccugggcccacaggcccaggcgcccgugcccgcugauuucugucagcaccuuccaaaaccaguuaccgugcgcgguuguugggcggguccaugcguuggucagggaacccccagccucgugccccacgaggaggcugcggccccgggcagaaccacugccaccccagccggagcuucccuggaguggagucaggcuagaggucuacuguuuagcccagcuccucagccaagacgacugcuaccagguccucaggagaacucuguccagaguagcgccugcgguaggcagcaucuggaaccaacuggaaccaucgacaugcggggccccggacaggccgacugcgccguggccaucggacgcccacucggcgagguagugacauuacggguacuggaaucaucccucaacuguucagccggcgauaugcuucuguuguggggaagacuuacuuggagaaaaauguguagaaaguugcuggacaugaccuucucuucuaagacaaauacccuuguuguccgccaaagaugugggagaccaggaggcggcguccuccuucgguaugguucucagcuagcaccugaaacauucuaccgggagugcgauaugcagcucuuuggcccuuggggcgaaaucgugucacccagccucagccccgcaacgucaaacgcuggcgguuguagacuguucauuaacguggcuccgcaugcacguaucgccauccaugcucuggccaccaacaugggugcagggaccgagggcgcgaacgcaucuuacauucugauuagggauacacauagccugaggacuacagccuuccaugggcagcagguccucuacugggaguccgaaaguagccaggcagagauggaauuuagcgagggcuuucugaaagcucaagccucucugcgaggacaauauuggacccuacagucaugggugcccgagaugcaggauccucaguccuggaaaggaaaagaaggaacuuag

SEQ ID NO: 237971 - RNA, 4284 nt, Artificial Sequence
  derived and/or modified sequence
augcaccaaagacacccacgagcacgaugccccccauugugcguggcagggauccuugcaugcggcuuccuccugggcugcuggggccccucucauuuccagcaaucauguuugcaggcgcuagaaccucaggccgugucuuccuaccucucaccaggagcuccuuuaaaaggccgcccuccuucgcccggauuccagcgacaaagacagcgccagagacgugcugcaggaggcauucuucaucucgaauugcugguagcagugggccccgacguguuucaagcccaucaagaagacaccgagagguacguguugacuaaccuuaacauaggcgcagagcuccugagagaccccuccuuaggcgcacaguucagggugcauuuggugaaaauggugauacuuacugaaccagaaggagcaccgaauauuacugccaaucucacuagcucuuugcuuucugucugcggcuggagccaaacuauaaaucccgaagacgauacagacccaggccaugcugaccucgugcuauacauuacucgauucgaucuugaacuacccgaugggaaucggcaaguucgggggguuacccaguugggaggugccuguuccccaacuugguccugucuuauuacggaggauaccggcuuugaccuggguguaacaaucgcccacgaaaucggucacaguuucggauuggagcacgauggagccccagguuccgguuguggacccagcggacauguuauggcaagcgacggggcagcaccgagagcagggcuagccuggucaccaugcuccagacggcagcuacucucucucuugucugcgggcagagccagaugcguuugggaccccccuaggccacagccagggucagcaggacauccucccgaugcccaaccuggucuguacuauuccgcuaaugagcagugccggguugcuuuuggcccuaaagccgucgcaugcacauuugcacgggagcaccucgauaugugccaagcccuauccugccacaccgaucccuuagaucagucuaguuguucucgucugcucguaccucuguuggacgguacugaaugcgggguggagaaguggugcagcaagggucgaugccggucucuagucgaacuaacuccaauagccgcuguccacgggcgcuggucuucaugggggccacgcaguccaugcagccgauccugcgguggcggcguggucacccgcagaagacaguguaacaauccucggccugccuuuggcggccgggccugcguaggagcugaccuacaggcugagaugugcaauacgcaggcgugugaaaaaacccagcuggaguuuaugucacagcagugugcuagaaccgacggccaaccucugagaucaagucccgggggagcuaguuucuaccauuggggcgcagcuguuccucacucgcaaggcgaugcccucuguagacauaugugccgggccauuggagaaucauuuauuaugaaaagaggggacucuuuuuuggaugggacucguugcaugccuuccggcccaagagaggauggaacacucagccuaugcgugucugggucuugcaggacauuuggcugcgauggacguauggacucucaacaggugugggauagaugucaagucugcggaggggauaauaguacguguucacccagaaaagggucuuuuaccgccggucgggcccgggaguauguuacauuucugaccguaacgccaaaccucacaagcguguacauagccaaucacagaccacuguucacccaucuugccgugcgcaucgggggaagguacguaguugcuggcaaaauguccaucaguccuaauacuacuuacccuucccuucuagaggacggacgcgucgaguaccguguagcccugacggaggauagacugcccagacuugaggagauccggaucuggggcccccuacaggaggaugccgauauccagguguaccgcagauacggagaagaguacggcaaccuaaccagacccgauaucaccuuuacauauuuucaaccgaagcccaggcaagcauggguaugggcugcugugcgcgggcccuguucagugucauguggcgccggacucagaugggucaauuacaguugcuuagaucaagcaagaaaagagcugguggagacuguccagugccagggcucccagcaaccuccagccuggccagaagcgugcguccucgagccuuguccucccuacugggcagugggugauuucggaccauguuccgcaagcugcgguggggggcucagagagaggcccguuagauguguggaagcucagggcagccugcuaaagacccugccaccugcuagaugccgcgcgggggcucagcaaccagccgucgcucuggagacauguaacccacagccauguccugcgcggugggaggucuccgaaccaucgucuugcacauccgcuggcggagccgggcuggccuuggaaaacgaaaccugcguuccuggagcugacgggcuggaagccccuguuaccgaaggcccaggauccguugaugagaaguuaccugcuccugaacccugugucggcauguccugccccccuggcuggggccacuuggacgccacaucagcuggugagaaagcaccgucgccauggggauccauucgcacuggagcucaggcugcucacguguggacuccugcugcaggaaguuguagcgucucaugcggccgggguuuaauggaacugagauuucuuuguauggacuccgcucuuagggucccuguacaggaggagcucugcgggcuggccuccaaaccuggaucacggcgggaggugugccaggcuguaccuugcccagccagguggcaguauaaacuagcugcgugcagugugaguugcggaaggggcguggugagacggaucuuguauugcgccagagcacauggcgaggaugacggcgaagagauucugcuggauacccaaugccagggcuuaccucggccugaaccgcaggaagcuugcucacucgaacccuguccccccagauggaagguuaugucccugggaccauguagugcaucauguggacugggaaccgcucguaggucaguugccuguguccagcuugaccagggccaggauguagaagucgacgaagcagccugcgccgcauuagugcgcccagaggcauccgugccuugucugaucgccgauugcaccuauagguggcaugucggcacguggauggaaugcucugugucauguggagacggcauucagagacgccgagauacauguuuaggaccucaggcucaagcaccagugccagcagauuuuugucaacaccuuccuaagcccguuaccgugcguggaugcugggcagguccaugcgucggccaggguacuccgucauuggugccucacgaggaggccgccgcaccaggccgcacuacagcaacaccugcaggcgcaucacuagaguggucacaggcacggggacuucuguuuagcccggcuccgcagccucggaggcuccuucccgguccucaggagaauucgguucaaagcucagcauguggaaggcagcaccucgagccgaccgggaccaucgauaugagggggccaggucaggcagacugugcugucgccauagggagaccauuaggagaaguugucaccuuacgcgugcuggagaguucacugaauugcagugccggagacaugcucuuauugugggguagacugacuuggagaaagaugugccgaaaguuacucgauaugacauuuucguccaagacaaacacacuggucgugcggcagagauguggacgaccgggcggaggggugcuucugagguacggaucucagcucgcuccagagacauuuuacagggaaugugauaugcaguuguuuggccccuggggggagaucguuucacccagucuaagcccugccaccagcaacgcggggggaugccgccucuuuaucaacguugcuccacacgccagaauagcgauacacgcucuagcuacuaauaugggcgccggcacugaaggggcuaaugcaucauauauuuuaauccgcgacacacauucucuucgcacaacagcuuuucacggccagcagguauuguauugggagagugagagcagccaagcggaaauggaguuuucugagggcuuccugaaggcgcaggccucucugcgaggacaauacuggacacuacagagcugggugccagagaugcaggauccccagaguuggaaaggaaaagaaggaaccuag

SEQ ID NO: 237972 - RNA, 4284 nt, Artificial Sequence
  derived and/or modified sequence
augcaucagcgucaccccagagcuagaugcccuccucugugcguugccgggauucuggcaugcggauuucugcugggaugcuggggccccucccacuuccaacaaagcugccugcaagcucuugaaccccaagccgucuccucuuaccuguccccuggcgccccucugaaaggaagaccuccuagcccuggguuucagcgccaaagacagcggcaacgcagggccgcgggaggaauucuccauuuggaguugcuggucgcagugggcccagacguguuucaggcacaucaagaagacaccgagagauacguuuuaacaaaccugaauauuggcgcugaacuccuacgugacccaucucuaggcgcacaauuuagggugcaucuugucaagauggugauucuaacagaaccugagggcgccccuaacauuacggcaaacuuaaccucuucccugcugagugucuguggcuggagccagaccaucaauccagaggaugauacagauccaggccaugccgaccuuguucuguacauuacaagauucgaucuggaauugccugacggaaauaggcaggugcgcgggguaacccagcuuggcggugcuuguucccccaccuggucuugcuugauuacugaagauacuggauucgaccuuggagucacuaucgcacacgaaauuggucacucauucgggcuggagcacgacggagccccugguagcggaugugggccaagcggacaugugauggccucagacggcgccgccccccgagcaggccucgcuuggagcccuuguagucgcagacaacuccugagucugcugucagccggucgggcuagaugcgugugggacccucccaggccucagccaggcagcgcaggacaccccccagacgcacagcccggucuguauuauuccgcuaaugagcagugccguguugccuuugggccuaaagccgucgccugcaccuucgcucgcgagcaccucgacaugugccaggcuuugucaugucacaccgacccacuggaucaaaguaguugcucacgguuacugguaccacugcuugacgggacugaguguggaguugaaaagugguguagcaaaggccggugcagaucucuuguggaauugacucccauugcugccguccauggccggugguccuccuggggcccucgcucccccugcagccgcucuugugggggcggcguggugacaagaagacgccagugcaauaacccacggcccgcguuuggcggcagagcuugcgugggagccgaccuucaggccgaaaugugcaauacccaagccugcgagaaaacacagcucgaauuuaugucucagcagugcgcccgcaccgacggacagccucucagaucuucaccgggcggagcuucauucuaucacuggggcgcugcaguaccucacucacagggcgacgcccugugcagacauauguguagagccaucggggaauccuucauuaugaagagaggagacucauuucuggauggaacccgguguaugccgucgggaccuagagaagauggcaccuugucuuuaugugucuccggaucuugccgcacuuuuggcugcgacgguagaauggauagucaacaggucugggauagaugccaagucugcggcggcgacaauucaacaugcaguccacggaaagguucguucacagcagggcgagcacgagaguacgucacuuuccucacaguuacgccaaaucuaacaagcguuuauaucgcuaaucaucgaccacuguucacgcaucucgccgugagaaucggugggcguuaugucgucgccggaaaaaugucgaucucaccaaauacuaccuaccccagucuccuggaagacggucggguggaguaucgaguggcacugacugaagauagauugccccggcuggaggagauuagaauaugggggccauugcaagaagacgcagacauucaaguguacaggagguauggagaggaauaugguaaccuuacccguccugacaucacauucaccuauuuccagccuaaaccucggcaagcauggguaugggcagcuguuagagggccuuguuccgucucgugcggggccggccuacgauggguuaauuacuccuguuuagaucaggcacguaaggagcugguagagaccguacaaugccagggcucacagcagcccccggcuuggccugaggcuugcguacuugagccauguccuccauacugggcagucggggauuuuggaccuuguagugcuaguuguggcgguggauugagggagagaccuguaagaugcguggaagcucagggcagucucuuaaagacgcuuccucccgcccgcugucgugcuggugcacagcagcccgcuguugcuuuggaaacuugcaauccccagcccugucccgccagaugggaggucucugaacccucuaguuguacuagcgccggcggggcuggacucgccuuggaaaacgaaacaugcguccccggcgccgauggccuagaagcaccaguuacagaaggacccggauccguagacgaaaagcugcccgcgcccgaaccuugcguuggcaugucuugcccccccgguuggggucaucucgacgccaccucugcgggagaaaaagcuccuucuccaugggguagcauaagaaccggugcgcaagccgcacacguguggaccccagcagcaggaaguugcuccgucucaugcggccgcggacucauggagcuaagguuucuuugcauggauagcgcccuuagagucccaguucaggaggagcugugugggcuggccagcaagcccggcucucgaagggaaguuugccaggccguaccuugccccgcccgcuggcaguauaaacucgcugccuguagcguauccugcggaagaggagucguccggagaauacuguauugugccagagcccacggagaagaugacggggaagagauuuuacuggacacacaaugccagggccugccaaggccugaaccacaggaagcguguagccuggagcccugccccccucgguggaaagucaugucucucggucccugcucugcauccugcggccuggguaccgccaggagaucaguggccugcguacaguuggaucagggacaggauguggaagucgacgaagccgccugugccgcacuugugcggcccgaagcuagugugccuugcuuaauagcugauuguacuuaccgguggcaugucgguacguggauggagugcucuguuuccugcggcgauggcauccagcguagaagggacacaugucucggaccucaggcucaggcucccgugcccgccgacuucugccagcaucuaccaaagcccgugacuguaagaggaugcugggccggacccugugugggucagggcaccccuucucuggucccgcaugaagaagcugccgcccccggccgcacuacugcaacucccgcuggcgcgucucuggaguggucccaagccaggggucugcuguucucucccgcaccgcagccacgucguuugcuucccgggccccaagagaacucagugcagagcagcgcauguggucgucagcaucuggaacccacuggaaccaucgacaugcggggccccggacaggccgacugcgccguggccaucggacgcccacucggcgagguagugacauuacggguacuggaaucaucccucaacuguucagccggcgauaugcuucuguuguggggaagacuuacuuggagaaaaauguguagaaaguugcuggacaugaccuucucuucuaagacaaauacccuuguuguccgccaaagaugugggagaccaggaggcggcguccuccuucgguaugguucucagcuagcaccugaaacauucuaccgggagugcgauaugcaacuauuuggacccuggggugagaucgugagcccuucauugucucccgccacuuccaaugccggagggugccggcucuuuauuaacgucgccccccaugcccguaucgcaauucacgcgcucgcuacuaauaugggggccgggaccgagggugccaaugcuagcuauauccuuauucgagauacucacucccugcgaacgacagccuuccauggacagcagguucuauacugggaaucagaaaguucccaagccgagauggaauucagcgaaggguuucugaaagcucaggcuucucuccggggacaauauuggacucuucaaucauggguaccagaaaugcaagacccacagaguuggaagggcaaagaaggaacuuag

SEQ ID NO: 237973 - protein, 1340 aa, Artificial Sequence
  derived and/or modified sequence
MHQRHPRARCPPLCVAGILACGFLLGCWGPSHFQQSCLQALEPQAVSSYLSPGAPLKGRPPSPGFQRQRQRQRRAAGGILHLELLVAVGPDVFQAHQEDTERYVLTNLNIGAELLRDPSLGAQFRVHLVKMVILTEPEGAPNITANLTSSLLSVCGWSQTINPEDDTDPGHADLVLYITRFDLELPDGNRQVRGVTQLGGACSPTWSCLITEDTGFDLGVTIAHEIGHSFGLEHDGAPGSGCGPSGHVMASDGAAPRAGLAWSPCSRRQLLSLLSANEQCRVAFGPKAVACTFAREHLDMCQALSCHTDPLDQSSCSRLLVPLLDGTECGVEKWCSKGRCRSLVELTPIAAVHGRWSSWGPRSPCSRSCGGGVVTRRRQCNNPRPAFGGRACVGADLQAEMCNTQACEKTQLEFMSQQCARTDGQPLRSSPGGASFYHWGAAVPHSQGDALCRHMCRAIGESFIMKRGDSFLDGTRCMPSGPREDGTLSLCVSGSCRTFGCDGRMDSQQVWDRCQVCGGDNSTCSPRKGSFTAGRAREYVTFLTVTPNLTSVYIANHRPLFTHLAVRIGGRYVVAGKMSISPNTTYPSLLEDGRVEYRVALTEDRLPRLEEIRIWGPLQEDADIQVYRRYGEEYGNLTRPDITFTYFQPKPRQAWVWAAVRGPCSVSCGAGLRWVNYSCLDQARKELVETVQCQGSQQPPAWPEACVLEPCPPYWAVGDFGPCSASCGGGLRERPVRCVEAQGSLLKTLPPARCRAGAQQPAVALETCNPQPCPARWEVSEPSSCTSAGGAGLALENETCVPGADGLEAPVTEGPGSVDEKLPAPEPCVGMSCPPGWGHLDATSAGEKAPSPWGSIRTGAQAAHVWTPAAGSCSVSCGRGLMELRFLCMDSALRVPVQEELCGLASKPGSRREVCQAVPCPARWQYKLAACSVSCGRGVVRRILYCARAHGEDDGEEILLDTQCQGLPRPEPQEACSLEPCPPRWKVMSLGPCSASCGLGTARRSVACVQLDQGQDVEVDEAACAALVRPEASVPCLIADCTYRWHVGTWMECSVSCGDGIQRRRDTCLGPQAQAPVPADFCQHLPKPVTVRGCWAGPCVGQGACGRQHLEPTGTIDMRGPGQADCAVAIGRPLGEVVTLRVLESSLNCSAGDMLLLWGRLTWRKMCRKLLDMTFSSKTNTLVVRQRCGRPGGGVLLRYGSQLAPETFYRECDMQLFGPWGEIVSPSLSPATSNAGGCRLFINVAPHARIAIHALATNMGAGTEGANASYILIRDTHSLRTTAFHGQQVLYWESESSQAEMEFSEGFLKAQASLRGQYWTLQSWVPEMQDPQSWKGKEGT

SEQ ID NO: 237974 - protein, 344 aa, Artificial Sequence
  derived and/or modified sequence
MHQRHPRARCPPLCVAGILACGFLLGCWGPSHFQQSCLQALEPQAVSSYLSPGAPLKGRPPSPGFQRQRQRQRRAAGGILHLELLVAVGPDVFQAHQEDTERYVLTNLNIGAELLRDPSLGAQFRVHLVKMVILTEPEGAPNITANLTSSLLSVCGWSQTINPEDDTDPGHADLVLYITRFDLELPDGNRQVRGVTQLGGACSPTWSCLITEDTGFDLGVTIAHEIGHSFGLEHDGAPGSGCGPSGHVMASDGAAPRAGLAWSPCSRRQLLSLLRPVPPSPLPLLATHLCAGRSLSLGPSQEPAPGGGRGPRTPVPTHKRPRFQTLPSSCPLLRPASSRCTPRD

SEQ ID NO: 237975 - DNA, 4020 bp, Artificial Sequence
  derived and/or modified sequence
atgcaccagcgccacccccgcgcccgctgcccccccctgtgcgtggccggcatcctggcctgcggcttcctgctgggctgctggggccccagccacttccagcagagctgcctgcaggccctggagccccaggccgtgagcagctacctgagccccggcgcccccctgaagggccgcccccccagccccggcttccagcgccagcgccagcgccagcgccgcgccgccggcggcatcctgcacctggagctgctggtggccgtgggccccgacgtgttccaggcccaccaggaggacaccgagcgctacgtgctgaccaacctgaacatcggcgccgagctgctgcgcgaccccagcctgggcgcccagttccgcgtgcacctggtgaagatggtgatcctgaccgagcccgagggcgcccccaacatcaccgccaacctgaccagcagcctgctgagcgtgtgcggctggagccagaccatcaaccccgaggacgacaccgaccccggccacgccgacctggtgctgtacatcacccgcttcgacctggagctgcccgacggcaaccgccaggtgcgcggcgtgacccagctgggcggcgcctgcagccccacctggagctgcctgatcaccgaggacaccggcttcgacctgggcgtgaccatcgcccacgagatcggccacagcttcggcctggagcacgacggcgcccccggcagcggctgcggccccagcggccacgtgatggccagcgacggcgccgccccccgcgccggcctggcctggagcccctgcagccgccgccagctgctgagcctgctgagcgccaacgagcagtgccgcgtggccttcggccccaaggccgtggcctgcaccttcgcccgcgagcacctggacatgtgccaggccctgagctgccacaccgaccccctggaccagagcagctgcagccgcctgctggtgcccctgctggacggcaccgagtgcggcgtggagaagtggtgcagcaagggccgctgccgcagcctggtggagctgacccccatcgccgccgtgcacggccgctggagcagctggggcccccgcagcccctgcagccgcagctgcggcggcggcgtggtgacccgccgccgccagtgcaacaacccccgccccgccttcggcggccgcgcctgcgtgggcgccgacctgcaggccgagatgtgcaacacccaggcctgcgagaagacccagctggagttcatgagccagcagtgcgcccgcaccgacggccagcccctgcgcagcagccccggcggcgccagcttctaccactggggcgccgccgtgccccacagccagggcgacgccctgtgccgccacatgtgccgcgccatcggcgagagcttcatcatgaagcgcggcgacagcttcctggacggcacccgctgcatgcccagcggcccccgcgaggacggcaccctgagcctgtgcgtgagcggcagctgccgcaccttcggctgcgacggccgcatggacagccagcaggtgtgggaccgctgccaggtgtgcggcggcgacaacagcacctgcagcccccgcaagggcagcttcaccgccggccgcgcccgcgagtacgtgaccttcctgaccgtgacccccaacctgaccagcgtgtacatcgccaaccaccgccccctgttcacccacctggccgtgcgcatcggcggccgctacgtggtggccggcaagatgagcatcagccccaacaccacctaccccagcctgctggaggacggccgcgtggagtaccgcgtggccctgaccgaggaccgcctgccccgcctggaggagatccgcatctggggccccctgcaggaggacgccgacatccaggtgtaccgccgctacggcgaggagtacggcaacctgacccgccccgacatcaccttcacctacttccagcccaagccccgccaggcctgggtgtgggccgccgtgcgcggcccctgcagcgtgagctgcggcgccggcctgcgctgggtgaactacagctgcctggaccaggcccgcaaggagctggtggagaccgtgcagtgccagggcagccagcagccccccgcctggcccgaggcctgcgtgctggagccctgccccccctactgggccgtgggcgacttcggcccctgcagcgccagctgcggcggcggcctgcgcgagcgccccgtgcgctgcgtggaggcccagggcagcctgctgaagaccctgccccccgcccgctgccgcgccggcgcccagcagcccgccgtggccctggagacctgcaacccccagccctgccccgcccgctgggaggtgagcgagcccagcagctgcaccagcgccggcggcgccggcctggccctggagaacgagacctgcgtgcccggcgccgacggcctggaggcccccgtgaccgagggccccggcagcgtggacgagaagctgcccgcccccgagccctgcgtgggcatgagctgcccccccggctggggccacctggacgccaccagcgccggcgagaaggcccccagcccctggggcagcatccgcaccggcgcccaggccgcccacgtgtggacccccgccgccggcagctgcagcgtgagctgcggccgcggcctgatggagctgcgcttcctgtgcatggacagcgccctgcgcgtgcccgtgcaggaggagctgtgcggcctggccagcaagcccggcagccgccgcgaggtgtgccaggccgtgccctgccccgcccgctggcagtacaagctggccgcctgcagcgtgagctgcggccgcggcgtggtgcgccgcatcctgtactgcgcccgcgcccacggcgaggacgacggcgaggagatcctgctggacacccagtgccagggcctgccccgccccgagccccaggaggcctgcagcctggagccctgccccccccgctggaaggtgatgagcctgggcccctgcagcgccagctgcggcctgggcaccgcccgccgcagcgtggcctgcgtgcagctggaccagggccaggacgtggaggtggacgaggccgcctgcgccgccctggtgcgccccgaggccagcgtgccctgcctgatcgccgactgcacctaccgctggcacgtgggcacctggatggagtgcagcgtgagctgcggcgacggcatccagcgccgccgcgacacctgcctgggcccccaggcccaggcccccgtgcccgccgacttctgccagcacctgcccaagcccgtgaccgtgcgcggctgctgggccggcccctgcgtgggccagggcgcctgcggccgccagcacctggagcccaccggcaccatcgacatgcgcggccccggccaggccgactgcgccgtggccatcggccgccccctgggcgaggtggtgaccctgcgcgtgctggagagcagcctgaactgcagcgccggcgacatgctgctgctgtggggccgcctgacctggcgcaagatgtgccgcaagctgctggacatgaccttcagcagcaagaccaacaccctggtggtgcgccagcgctgcggccgccccggcggcggcgtgctgctgcgctacggcagccagctggcccccgagaccttctaccgcgagtgcgacatgcagctgttcggcccctggggcgagatcgtgagccccagcctgagccccgccaccagcaacgccggcggctgccgcctgttcatcaacgtggccccccacgcccgcatcgccatccacgccctggccaccaacatgggcgccggcaccgagggcgccaacgccagctacatcctgatccgcgacacccacagcctgcgcaccaccgccttccacggccagcaggtgctgtactgggagagcgagagcagccaggccgagatggagttcagcgagggcttcctgaaggcccaggccagcctgcgcggccagtactggaccctgcagagctgggtgcccgagatgcaggacccccagagctggaagggcaaggagggcacc

SEQ ID NO: 237976 - DNA, 4023 bp, Artificial Sequence
  derived and/or modified sequence
atgcaccagagacaccccagagccagatgcccccccctgtgcgtggccggcatcctggcctgcggcttcctgctgggctgctggggccccagccacttccagcagagctgcctgcaggccctggagccccaggccgtgagcagctacctgagccccggcgcccccctgaagggcagaccccccagccccggcttccagagacagagacagagacagagaagagccgccggcggcatcctgcacctggagctgctggtggccgtgggccccgacgtgttccaggcccaccaggaggacaccgagagatacgtgctgaccaacctgaacatcggcgccgagctgctgagagaccccagcctgggcgcccagttcagagtgcacctggtgaagatggtgatcctgaccgagcccgagggcgcccccaacatcaccgccaacctgaccagcagcctgctgagcgtgtgcggctggagccagaccatcaaccccgaggacgacaccgaccccggccacgccgacctggtgctgtacatcaccagattcgacctggagctgcccgacggcaacagacaggtgagaggcgtgacccagctgggcggcgcctgcagccccacctggagctgcctgatcaccgaggacaccggcttcgacctgggcgtgaccatcgcccacgagatcggccacagcttcggcctggagcacgacggcgcccccggcagcggctgcggccccagcggccacgtgatggccagcgacggcgccgcccccagagccggcctggcctggagcccctgcagcagaagacagctgctgagcctgctgagcgccaacgagcagtgcagagtggccttcggccccaaggccgtggcctgcaccttcgccagagagcacctggacatgtgccaggccctgagctgccacaccgaccccctggaccagagcagctgcagcagactgctggtgcccctgctggacggcaccgagtgcggcgtggagaagtggtgcagcaagggcagatgcagaagcctggtggagctgacccccatcgccgccgtgcacggcagatggagcagctggggccccagaagcccctgcagcagaagctgcggcggcggcgtggtgaccagaagaagacagtgcaacaaccccagacccgccttcggcggcagagcctgcgtgggcgccgacctgcaggccgagatgtgcaacacccaggcctgcgagaagacccagctggagttcatgagccagcagtgcgccagaaccgacggccagcccctgagaagcagccccggcggcgccagcttctaccactggggcgccgccgtgccccacagccagggcgacgccctgtgcagacacatgtgcagagccatcggcgagagcttcatcatgaagagaggcgacagcttcctggacggcaccagatgcatgcccagcggccccagagaggacggcaccctgagcctgtgcgtgagcggcagctgcagaaccttcggctgcgacggcagaatggacagccagcaggtgtgggacagatgccaggtgtgcggcggcgacaacagcacctgcagccccagaaagggcagcttcaccgccggcagagccagagagtacgtgaccttcctgaccgtgacccccaacctgaccagcgtgtacatcgccaaccacagacccctgttcacccacctggccgtgagaatcggcggcagatacgtggtggccggcaagatgagcatcagccccaacaccacctaccccagcctgctggaggacggcagagtggagtacagagtggccctgaccgaggacagactgcccagactggaggagatcagaatctggggccccctgcaggaggacgccgacatccaggtgtacagaagatacggcgaggagtacggcaacctgaccagacccgacatcaccttcacctacttccagcccaagcccagacaggcctgggtgtgggccgccgtgagaggcccctgcagcgtgagctgcggcgccggcctgagatgggtgaactacagctgcctggaccaggccagaaaggagctggtggagaccgtgcagtgccagggcagccagcagccccccgcctggcccgaggcctgcgtgctggagccctgccccccctactgggccgtgggcgacttcggcccctgcagcgccagctgcggcggcggcctgagagagagacccgtgagatgcgtggaggcccagggcagcctgctgaagaccctgccccccgccagatgcagagccggcgcccagcagcccgccgtggccctggagacctgcaacccccagccctgccccgccagatgggaggtgagcgagcccagcagctgcaccagcgccggcggcgccggcctggccctggagaacgagacctgcgtgcccggcgccgacggcctggaggcccccgtgaccgagggccccggcagcgtggacgagaagctgcccgcccccgagccctgcgtgggcatgagctgcccccccggctggggccacctggacgccaccagcgccggcgagaaggcccccagcccctggggcagcatcagaaccggcgcccaggccgcccacgtgtggacccccgccgccggcagctgcagcgtgagctgcggcagaggcctgatggagctgagattcctgtgcatggacagcgccctgagagtgcccgtgcaggaggagctgtgcggcctggccagcaagcccggcagcagaagagaggtgtgccaggccgtgccctgccccgccagatggcagtacaagctggccgcctgcagcgtgagctgcggcagaggcgtggtgagaagaatcctgtactgcgccagagcccacggcgaggacgacggcgaggagatcctgctggacacccagtgccagggcctgcccagacccgagccccaggaggcctgcagcctggagccctgcccccccagatggaaggtgatgagcctgggcccctgcagcgccagctgcggcctgggcaccgccagaagaagcgtggcctgcgtgcagctggaccagggccaggacgtggaggtggacgaggccgcctgcgccgccctggtgagacccgaggccagcgtgccctgcctgatcgccgactgcacctacagatggcacgtgggcacctggatggagtgcagcgtgagctgcggcgacggcatccagagaagaagagacacctgcctgggcccccaggcccaggcccccgtgcccgccgacttctgccagcacctgcccaagcccgtgaccgtgagaggctgctgggccggcccctgcgtgggccagggcgcctgcggcagacagcacctggagcccaccggcaccatcgacatgagaggccccggccaggccgactgcgccgtggccatcggcagacccctgggcgaggtggtgaccctgagagtgctggagagcagcctgaactgcagcgccggcgacatgctgctgctgtggggcagactgacctggagaaagatgtgcagaaagctgctggacatgaccttcagcagcaagaccaacaccctggtggtgagacagagatgcggcagacccggcggcggcgtgctgctgagatacggcagccagctggcccccgagaccttctacagagagtgcgacatgcagctgttcggcccctggggcgagatcgtgagccccagcctgagccccgccaccagcaacgccggcggctgcagactgttcatcaacgtggccccccacgccagaatcgccatccacgccctggccaccaacatgggcgccggcaccgagggcgccaacgccagctacatcctgatcagagacacccacagcctgagaaccaccgccttccacggccagcaggtgctgtactgggagagcgagagcagccaggccgagatggagttcagcgagggcttcctgaaggcccaggccagcctgagaggccagtactggaccctgcagagctgggtgcccgagatgcaggacccccagagctggaagggcaaggagggcacctag

SEQ ID NO: 237977 - DNA, 4349 bp, Artificial Sequence
  derived and/or modified sequence
acactgcctaatcgtcccgcccagtagtgagcaggcctgtcccattccatactgaccagattcccagtcaccaaggccccctctcactccgctccactcctcgggctggctctcctgaggatgcaccagcgtcacccccgggcaagatgccctcccctctgtgtggccggaatccttgcctgtggctttctcctgggctgctggggaccctcccatttccagcagagttgtcttcaggctttggagccacaggccgtgtcttcttacttgagccctggtgctcccttaaaaggccgccctccttcccctggcttccagaggcagaggcagaggcagaggcgggctgcaggcggcatcctacacctggagctgctggtggccgtgggccccgatgtcttccaggctcaccaggaggacacagagcgctatgtgctcaccaacctcaacatcggggcagaactgcttcgggacccgtccctgggggctcagtttcgggtgcacctggtgaagatggtcattctgacagagcctgagggtgccccaaatatcacagccaacctcacctcgtccctgctgagcgtctgtgggtggagccagaccatcaaccctgaggacgacacggatcctggccatgctgacctggtcctctatatcactaggtttgacctggagttgcctgatggtaaccggcaggtgcggggcgtcacccagctgggcggtgcctgctccccaacctggagctgcctcattaccgaggacactggcttcgacctgggagtcaccattgcccatgagattgggcacagcttcggcctggagcacgacggcgcgcccggcagcggctgcggccccagcggacacgtgatggcttcggacggcgccgcgccccgcgccggcctcgcctggtccccctgcagccgccggcagctgctgagcctgctcagcgccaacgagcagtgccgcgtggccttcggccccaaggctgtcgcctgcaccttcgccagggagcacctggatatgtgccaggccctctcctgccacacagacccgctggaccaaagcagctgcagccgcctcctcgttcctctcctggatgggacagaatgtggcgtggagaagtggtgctccaagggtcgctgccgctccctggtggagctgacccccatagcagcagtgcatgggcgctggtctagctggggtccccgaagtccttgctcccgctcctgcggaggaggtgtggtcaccaggaggcggcagtgcaacaaccccagacctgcctttggggggcgtgcatgtgttggtgctgacctccaggccgagatgtgcaacactcaggcctgcgagaagacccagctggagttcatgtcgcaacagtgcgccaggaccgacggccagccgctgcgctcctcccctggcggcgcctccttctaccactggggtgctgctgtaccacacagccaaggggatgctctgtgcagacacatgtgccgggccattggcgagagcttcatcatgaagcgtggagacagcttcctcgatgggacccggtgtatgccaagtggcccccgggaggacgggaccctgagcctgtgtgtgtcgggcagctgcaggacatttggctgtgatggtaggatggactcccagcaggtatgggacaggtgccaggtgtgtggtggggacaacagcacgtgcagcccacggaagggctctttcacagctggcagagcgagagaatatgtcacatttctgacagttacccccaacctgaccagtgtctacattgccaaccacaggcctctcttcacacacttggcggtgaggatcggagggcgctatgtcgtggctgggaagatgagcatctcccctaacaccacctacccctccctcctggaggatggtcgtgtcgagtacagagtggccctcaccgaggaccggctgccccgcctggaggagatccgcatctggggacccctccaggaagatgctgacatccaggtttacaggcggtatggcgaggagtatggcaacctcacccgcccagacatcaccttcacctacttccagcctaagccacggcaggcctgggtgtgggccgctgtgcgtgggccctgctcggtgagctgtggggcagggctgcgctgggtaaactacagctgcctggaccaggccaggaaggagttggtggagactgtccagtgccaagggagccagcagccaccagcgtggccagaggcctgcgtgctcgaaccctgccctccctactgggcggtgggagacttcggcccatgcagcgcctcctgtgggggcggcctgcgggagcggccagtgcgctgcgtggaggcccagggcagcctcctgaagacattgcccccagcccggtgcagagcaggggcccagcagccagctgtggcgctggaaacctgcaacccccagccctgccctgccaggtgggaggtgtcagagcccagctcatgcacatcagctggtggagcaggcctggccttggagaacgagacctgtgtgccaggggcagatggcctggaggctccagtgactgaggggcctggctccgtagatgagaagctgcctgcccctgagccctgtgtcgggatgtcatgtcctccaggctggggccatctggatgccacctctgcaggggagaaggctccctccccatggggcagcatcaggacgggggctcaagctgcacacgtgtggacccctgcggcagggtcgtgctccgtctcctgcgggcgaggtctgatggagctgcgtttcctgtgcatggactctgccctcagggtgcctgtccaggaagagctgtgtggcctggcaagcaagcctgggagccggcgggaggtctgccaggctgtcccgtgccctgctcggtggcagtacaagctggcggcctgcagcgtgagctgtgggagaggggtcgtgcggaggatcctgtattgtgcccgggcccatggggaggacgatggtgaggagatcctgttggacacccagtgccaggggctgcctcgcccggaaccccaggaggcctgcagcctggagccctgcccacctaggtggaaagtcatgtcccttggcccatgttcggccagctgtggccttggcactgctagacgctcggtggcctgtgtgcagctcgaccaaggccaggacgtggaggtggacgaggcggcctgtgcggcgctggtgcggcccgaggccagtgtcccctgtctcattgccgactgcacctaccgctggcatgttggcacctggatggagtgctctgtttcctgtggggatggcatccagcgccggcgtgacacctgcctcggaccccaggcccaggcgcctgtgccagctgatttctgccagcacttgcccaagccggtgactgtgcgtggctgctgggctgggccctgtgtgggacagggtgcctgtggcaggcagcaccttgagccaacaggaaccattgacatgcgaggcccagggcaggcagactgtgcagtggccattgggcggcccctcggggaggtggtgaccctccgcgtccttgagagttctctcaactgcagtgcgggggacatgttgctgctttggggccggctcacctggaggaagatgtgcaggaagctgttggacatgactttcagctccaagaccaacacgctggtggtgaggcagcgctgcgggcggccaggaggtggggtgctgctgcggtatgggagccagcttgctcctgaaaccttctacagagaatgtgacatgcagctctttgggccctggggtgaaatcgtgagcccctcgctgagtccagccacgagtaatgcagggggctgccggctcttcattaatgtggctccgcacgcacggattgccatccatgccctggccaccaacatgggcgctgggaccgagggagccaatgccagctacatcttgatccgggacacccacagcttgaggaccacagcgttccatgggcagcaggtgctctactgggagtcagagagcagccaggctgagatggagttcagcgagggcttcctgaaggctcaggccagcctgcggggccagtactggaccctccaatcatgggtaccggagatgcaggaccctcagtcctggaagggaaaggaaggaacctgagggtcattgaacatttgttccgtgtctggccagccctggagggttgacccctggtctcagtgctttccaattcgaactttttccaatcttaggtatctactttagagtcttctccaatgtccaaaaggctagggggttggaggtggggactctggaaaagcagcccccatttcctcgggtaccaataaataaaacatgcaggctga

SEQ ID NO: 237978 - DNA, 4023 bp, Artificial Sequence
  derived and/or modified sequence
atgcaccaaagacatccccgggcccggtgtccccctctttgtgtcgctggcattttagcctgtggcttcctcttgggttgttggggaccttctcactttcagcagtcctgcctgcaggcattagagcctcaggcagtgtcctcctacctgagccccggcgctccactgaaggggagacccccaagcccagggtttcagcggcaaaggcagcgacagcgaagggccgctggaggcattctgcatctggagctcctggtggcagttggaccagatgtctttcaggcacatcaagaggacacggaaaggtacgtcctgacaaatctgaacattggagccgagttgctgagggacccttcccttggcgctcagtttcgcgtccacttagtcaaaatggtgatccttacagaacccgagggggcccctaatatcactgccaatctcacttcatccctcctcagtgtgtgcggctggtcccagactattaatccagaggatgataccgatcctggtcacgccgatctcgttctatacattacacggttcgatttggaattgcctgacggcaatcgccaggtgcgcggagttacacaattgggtggggcgtgcagccctacctggtcttgccttattactgaggacacaggatttgacctgggggtgaccatcgcccatgaaatcggtcacagttttgggctggaacacgacggggcccctggctctgggtgcggaccatcaggacacgttatggccagtgacggtgctgcgccacgggctggactcgcctggagcccatgctcccgaagacagctgctgagcctgctcagcgccaacgagcagtgcagagtcgctttcgggcctaaggctgtggcttgtacttttgccagggagcacttggacatgtgtcaggccctgtcttgccacactgatcctctagatcagagtagctgtagccgactcttggtgccccttcttgacggcactgaatgtggggttgaaaaatggtgcagtaagggaagatgtaggagtcttgtggaactcacgcctatcgcagccgtgcacggcagatggagctcgtggggcccacgatcgccatgtagtcgcagctgcggcggaggggtggtgacccggaggagacagtgcaacaatccccggccggcattcggtggcagggcctgcgtcggagcagatctccaagctgaaatgtgcaacacgcaagcatgtgaaaaaacccagctagaattcatgtcccagcagtgtgcccggacagacgggcagcctttacggtccagtcctggcggggcctctttctatcactggggtgccgccgtcccccacagccagggagacgctctctgtaggcacatgtgtcgcgcaataggggaatcattcatcatgaagcgaggggactcattccttgatggaaccaggtgcatgccaagcggcccacgtgaggatggcaccctctccctgtgcgtgagtggcagttgtagaacattcggctgcgatggacgcatggattcacagcaggtgtgggacagatgtcaggtgtgcggtggcgacaactctacatgctcgccaagaaagggctcattcactgccggcagggcgagggaatatgtaaccttcctgacagtaacacctaacctaacctctgtgtatattgcaaaccatcgccctctgttcacccacctcgccgtgcgaattggaggccggtacgtagtcgcaggaaagatgagcatttctccaaataccacgtatcccagcctgttagaggatggccgcgtagaatatagggttgccctcacagaagatcgcctgccgagactggaagagatcaggatctggggacctctacaggaagacgccgacattcaagtgtaccgtcggtatggggaagaatacggcaacctgactcgcccagatatcacctttacatatttccagccaaagcccaggcaggcctgggtttgggctgccgtgagaggaccctgctccgttagttgcggagccggcctgcggtgggtcaattatagctgcctagaccaggcaaggaaggaactggtggagaccgtccagtgccagggctctcagcagccgcccgcctggcctgaagcatgcgtgctagaaccgtgtccaccctactgggctgtgggggatttcgggccctgttcagcctcttgcgggggcggactgagagagaggcctgtccggtgcgtggaagcccaaggatctcttctgaaaactctcccccccgcccggtgcagggctggagcgcaacagcccgcagtggccctggaaacttgtaatccccaaccgtgccctgcccgctgggaagttagtgaacctagtagttgtactagcgccgggggggcagggctcgccctcgaaaatgaaacctgcgttccaggagctgacggactcgaggctccagtgactgagggacccggaagcgttgacgagaagttgccagctccggaaccttgcgtcggcatgagctgcccacccggttggggccacctcgacgcaacatccgccggtgaaaaggccccatcgccatggggaagcatacgaacaggtgctcaggccgctcatgtttggacaccagcagctggctcctgctctgttagttgtggaagaggcctgatggaacttaggtttctgtgtatggatagtgcactccgggtccccgtgcaggaagagctgtgcgggctcgctagcaaaccagggagccgccgggaagtgtgtcaagcagtcccttgtcctgccaggtggcagtacaagcttgccgcatgctctgtgtcctgcggacgcggcgttgtgcggagaatcctatactgtgcccgagcgcatggagaggacgatggggaagaaatcctgctagacacacagtgtcaaggtctgccacgccccgaaccacaggaagcctgttccctggagccatgccctcccaggtggaaagtgatgagcctgggcccctgctctgcgtcttgtggtcttggaacggcccggcgaagcgtggcctgtgtccagctggatcagggccaggacgtggaagtcgatgaagcagcctgcgcagctctggtgcgccccgaagcctccgtgccctgcttgattgcggattgtacctatcgctggcatgtcggcacctggatggagtgctccgtgagctgtggagatgggatccaaaggagacgggacacctgtttgggtccgcaggcccaggcccctgtcccagctgacttctgccagcatctcccaaagccagtaaccgttcgtgggtgctgggccggcccctgtgtcggccagggagcctgtggccgccaacacctggagccgacaggaaccatcgacatgagggggcctggtcaggctgattgcgcagtcgctattggaaggccactgggagaagttgtgactctgagggtgctagaatccagtctgaactgctccgcaggagacatgctgctgctctggggccgtctgacatggcggaagatgtgcaggaagcttctcgatatgacattttcctctaagacaaacacactggtggtgaggcagcgctgcgggcggccagggggcggagtactcctgcggtatggatcccaactggccccagaaaccttttaccgtgaatgcgacatgcagttgtttgggccatggggcgaaatagtgagtccttctctgagcccagctacgagtaatgcaggtggttgtcggcttttcattaatgtcgctccacatgccaggattgcgatccatgctctggcaacaaatatgggcgcaggtacagagggcgcaaatgctagctacatcctgatacgggacacccattcactgcgtaccacagcttttcacgggcagcaagttctgtattgggagagtgagtcctcacaggccgagatggaattttctgaaggctttctcaaggctcaggcctctcttaggggccagtattggaccttgcagtcttgggtgcccgaaatgcaggatccccagagctggaagggaaaagagggaacctag

SEQ ID NO: 237979 - DNA, 4023 bp, Artificial Sequence
  derived and/or modified sequence
atgcaccagaggcacccccgggcccgctgcccccccctgtgtgtggccggcatcctggcctgtggcttcctgctgggctgctggggccccagccacttccagcagagctgcctgcaggccctggagccccaggccgtgagcagctacctgagccctggggcccccctgaagggccggccccccagccctggcttccagaggcagaggcagaggcagaggagagctgctgggggcatcctgcacctggagctgctggtggccgtgggcccagatgtgttccaggcccaccaggaggacacagaaagatatgtgctgaccaacctgaacatcggggctgagctgctgcgggaccccagcctgggcgcccagttccgggtgcacctggtgaagatggtgatcctgacagagcctgagggcgcccccaacatcacagccaacctgaccagcagcctgctgtctgtgtgtggctggagccagaccatcaacccagaagatgacacagatcctggccacgccgacctggtgctgtacatcaccaggtttgacctggagctgcctgatggcaaccggcaggtgcggggcgtgacccagctgggcggggcctgcagccccacctggagctgcctgatcacagaggacaccggctttgacctgggcgtgaccatcgcccacgagatcggccacagctttggcctggagcatgatggagcccctggcagcggctgcggccccagcggccacgtgatggccagtgatggagctgccccccgggccggcctggcctggagcccctgcagccggcggcagctgctgagcctgctgagcgccaatgagcagtgccgggtggccttcggccccaaggctgtggcctgcacctttgcccgggagcacctggacatgtgccaggccctgagctgccacacagaccccctggaccagagcagctgcagccggctgctggtgcccctgctggatggaacagaatgtggggtggagaagtggtgcagcaagggccgctgccgcagcctggtggagctgacccccatcgctgctgtgcacggccgctggagctcctggggccccaggagcccctgcagccgcagctgtggcggcggcgtggtgacccggcggcggcagtgcaacaaccccaggcctgcctttggaggccgggcctgtgtgggcgctgacctgcaggccgagatgtgcaacacccaggcctgtgagaagacccagctggagttcatgagccagcagtgtgccaggacagatggccagcccctgcggagcagccctggaggagccagcttctaccactggggcgctgctgtgccccacagccagggagatgccctgtgccgccacatgtgccgggccatcggggagagcttcatcatgaagagaggagacagcttcctggatggcacccgctgcatgcccagcggcccccgggaggatggcaccctgagcctgtgtgtgtctggcagctgcaggaccttcggctgtgatggccgcatggacagccagcaggtgtgggaccgctgccaggtgtgtggcggggacaacagcacctgcagccccaggaagggcagcttcaccgctggccgggcccgggagtatgtgaccttcctgactgtgacccccaacctgacctctgtgtacatcgccaaccaccggcccctcttcacccacctggccgtgcgcatcggcggccgctacgtggtggccggcaagatgagcatcagccccaacaccacctaccccagcctgctggaggatggccgggtggagtacagagtggccctgacagaagatcggctgccccggctggaggagatccgcatctggggccccctgcaggaggatgctgacatccaggtgtaccgccgctacggggaggagtatggcaacctgaccaggccagacatcaccttcacctacttccagcccaagccccggcaggcctgggtgtgggccgctgtgcggggcccctgcagcgtgtcctgtggggccggcctgcgctgggtgaactacagctgcctggaccaggccaggaaggagctggtggagaccgtgcagtgccagggcagccagcagcccccagcctggccagaggcctgtgtgctggagccctgccccccctactgggccgtgggggactttggcccctgcagcgccagctgtggcggcggcctgcgggagaggcctgtgcgctgtgtggaggcccagggcagcctgctgaagaccctgcccccagcccgctgccgggccggggcccagcagcctgctgtggccctggagacctgcaacccccagccctgcccagcccgctgggaggtgtctgagcccagcagctgcaccagcgctgggggcgccggcctggccctggagaatgagacctgtgtgcctggagcagatggcctggaggcccctgtgacagagggccctggctctgtggatgagaagctgcctgcccctgagccctgtgtgggcatgagctgccccccaggctggggccacctggatgccaccagcgctggggagaaggcccccagcccctggggcagcatcagaactggagcccaggccgcccacgtgtggaccccagctgctggcagctgcagcgtgtcctgtggccggggcctgatggagctgcgcttcctgtgcatggattctgccctgcgggtgcctgtgcaggaggagctgtgtggcctggccagcaagccaggcagcagaagagaggtgtgccaggccgtgccctgcccagcccgctggcagtacaagctggccgcctgcagcgtgtcctgtggccggggcgtggtgcggcgcatcctgtactgtgcccgggcccacggggaggatgatggagaggagatcctgctggacacccagtgccagggcctgcccaggcctgagccccaggaggcctgcagcctggagccctgccccccacgctggaaggtgatgagcctgggcccctgcagcgccagctgtggcctgggcacagccaggagatctgtggcctgtgtgcagctggaccagggccaggatgtggaggtggatgaggccgcctgtgccgccctggtgcggcctgaggcctctgtgccctgcctgattgctgactgcacctaccgctggcacgtgggcacctggatggagtgcagcgtgtcctgtggagatggcatccagaggcggcgggacacctgcctgggcccccaggcccaggcccctgtgcctgctgacttctgccagcacctgcccaagcctgtgacagtgcggggctgctgggccggcccctgtgtgggccagggcgcctgtggccggcagcacctggagcccaccggcaccatcgacatgaggggccctggccaggccgactgtgctgtggccatcggccggcccctgggggaggtggtgaccctgcgggtgctggagagcagcctgaactgcagcgctggggacatgctgctgctgtggggccgcctgacctggaggaagatgtgcaggaagctgctggacatgaccttcagcagcaagaccaacaccctggtggtgcggcagagatgtggccggcctgggggcggcgtgctgctgcgctatggcagccagctggcccctgagaccttctacagagaatgtgacatgcagctgtttggcccctggggcgagatcgtgagccccagcctgagccctgccaccagcaatgccggcggctgccgcctcttcatcaacgtggcccctcatgcccgcatcgccatccacgccctggccaccaacatgggcgccggcacagaaggagccaatgccagctacatcctgatccgggacacccacagcctgcggaccacagccttccacggccagcaggtgctgtactgggagagcgagagcagccaggccgagatggagttcagcgagggcttcctgaaggcccaggccagcctgcggggccagtactggaccctgcagagctgggtgcctgagatgcaggacccccagagctggaagggcaaggagggcacctag

SEQ ID NO: 237980 - DNA, 4023 bp, Artificial Sequence
  derived and/or modified sequence
atgcaccagcggcacccccgggcccggtgcccccccctgtgcgtggcaggtatccttgcatgcgggtttctgctcgggtgctgggggcctagccactttcagcaaagctgccttcaagccctagagccccaggctgtttctagctacttgagcccaggcgctcctcttaaggggcgtccaccttctcctggctttcagcggcagagacaacgccagcgaagagctgctggcgggatcttgcacctggaattgctagtcgctgttggccccgacgtctttcaggcacatcaggaggataccgagcgatacgtgctcaccaatcttaacattggtgcagagcttttaagagaccccagcttgggcgctcagttccgcgtccatctagtgaagatggtcattctgaccgagcccgagggggcgcctaatattaccgccaacttgactagcagcctgctctccgtctgcggatggagccagaccatcaatccggaggatgacacggaccccggccacgcagacttggttctttacatcacacgcttcgacctggaactccctgatgggaaccgacaggttcggggcgtgacgcaactcggtggcgcatgttccccaacgtggtcttgtctcattacagaggacaccggcttcgacctaggagtaaccattgctcacgagatagggcactcgttcgggcttgaacacgatggcgcacctggctccggatgtgggcccagtggccatgtcatggcatccgatggggccgccccacgagcaggtcttgcctggagtccctgctcgcgccgccagcttctatccctgctctctgcgaatgaacagtgtagggtggccttcggtcctaaagccgtcgcttgcaccttcgccagggaacacttagacatgtgccaggctttgagttgccatacggatccactcgatcagagtagctgctcaaggctgctggtgcccctcctcgatggaaccgaatgcggggttgagaagtggtgttccaagggacgatgcagatcactggtggagttaacccccatagccgccgtgcacggacgatggtccagctggggcccccgcagtccatgtagtagatcgtgcggaggcggcgtggtcacacgcagacgtcagtgtaataaccccagaccagccttcgggggtagggcgtgtgtgggcgccgatttgcaggctgagatgtgcaacacccaggcctgcgagaagacccagctggagtttatgtcacaacagtgtgctcgcactgacgggcagccacttcggagttccccaggcggagcttccttctatcattggggagccgctgtgccccactctcaaggtgatgcactgtgccgacacatgtgcagggctatcggcgagtccttcatcatgaagcgtggcgattcgtttctggatggcacacggtgtatgccttcaggcccacgcgaggacggcactctatctctgtgcgtgagtggctcctgtcgtactttcgggtgcgatggtaggatggattcacagcaggtatgggatcggtgtcaggtgtgtggcggggacaatagcacatgtagcccacggaaaggctccttcacagccgggcgcgcccgcgaatatgtgaccttcttgaccgtcacccccaacctcacctcagtatacatcgcaaaccataggccattgttcacacacctggctgtcagaattggaggtcgatacgtagtggctggaaagatgagcatttcccctaacactacttaccccagtctgctggaggacggccgggtcgagtatcgtgtggcactgaccgaggacagactgcctagactggaggaaattcggatctggggccccctgcaagaggacgctgacatccaggtttatcggaggtatggagaagaatatggtaacctgactaggcccgacataacgtttacatacttccagccaaagccccgtcaggcctgggtgtgggcagcagtccggggcccttgctcagtgtcctgtggcgctgggttgaggtgggttaattactcctgtcttgaccaggccaggaaagagctggtcgaaaccgtccaatgccagggttcgcagcagccacctgcatggcccgaggcttgcgtcttggaaccatgtcccccatattgggcagttggggactttggtccttgtagtgccagttgtggcggggggctccgtgagaggcctgtgcggtgcgtggaagctcaaggttccctgctcaaaacactgccccccgcaaggtgtcgcgcgggcgcccagcagccggccgtggccctcgaaacatgtaatcctcagccttgcccggcgcggtgggaagtctcggagccctcctcatgtacctccgcgggaggcgccggtctggcgttggagaatgagacgtgtgtcccaggtgcggatggtctggaagcaccggtcactgagggtcccgggagcgtcgatgagaaactgccagcccccgaaccgtgcgtgggaatgagttgtccgcctgggtggggtcacctagacgcgaccagcgccggcgagaaggcaccctcaccatggggaagcatccgcacaggagcccaggccgcacatgtgtggaccccggcagctggatcttgcagtgtgtcctgcggacggggattaatggagctgagatttctttgcatggatagcgccctccgggtgccagtgcaggaagaattgtgtggattagccagcaagcccggctccagacgggaggtgtgtcaggctgtgccttgtcccgcccgctggcaatacaagctggccgcatgcagtgtctcttgtggacgtggagtggttcgccgtattctgtattgcgcacgtgcacacggtgaagacgacggcgaagaaattctcctggatacacagtgccaggggctgcctagaccagagcctcaggaggcctgttctttagaaccttgtcccccaagatggaaggtgatgtcattgggcccatgctctgcctcctgcgggctgggcaccgctcgcaggagtgtagcttgtgtccagctggaccagggacaagacgtcgaggtggacgaagccgcctgcgccgcacttgtgagaccagaggcctctgtgccctgccttatagcggattgcacatacaggtggcacgtgggaacttggatggagtgtagtgtgtcctgcggtgacgggatccagaggagacgcgatacctgcctaggtccccaggcccaggcccctgtgcctgccgatttttgccaacaccttccaaaacccgtgacagtgcgaggctgttgggccgggccatgtgtgggtcaaggcgcgtgtggcagacaacacctcgagcctaccggcactattgatatgcgggggcctggccaggccgattgcgcagttgcaattggaagacctcttggagaagtggttacgctgagagtactcgagtcctccctgaactgttccgctggtgacatgttattactctggggacgtctgacctggaggaaaatgtgcagaaaactgttggacatgacattctcgagtaaaacaaataccctggtcgtgaggcaacgctgcggtagaccaggaggaggcgtgctgctcaggtatggaagtcagctcgcgccagaaacattttaccgggagtgcgatatgcagctgttcggcccctggggagaaatcgtgagtccaagcctctctcccgctacaagtaatgctggggggtgtagactttttatcaacgtggctcctcatgccaggattgcaatccacgcactggcaacgaacatgggtgccggtactgaaggggctaatgcatcctacatcctcattcgcgacacccactcacttagaacaacggcctttcacgggcaacaagtcctgtattgggagtcagagtcttcacaagccgaaatggagttcagtgaaggatttttgaaggcgcaggcaagcctaagaggccagtactggactttacaaagttgggtgcccgaaatgcaagacccacaatcttggaagggaaaagaagggacctag

SEQ ID NO: 237981 - DNA, 4023 bp, Artificial Sequence
  derived and/or modified sequence
atgcatcagcgtcaccctcgagctaggtgccctccactgtgcgtcgccggaatcctcgcttgcggctttctcctgggatgttggggcccaagccattttcagcagagctgtttgcaggcacttgagccgcaggcagtcagtagctacctcagccccggagctccactgaagggacgccctccatctcccggtttccaacggcagagacagcgccaacggagagccgctggcggaattctacacctagagttactcgtggctgtgggccctgatgtgttccaggcccatcaggaagacacagagagatacgtgctgactaacttgaatattggggcagagcttctaagggaccccagcctgggcgctcagtttcgggtgcacctggtgaaaatggtcattcttacagagcccgagggggctccaaatatcactgcaaatctcacatccagcctccttagcgtgtgtggctggtcacagacaatcaacccagaagacgacactgaccctggccacgccgatctggtactctatattaccaggtttgatctggagctgcctgatggaaaccggcaggttagaggcgtgactcaactaggtggcgcttgcagccctacttggagctgtttgattaccgaggacaccggctttgacttgggcgtgactatcgctcacgagattggacacagctttggactcgagcacgacggagctccgggatccggatgtggcccatcaggccacgtcatggcctccgatggcgctgcccctagggccggattggcctggtccccctgcagcagacgtcaactgcttagtcttctcagcgctaacgagcagtgcagagtggcttttggacctaaggcagtggcttgcaccttcgccagagagcatctggatatgtgtcaagccctgtcctgtcacaccgatccactggatcagagttcttgttctaggttactggttccactgctcgatgggactgaatgtggagttgaaaagtggtgcagcaaggggagatgccggagcttagtggagctgactccaatagccgctgtgcacggcagatggtcgtcgtgggggcctcgatccccatgtagcagatcttgcggcggtggcgtagttacccgtcgtcgccagtgcaataacccacggcctgcttttggaggacgagcctgcgtgggtgctgatttgcaggctgaaatgtgcaatactcaggcatgcgaaaagactcagctagagttcatgagccagcagtgtgctagaactgacggccagcctttacggagcagcccgggaggggcttctttctaccactggggtgcagctgtgcctcacagccagggagatgctctgtgccgacatatgtgcagggccattggtgagagcttcatcatgaagcggggtgatagctttctggacggcacacgttgtatgccttctgggcctcgagaggatgggaccctaagtctgtgcgtgtccggttcctgccggacattcgggtgcgatgggcgaatggactcgcaacaggtgtgggatcgatgccaagtgtgcgggggagataacagtacttgtagcccccgaaagggttcgttcaccgctgggcgtgcgagagagtatgttacgttcctgacggttactcctaacctgacctccgtgtatattgcaaatcaccgaccattgtttacgcacctggccgtgaggatcggagggaggtacgttgtggccggtaagatgtctatctctcctaatacgacctatccatctctgctcgaagacggacgggtggagtacagagttgctctcaccgaagacaggttgcccagactggaggagatccggatctggggtcccctccaagaagatgccgacatccaggtttaccggagatatggggaggagtatgggaatctgactaggcctgacatcacgttcacctactttcagccaaagccacgacaggcctgggtttgggctgcagtcaggggcccttgtagcgtttcgtgcggcgctggactccgttgggtcaattacagttgtctggaccaggctcggaaagaactagtagagacggttcagtgccaggggagtcagcagcctcccgcttggcccgaagcctgcgtcctcgaaccatgccccccatattgggccgtaggagattttggcccatgcagcgcaagctgtggcggagggctgagagagcgacctgtcagatgtgtggaggcccagggctcactgctaaagactctgccacccgcacggtgtagggccggagcccagcaacctgccgttgcacttgaaacatgcaacccccagccttgtcctgcacgctgggaggtatctgagcctagcagttgtacatcagctggtggcgctggcctggccctggaaaacgagacatgcgttcccggagcggatgggctggaagcacctgtgacagaggggcctgggtcggtcgacgagaagttgcccgctccggaaccctgtgtgggcatgagctgccctccaggatgggggcatctcgatgctacaagtgctggtgaaaaggcgccaagtccttggggctctatcaggacgggagctcaggctgcacacgtgtggacacctgctgcaggaagctgtagcgtgtcctgcggacgcggactgatggaactgcgattcttgtgcatggattctgcactcagggtgcccgtccaagaggaattgtgcgggctcgcctccaagccgggaagtagaagagaggtttgccaggctgtcccctgcccggcacgttggcagtataaactcgcagcctgttcagtgagctgcggccgtggggtggtccgccgaattctgtactgtgcccgtgcccatggcgaagatgacggtgaagagattttgctggatactcagtgtcagggcttgccaagacccgaaccacaggaggcctgcagcttagagccttgccccccacgctggaaggtgatgagcctgggtccatgcagtgcctcgtgtggcctggggaccgctagacgctccgtggcatgtgttcagctcgaccaaggacaggatgtggaagtggacgaggctgcctgcgccgcactcgtgaggcccgaagcctctgtgccgtgcctcatcgctgactgcacgtatagatggcatgtgggaacttggatggagtgctctgtgagctgtggagatgggatacaacgacgacgggacacatgtctgggaccccaagcccaggcccctgtccccgcagacttctgccagcacctccccaagccagtaaccgtccgagggtgttgggcaggcccatgtgtggggcagggtgcgtgcggtcgacagcacctggagcccaccgggaccatcgatatgaggggcccaggtcaggctgattgtgctgtggctataggcagaccactgggagaggttgtgaccctgcgggtgctggagagcagcctaaactgcagcgccggagatatgctgcttctatggggtcgcttgacatggcggaagatgtgtaggaagctactggatatgacattttcttctaagacgaacacactggtggtaagacaacgctgtggtcgacctgggggaggtgtactactacggtatggtagccagctcgcccctgaaactttctaccgagaatgcgacatgcagttatttggaccatggggcgagattgtgtcaccttccctgtcgccggcaacctccaacgccggtggttgccgcctctttattaatgtcgccccacacgccaggatcgccattcatgctttagccacgaatatgggcgcaggcaccgaaggggctaacgctagctatattctcattagagacacccatagtttgcggactaccgctttccatggacaacaggtgctgtactgggaatccgaaagctcgcaggcggaaatggagttctccgagggattcttaaaagcccaggcctccctcagggggcagtactggaccttgcagagctgggtacccgaaatgcaggatccacaatcctggaagggcaaagagggaacgtag

SEQ ID NO: 237982 - DNA, 4023 bp, Artificial Sequence
  derived and/or modified sequence
atgcaccagagacatcccagggcacggtgccctcccctatgcgtggctggcatcctggcctgcggatttcttctaggatgctggggtccaagtcattttcagcagtcttgtttgcaggctcttgaaccacaggccgttagcagctacctaagtcctggagccccgttgaaggggagaccaccgtcaccgggcttccagcgacaacgccaacgccagcgaagggccgcaggcggcatcctgcatctcgagcttcttgtcgcagtgggccccgatgtgtttcaggcacaccaggaagataccgaacgatacgtcttgaccaatctcaatatcggagctgagctcctgagagacccctctctgggggcccagtttcgcgtccacctggtgaagatggtaattctcaccgagcctgagggcgctccgaatattacagccaatcttacatcctccctgcttagcgtgtgcggatggtctcagactattaacccagaagacgacaccgatccaggtcatgcagatcttgtgctgtatataacgagatttgatctggagcttcctgatggcaaccgacaagtgaggggagtgacacagctgggaggcgcctgttcgccaacctggtcatgtctcatcactgaagacacaggatttgatcttggcgtgacaatcgctcatgagatcgggcactctttcggtctggagcacgacggcgcaccagggagtggatgcggaccttctggccacgtaatggcctccgatggcgctgccccacgggctggactagcgtggtcaccatgtagtagacgacagctgctgagcctgttatcagcaaacgaacagtgccgggtggctttcggacccaaggccgttgcctgcacgtttgcccgcgagcacttggatatgtgccaggctctctcttgtcacacagatcctctcgatcaaagctcgtgcagccgcctgcttgttcctcttctggacggaaccgagtgcggagtcgaaaagtggtgtagcaagggcagatgtagatcgctggttgagctcacaccaatagcagcagtgcacggtagatggagcagctggggacccaggagcccatgcagccgatcctgtggcggaggagtggtgacccgccgccgccagtgcaacaacccgcgacccgctttcggcggaagagcatgcgtgggagcagaccttcaggctgaaatgtgcaacacccaggcttgtgaaaagactcaattggagtttatgtcccagcagtgtgccaggaccgacgggcaaccactgagatcatcccctggtggcgcgagcttctatcactggggggctgctgtgcctcacagccagggagatgccctgtgtaggcacatgtgcagggcaatcggagagtccttcattatgaagagaggcgattcattcttagatggcactaggtgcatgccatccgggccccgggaggatggcactctgagtctgtgtgtatccggtagttgtcggacctttggttgtgacggtaggatggacagccagcaagtttgggatcgatgtcaagtgtgtggaggagataatagtacatgcagccctcgtaagggtagcttcactgcaggcagggccagggaatatgtgacatttttgactgtgactcccaatttaaccagcgtgtacatcgctaaccatcgccctcttttcactcaccttgccgtgaggatcggagggcggtatgtcgtggcagggaaaatgagtatctctcccaacaccacatacccttccttgttggaggatggtagagtggaatacagagtggcgctgacggaggataggcttcctagactcgaggaaatacgtatttggggccccctgcaagaagacgctgacatacaagtgtaccggaggtatggggaggagtatggcaacttgacacgacccgacatcacttttacatattttcaacctaagccccggcaggcctgggtgtgggcagcagtgcgtgggccctgcagcgtgtcctgcggggctgggctgagatgggtgaactattcttgcctcgaccaggcacgcaaggaattggtggagactgttcagtgccagggcagccagcaaccaccagcatggcctgaggcctgcgtgctggagccttgtcctccctattgggccgtgggtgatttcggcccctgcagcgcatcgtgtggcgggggacttcgcgagcggcctgttcggtgcgtggaagctcagggaagccttctgaaaaccctgcctccagcccgttgtagagccggagcacaacagcctgctgtcgccctagaaacatgtaaccctcagccgtgtcccgctaggtgggaggtgagtgaaccaagtagctgtacttcagctggaggtgctggattggcactggaaaacgaaacttgcgtccccggcgccgatgggctggaagcaccagtgaccgagggaccaggatccgtagacgaaaaactgcctgcacctgaaccctgcgttggcatgagttgtcctcctgggtggggacacttggacgccacatcagcaggggaaaaggccccttcaccatggggatcaattaggactggcgcccaggcagctcacgtctggacacctgcagcggggagttgctctgttagttgtgggcgcggccttatggagctgagattcttgtgtatggacagcgccttgagagtgcctgtgcaggaggaactctgcgggctggcctcaaaacccggaagccgtagggaagtatgtcaggcagtgccatgtcccgctcgttggcagtataagctggccgcctgttccgtctcatgtggccggggggtcgtacggaggatcttatactgcgcacgggctcatggcgaggatgacggcgaggagatattgctcgatacccagtgccagggcctccccaggccagaacctcaggaagcttgttctcttgaaccatgcccaccaagatggaaggtcatgtcccttgggccttgctctgcatcatgtggtctcggcaccgcccggcggagcgtcgcctgcgttcagctggaccaaggtcaggatgtcgaggtggatgaggccgcgtgtgccgccctcgtgcgacccgaagctagcgtgccctgcctgattgcggattgtacttatcgatggcacgtgggtacttggatggaatgcagtgtcagctgtggtgatggaattcaaaggcgccgagacacctgcctgggaccacaggcccaagccccggtcccggccgatttttgccagcacttgccaaagcccgtgacagtgcgaggctgctgggctggcccctgtgtgggacagggagcatgcggaaggcagcaccttgaacccaccggtaccatcgatatgagagggcccggccaagccgattgcgccgttgccatcggcagacctttaggcgaagttgtaactctgcgggtcctggagtcctcgctgaactgctccgcaggcgatatgctcttactttggggcagacttacctggcggaagatgtgtcgcaaactgctcgacatgacattcagctccaaaacgaacactctggttgtccgacagcgctgtggcagaccaggcggcggtgttctgttgaggtacggtagtcaattggccccagagacgttctaccgcgagtgcgacatgcagctctttggaccttggggggaaatcgtgtccccgagccttagtcctgccacttccaatgcaggcggctgccggctattcatcaacgtagctccacacgcgcgcatcgcaatccatgcactggcgaccaatatgggggctggtacagaaggtgcaaatgcaagctatattctgattagagacacgcacagcttgagaactactgcttttcatggacagcaggttctatactgggaatcagaaagcagccaagccgagatggaattctccgaggggttcttaaaagcgcaggcctcacttagaggtcaatactggaccctgcagagttgggttcctgagatgcaggatccacagagctggaaggggaaagaaggcacttag

SEQ ID NO: 237983 - DNA, 4023 bp, Artificial Sequence
  derived and/or modified sequence
atgcaccagaggcaccctcgggccagatgtccccccctctgcgttgctggaatcctcgcgtgtggtttcttgctcggttgttggggccccagccactttcagcaatcctgtttacaggcactagagcctcaggccgtttcgtcgtatctctctccgggtgcacccctcaaaggcagacctccctcccctgggttccagaggcagcgacagcggcagcggcgcgccgccggcgggattctacatcttgagcttcttgtcgctgtgggaccagatgtgttccaggcccatcaggaggacaccgagagatatgtcctgactaacctgaacatcggagcagaactgttgcgcgatccttctcttggagcccaatttcgggtacacctggtcaaaatggtgatattaacagaaccagagggagccccaaatattacagctaacttaacctcttctttactcagtgtgtgtggctggtctcagaccataaatcctgaggatgacacggaccccggccatgccgatctcgtcctttatatcacacgcttcgacttagagttgccagatgggaaccgccaggtccgcggtgtcactcaactgggaggagcctgctcccctacttggtcttgcctgatcaccgaggatacgggcttcgatctgggggtaactatagctcacgaaatcggtcattccttcggcttagaacatgacggggctccaggatctggatgtggaccttccggacacgttatggcttctgatggggcggcaccaagagcgggcctggcttggtcaccatgttcacgtcgccagttgctcagccttctgtcagccaatgagcaatgcagggttgcttttggtccaaaggcagtcgcatgtaccttcgctcgcgagcacctagatatgtgccaagcactgagctgtcacaccgatcctctcgaccaaagttcttgctcacgcttgctggtcccgctcctagacggcacggagtgtggagtggaaaagtggtgtagcaagggtaggtgtagatctctcgtcgaactgactcccattgcagcggtccacgggagatggtctagctggggtcctagaagtccttgtagtcgcagctgtggaggtggcgtcgtgaccagaagacgtcagtgtaataatccaagacctgcattcggaggccgtgcgtgtgtgggagcagacctccaggctgaaatgtgcaacacccaagcctgtgaaaagacccagctggaattcatgtcccaacaatgtgcaagaactgacggccagcctttgcgctcttcacctggaggcgctagtttttatcactggggagccgccgtaccacatagtcagggcgatgcactctgccgtcatatgtgtcgagctatcggagaatcattcataatgaagaggggagactcattccttgacggcaccaggtgtatgccatccggccctcgcgaagatgggaccctgagtttatgcgtgagcggatcctgccggaccttcggttgtgatgggaggatggatagccagcaggtgtgggacaggtgtcaggtgtgtggaggggacaattccacttgctcaccaagaaaagggagcttcacagccgggagagctagagaatacgtcactttcttaacagtaaccccgaaccttacaagtgtatacattgctaatcacagaccactattcacccaccttgccgttcgcattggaggtcgctatgtcgtcgctggtaagatgtctatatccccgaacacaacgtatcctagtctgcttgaggatgggcgagtcgagtaccgcgtggcacttacggaagatcgactgccccgcttggaagaaataagaatatggggaccccttcaagaggatgctgatattcaggtgtacaggagatatggcgaagaatatgggaatctcacgcgaccagatataacgttcacctattttcagcctaagcctagacaggcctgggtatgggccgccgtcagaggaccctgcagcgtgtcttgtggggccggtttgcggtgggtaaactatagttgccttgatcaagcgcggaaagagcttgttgagactgtccagtgccagggtagccagcagcctcctgcatggccagaggcgtgtgtactggaaccctgtcccccttattgggcagtgggagacttcggaccttgtagcgcatcatgtgggggcggactcagagagcggcccgtgaggtgcgtggaggcgcaggggtctctgctgaaaacattgccacccgctcgttgccgcgccggcgcccagcagccagctgtcgcactcgagacctgtaatccacagccctgccctgcccgttgggaagtgagtgaacccagcagttgcacttccgccggaggagctggcctcgcgctagagaacgaaacttgcgttcctggcgcggatggcttggaagctccagtgacagaaggacctggtagcgtcgacgaaaagctccccgcccctgagccctgcgttggtatgtcttgcccacccggatggggtcatctggacgcaacaagtgccggagagaaggctcccagcccttggggatctattaggacgggagcccaagccgcccatgtttggacaccagcagcaggtagctgctcagttagctgtggaagaggtctgatggagctcagatttttgtgcatggatagtgccctgcgcgttcctgtgcaggaagagttatgtggcctggcaagtaaaccgggttctcgaagagaagtgtgtcaggctgtaccatgcccagctcgatggcagtacaagctagcggcctgctccgtgtcctgcggccgaggggtggttagaagaattctgtactgcgcacgcgcacatggtgaggacgacggggaggagattctgctggacacccaatgtcagggattacctcgtccagaacctcaggaagcctgctcattagagccctgccctccaaggtggaaagttatgagcctgggaccctgttcggccagttgtggcctggggacggcaagacgttcagttgcatgtgtccagttagaccagggtcaggatgtggaggtggatgaggcagcttgtgctgccctggtgcgcccagaggcctccgtcccttgcctgattgcagactgcacttaccgctggcacgtggggacgtggatggaatgctctgtttcctgcggagatggaatacaaagaaggagagatacgtgcctcggaccacaggcgcaagcaccagtcccagcagacttctgccaacatctgcccaaaccagttactgttcggggctgttgggccggcccttgcgtcggccaaggtgcttgtggccgccagcatctggaacctacaggaacaatcgacatgcgcggaccgggacaggcagactgtgcagttgcgatcggtagacctcttggagaggtggtgacgttaagagtgctcgagtcttcactgaattgtagtgcaggcgatatgttgcttctctggggccggctcacttggagaaagatgtgtcggaaactgctggatatgaccttttcatctaagactaacacactggttgttcgacagaggtgtggaagacccggggggggtgttttactccggtacgggtctcaacttgcccctgaaaccttctacagagaatgtgacatgcagttgttcggaccttggggggaaattgttagtccgtctctgagcccagcaacgtccaacgcagggggatgccggttgtttattaacgtagcgccccacgcccgaatcgctattcacgctctggccactaacatgggcgccgggacagaaggtgcgaacgcgagctacatcctgattcgagacactcactccctgagaaccacagctttccacggccagcaagtgttgtattgggaatcagaaagctcccaggccgagatggagtttagcgagggatttcttaaagcccaagcctcgcttcgcggacagtattggacactacaaagctgggtcccagagatgcaggatccccaatcatggaaaggaaaagagggcacatag

SEQ ID NO: 237984 - RNA, 4023 nt, Artificial Sequence
  derived and/or modified sequence
augcaccagagacaucccagggcacggugcccuccccuaugcguggcuggcauccuggccugcggauuucuucuaggaugcugggguccaagucauuuucagcagucuuguuugcaggcucuugaaccacaggccguuagcagcuaccuaaguccuggagccccguugaaggggagaccaccgucaccgggcuuccagcgacaacgccaacgccagcgaagggccgcaggcggcauccugcaucucgagcuucuugucgcagugggccccgauguguuucaggcacaccaggaagauaccgaacgauacgucuugaccaaucucaauaucggagcugagcuccugagagaccccucucugggggcccaguuucgcguccaccuggugaagaugguaauucucaccgagccugagggcgcuccgaauauuacagccaaucuuacauccucccugcuuagcgugugcggauggucucagacuauuaacccagaagacgacaccgauccaggucaugcagaucuugugcuguauauaacgagauuugaucuggagcuuccugauggcaaccgacaagugaggggagugacacagcugggaggcgccuguucgccaaccuggucaugucucaucacugaagacacaggauuugaucuuggcgugacaaucgcucaugagaucgggcacucuuucggucuggagcacgacggcgcaccagggaguggaugcggaccuucuggccacguaauggccuccgauggcgcugccccacgggcuggacuagcguggucaccauguaguagacgacagcugcugagccuguuaucagcaaacgaacagugccggguggcuuucggacccaaggccguugccugcacguuugcccgcgagcacuuggauaugugccaggcucucucuugucacacagauccucucgaucaaagcucgugcagccgccugcuuguuccucuucuggacggaaccgagugcggagucgaaaagugguguagcaagggcagauguagaucgcugguugagcucacaccaauagcagcagugcacgguagauggagcagcuggggacccaggagcccaugcagccgauccuguggcggaggaguggugacccgccgccgccagugcaacaacccgcgacccgcuuucggcggaagagcaugcgugggagcagaccuucaggcugaaaugugcaacacccaggcuugugaaaagacucaauuggaguuuaugucccagcagugugccaggaccgacgggcaaccacugagaucauccccugguggcgcgagcuucuaucacuggggggcugcugugccucacagccagggagaugcccuguguaggcacaugugcagggcaaucggagaguccuucauuaugaagagaggcgauucauucuuagauggcacuaggugcaugccauccgggccccgggaggauggcacucugagucuguguguauccgguaguugucggaccuuugguugugacgguaggauggacagccagcaaguuugggaucgaugucaaguguguggaggagauaauaguacaugcagcccucguaaggguagcuucacugcaggcagggccagggaauaugugacauuuuugacugugacucccaauuuaaccagcguguacaucgcuaaccaucgcccucuuuucacucaccuugccgugaggaucggagggcgguaugucguggcagggaaaaugaguaucucucccaacaccacauacccuuccuuguuggaggaugguagaguggaauacagaguggcgcugacggaggauaggcuuccuagacucgaggaaauacguauuuggggcccccugcaagaagacgcugacauacaaguguaccggagguauggggaggaguauggcaacuugacacgacccgacaucacuuuuacauauuuucaaccuaagccccggcaggccugggugugggcagcagugcgugggcccugcagcguguccugcggggcugggcugagaugggugaacuauucuugccucgaccaggcacgcaaggaauugguggagacuguucagugccagggcagccagcaaccaccagcauggccugaggccugcgugcuggagccuuguccucccuauugggccgugggugauuucggccccugcagcgcaucguguggcgggggacuucgcgagcggccuguucggugcguggaagcucagggaagccuucugaaaacccugccuccagcccguuguagagccggagcacaacagccugcugucgcccuagaaacauguaacccucagccgugucccgcuaggugggaggugagugaaccaaguagcuguacuucagcuggaggugcuggauuggcacuggaaaacgaaacuugcguccccggcgccgaugggcuggaagcaccagugaccgagggaccaggauccguagacgaaaaacugccugcaccugaacccugcguuggcaugaguuguccuccuggguggggacacuuggacgccacaucagcaggggaaaaggccccuucaccauggggaucaauuaggacuggcgcccaggcagcucacgucuggacaccugcagcggggaguugcucuguuaguugugggcgcggccuuauggagcugagauucuuguguauggacagcgccuugagagugccugugcaggaggaacucugcgggcuggccucaaaacccggaagccguagggaaguaugucaggcagugccaugucccgcucguuggcaguauaagcuggccgccuguuccgucucauguggccggggggucguacggaggaucuuauacugcgcacgggcucauggcgaggaugacggcgaggagauauugcucgauacccagugccagggccuccccaggccagaaccucaggaagcuuguucucuugaaccaugcccaccaagauggaaggucaugucccuugggccuugcucugcaucauguggucucggcaccgcccggcggagcgucgccugcguucagcuggaccaaggucaggaugucgagguggaugaggccgcgugugccgcccucgugcgacccgaagcuagcgugcccugccugauugcggauuguacuuaucgauggcacguggguacuuggauggaaugcagugucagcuguggugauggaauucaaaggcgccgagacaccugccugggaccacaggcccaagccccggucccggccgauuuuugccagcacuugccaaagcccgugacagugcgaggcugcugggcuggccccugugugggacagggagcaugcggaaggcagcaccuugaacccaccgguaccaucgauaugagagggcccggccaagccgauugcgccguugccaucggcagaccuuuaggcgaaguuguaacucugcggguccuggaguccucgcugaacugcuccgcaggcgauaugcucuuacuuuggggcagacuuaccuggcggaagaugugucgcaaacugcucgacaugacauucagcuccaaaacgaacacucugguuguccgacagcgcuguggcagaccaggcggcgguguucuguugagguacgguagucaauuggccccagagacguucuaccgcgagugcgacaugcagcucuuuggaccuuggggggaaaucguguccccgagccuuaguccugccacuuccaaugcaggcggcugccggcuauucaucaacguagcuccacacgcgcgcaucgcaauccaugcacuggcgaccaauaugggggcugguacagaaggugcaaaugcaagcuauauucugauuagagacacgcacagcuugagaacuacugcuuuucauggacagcagguucuauacugggaaucagaaagcagccaagccgagauggaauucuccgagggguucuuaaaagcgcaggccucacuuagaggucaauacuggacccugcagaguuggguuccugagaugcaggauccacagagcuggaaggggaaagaaggcacuuag

SEQ ID NO: 237985 - RNA, 4023 nt, Artificial Sequence
  derived and/or modified sequence
augcaccagaggcacccucgggccagaugucccccccucugcguugcuggaauccucgcgugugguuucuugcucgguuguuggggccccagccacuuucagcaauccuguuuacaggcacuagagccucaggccguuucgucguaucucucuccgggugcaccccucaaaggcagaccucccuccccuggguuccagaggcagcgacagcggcagcggcgcgccgccggcgggauucuacaucuugagcuucuugucgcugugggaccagauguguuccaggcccaucaggaggacaccgagagauauguccugacuaaccugaacaucggagcagaacuguugcgcgauccuucucuuggagcccaauuucggguacaccuggucaaaauggugauauuaacagaaccagagggagccccaaauauuacagcuaacuuaaccucuucuuuacucaguguguguggcuggucucagaccauaaauccugaggaugacacggaccccggccaugccgaucucguccuuuauaucacacgcuucgacuuagaguugccagaugggaaccgccagguccgcggugucacucaacugggaggagccugcuccccuacuuggucuugccugaucaccgaggauacgggcuucgaucuggggguaacuauagcucacgaaaucggucauuccuucggcuuagaacaugacggggcuccaggaucuggauguggaccuuccggacacguuauggcuucugauggggcggcaccaagagcgggccuggcuuggucaccauguucacgucgccaguugcucagccuucugucagccaaugagcaaugcaggguugcuuuugguccaaaggcagucgcauguaccuucgcucgcgagcaccuagauaugugccaagcacugagcugucacaccgauccucucgaccaaaguucuugcucacgcuugcuggucccgcuccuagacggcacggaguguggaguggaaaagugguguagcaaggguagguguagaucucucgucgaacugacucccauugcagcgguccacgggagauggucuagcugggguccuagaaguccuuguagucgcagcuguggagguggcgucgugaccagaagacgucaguguaauaauccaagaccugcauucggaggccgugcgugugugggagcagaccuccaggcugaaaugugcaacacccaagccugugaaaagacccagcuggaauucaugucccaacaaugugcaagaacugacggccagccuuugcgcucuucaccuggaggcgcuaguuuuuaucacuggggagccgccguaccacauagucagggcgaugcacucugccgucauaugugucgagcuaucggagaaucauucauaaugaagaggggagacucauuccuugacggcaccagguguaugccauccggcccucgcgaagaugggacccugaguuuaugcgugagcggauccugccggaccuucgguugugaugggaggauggauagccagcaggugugggacaggugucagguguguggaggggacaauuccacuugcucaccaagaaaagggagcuucacagccgggagagcuagagaauacgucacuuucuuaacaguaaccccgaaccuuacaaguguauacauugcuaaucacagaccacuauucacccaccuugccguucgcauuggaggucgcuaugucgucgcugguaagaugucuauauccccgaacacaacguauccuagucugcuugaggaugggcgagucgaguaccgcguggcacuuacggaagaucgacugccccgcuuggaagaaauaagaauauggggaccccuucaagaggaugcugauauucagguguacaggagauauggcgaagaauaugggaaucucacgcgaccagauauaacguucaccuauuuucagccuaagccuagacaggccuggguaugggccgccgucagaggacccugcagcgugucuuguggggccgguuugcgguggguaaacuauaguugccuugaucaagcgcggaaagagcuuguugagacuguccagugccaggguagccagcagccuccugcauggccagaggcguguguacuggaacccugucccccuuauugggcagugggagacuucggaccuuguagcgcaucaugugggggcggacucagagagcggcccgugaggugcguggaggcgcaggggucucugcugaaaacauugccacccgcucguugccgcgccggcgcccagcagccagcugucgcacucgagaccuguaauccacagcccugcccugcccguugggaagugagugaacccagcaguugcacuuccgccggaggagcuggccucgcgcuagagaacgaaacuugcguuccuggcgcggauggcuuggaagcuccagugacagaaggaccugguagcgucgacgaaaagcuccccgccccugagcccugcguugguaugucuugcccacccggauggggucaucuggacgcaacaagugccggagagaaggcucccagcccuuggggaucuauuaggacgggagcccaagccgcccauguuuggacaccagcagcagguagcugcucaguuagcuguggaagaggucugauggagcucagauuuuugugcauggauagugcccugcgcguuccugugcaggaagaguuauguggccuggcaaguaaaccggguucucgaagagaagugugucaggcuguaccaugcccagcucgauggcaguacaagcuagcggccugcuccguguccugcggccgaggggugguuagaagaauucuguacugcgcacgcgcacauggugaggacgacggggaggagauucugcuggacacccaaugucagggauuaccucguccagaaccucaggaagccugcucauuagagcccugcccuccaagguggaaaguuaugagccugggacccuguucggccaguuguggccuggggacggcaagacguucaguugcauguguccaguuagaccagggucaggauguggagguggaugaggcagcuugugcugcccuggugcgcccagaggccuccgucccuugccugauugcagacugcacuuaccgcuggcacguggggacguggauggaaugcucuguuuccugcggagauggaauacaaagaaggagagauacgugccucggaccacaggcgcaagcaccagucccagcagacuucugccaacaucugcccaaaccaguuacuguucggggcuguugggccggcccuugcgucggccaaggugcuuguggccgccagcaucuggaaccuacaggaacaaucgacaugcgcggaccgggacaggcagacugugcaguugcgaucgguagaccucuuggagagguggugacguuaagagugcucgagucuucacugaauuguagugcaggcgauauguugcuucucuggggccggcucacuuggagaaagaugugucggaaacugcuggauaugaccuuuucaucuaagacuaacacacugguuguucgacagagguguggaagacccgggggggguguuuuacuccgguacgggucucaacuugccccugaaaccuucuacagagaaugugacaugcaguuguucggaccuuggggggaaauuguuaguccgucucugagcccagcaacguccaacgcagggggaugccgguuguuuauuaacguagcgccccacgcccgaaucgcuauucacgcucuggccacuaacaugggcgccgggacagaaggugcgaacgcgagcuacauccugauucgagacacucacucccugagaaccacagcuuuccacggccagcaaguguuguauugggaaucagaaagcucccaggccgagauggaguuuagcgagggauuucuuaaagcccaagccucgcuucgcggacaguauuggacacuacaaagcugggucccagagaugcaggauccccaaucauggaaaggaaaagagggcacauag

SEQ ID NO: 237986 - protein, 1371 aa, Artificial Sequence
  derived and/or modified sequence
MHQRHPRARCPPLCVAGILACGFLLGCWGPSHFQQSCLQALEPQAVSSYLSPGAPLKGRPPSPGFQRQRQRQRRAAGGILHLELLVAVGPDVFQAHQEDTERYVLTNLNIGAELLRDPSLGAQFRVHLVKMVILTEPEGAPNITANLTSSLLSVCGWSQTINPEDDTDPGHADLVLYITRFDLELPDGNRQVRGVTQLGGACSPTWSCLITEDTGFDLGVTIAHEIGHSFGLEHDGAPGSGCGPSGHVMASDGAAPRAGLAWSPCSRRQLLSLLSAGRARCVWDPPRPQPGSAGHPPDAQPGLYYSANEQCRVAFGPKAVACTFAREHLDMCQALSCHTDPLDQSSCSRLLVPLLDGTECGVEKWCSKGRCRSLVELTPIAAVHGRWSSWGPRSPCSRSCGGGVVTRRRQCNNPRPAFGGRACVGADLQAEMCNTQACEKTQLEFMSQQCARTDGQPLRSSPGGASFYHWGAAVPHSQGDALCRHMCRAIGESFIMKRGDSFLDGTRCMPSGPREDGTLSLCVSGSCRTFGCDGRMDSQQVWDRCQVCGGDNSTCSPRKGSFTAGRAREYVTFLTVTPNLTSVYIANHRPLFTHLAVRIGGRYVVAGKMSISPNTTYPSLLEDGRVEYRVALTEDRLPRLEEIRIWGPLQEDADIQVYRRYGEEYGNLTRPDITFTYFQPKPRQAWVWAAVRGPCSVSCGAGLRWVNYSCLDQARKELVETVQCQGSQQPPAWPEACVLEPCPPYWAVGDFGPCSASCGGGLRERPVRCVEAQGSLLKTLPPARCRAGAQQPAVALETCNPQPCPARWEVSEPSSCTSAGGAGLALENETCVPGADGLEAPVTEGPGSVDEKLPAPEPCVGMSCPPGWGHLDATSAGEKAPSPWGSIRTGAQAAHVWTPAAGSCSVSCGRGLMELRFLCMDSALRVPVQEELCGLASKPGSRREVCQAVPCPARWQYKLAACSVSCGRGVVRRILYCARAHGEDDGEEILLDTQCQGLPRPEPQEACSLEPCPPRWKVMSLGPCSASCGLGTARRSVACVQLDQGQDVEVDEAACAALVRPEASVPCLIADCTYRWHVGTWMECSVSCGDGIQRRRDTCLGPQAQAPVPADFCQHLPKPVTVRGCWAGPCVGQGACGRQHLEPTGTIDMRGPGQADCAVAIGRPLGEVVTLRVLESSLNCSAGDMLLLWGRLTWRKMCRKLLDMTFSSKTNTLVVRQRCGRPGGGVLLRYGSQLAPETFYRECDMQLFGPWGEIVSPSLSPATSNAGGCRLFINVAPHARIAIHALATNMGAGTEGANASYILIRDTHSLRTTAFHGQQVLYWESESSQAEMEFSEGFLKAQASLRGQYWTLQSWVPEMQDPQSWKGKEGT

SEQ ID NO: 237987 - DNA, 4113 bp, Artificial Sequence
  derived and/or modified sequence
atgcaccagcgccacccccgcgcccgctgcccccccctgtgcgtggccggcatcctggcctgcggcttcctgctgggctgctggggccccagccacttccagcagagctgcctgcaggccctggagccccaggccgtgagcagctacctgagccccggcgcccccctgaagggccgcccccccagccccggcttccagcgccagcgccagcgccagcgccgcgccgccggcggcatcctgcacctggagctgctggtggccgtgggccccgacgtgttccaggcccaccaggaggacaccgagcgctacgtgctgaccaacctgaacatcggcgccgagctgctgcgcgaccccagcctgggcgcccagttccgcgtgcacctggtgaagatggtgatcctgaccgagcccgagggcgcccccaacatcaccgccaacctgaccagcagcctgctgagcgtgtgcggctggagccagaccatcaaccccgaggacgacaccgaccccggccacgccgacctggtgctgtacatcacccgcttcgacctggagctgcccgacggcaaccgccaggtgcgcggcgtgacccagctgggcggcgcctgcagccccacctggagctgcctgatcaccgaggacaccggcttcgacctgggcgtgaccatcgcccacgagatcggccacagcttcggcctggagcacgacggcgcccccggcagcggctgcggccccagcggccacgtgatggccagcgacggcgccgccccccgcgccggcctggcctggagcccctgcagccgccgccagctgctgagcctgctgagcgccggccgcgcccgctgcgtgtgggaccccccccgcccccagcccggcagcgccggccacccccccgacgcccagcccggcctgtactacagcgccaacgagcagtgccgcgtggccttcggccccaaggccgtggcctgcaccttcgcccgcgagcacctggacatgtgccaggccctgagctgccacaccgaccccctggaccagagcagctgcagccgcctgctggtgcccctgctggacggcaccgagtgcggcgtggagaagtggtgcagcaagggccgctgccgcagcctggtggagctgacccccatcgccgccgtgcacggccgctggagcagctggggcccccgcagcccctgcagccgcagctgcggcggcggcgtggtgacccgccgccgccagtgcaacaacccccgccccgccttcggcggccgcgcctgcgtgggcgccgacctgcaggccgagatgtgcaacacccaggcctgcgagaagacccagctggagttcatgagccagcagtgcgcccgcaccgacggccagcccctgcgcagcagccccggcggcgccagcttctaccactggggcgccgccgtgccccacagccagggcgacgccctgtgccgccacatgtgccgcgccatcggcgagagcttcatcatgaagcgcggcgacagcttcctggacggcacccgctgcatgcccagcggcccccgcgaggacggcaccctgagcctgtgcgtgagcggcagctgccgcaccttcggctgcgacggccgcatggacagccagcaggtgtgggaccgctgccaggtgtgcggcggcgacaacagcacctgcagcccccgcaagggcagcttcaccgccggccgcgcccgcgagtacgtgaccttcctgaccgtgacccccaacctgaccagcgtgtacatcgccaaccaccgccccctgttcacccacctggccgtgcgcatcggcggccgctacgtggtggccggcaagatgagcatcagccccaacaccacctaccccagcctgctggaggacggccgcgtggagtaccgcgtggccctgaccgaggaccgcctgccccgcctggaggagatccgcatctggggccccctgcaggaggacgccgacatccaggtgtaccgccgctacggcgaggagtacggcaacctgacccgccccgacatcaccttcacctacttccagcccaagccccgccaggcctgggtgtgggccgccgtgcgcggcccctgcagcgtgagctgcggcgccggcctgcgctgggtgaactacagctgcctggaccaggcccgcaaggagctggtggagaccgtgcagtgccagggcagccagcagccccccgcctggcccgaggcctgcgtgctggagccctgccccccctactgggccgtgggcgacttcggcccctgcagcgccagctgcggcggcggcctgcgcgagcgccccgtgcgctgcgtggaggcccagggcagcctgctgaagaccctgccccccgcccgctgccgcgccggcgcccagcagcccgccgtggccctggagacctgcaacccccagccctgccccgcccgctgggaggtgagcgagcccagcagctgcaccagcgccggcggcgccggcctggccctggagaacgagacctgcgtgcccggcgccgacggcctggaggcccccgtgaccgagggccccggcagcgtggacgagaagctgcccgcccccgagccctgcgtgggcatgagctgcccccccggctggggccacctggacgccaccagcgccggcgagaaggcccccagcccctggggcagcatccgcaccggcgcccaggccgcccacgtgtggacccccgccgccggcagctgcagcgtgagctgcggccgcggcctgatggagctgcgcttcctgtgcatggacagcgccctgcgcgtgcccgtgcaggaggagctgtgcggcctggccagcaagcccggcagccgccgcgaggtgtgccaggccgtgccctgccccgcccgctggcagtacaagctggccgcctgcagcgtgagctgcggccgcggcgtggtgcgccgcatcctgtactgcgcccgcgcccacggcgaggacgacggcgaggagatcctgctggacacccagtgccagggcctgccccgccccgagccccaggaggcctgcagcctggagccctgccccccccgctggaaggtgatgagcctgggcccctgcagcgccagctgcggcctgggcaccgcccgccgcagcgtggcctgcgtgcagctggaccagggccaggacgtggaggtggacgaggccgcctgcgccgccctggtgcgccccgaggccagcgtgccctgcctgatcgccgactgcacctaccgctggcacgtgggcacctggatggagtgcagcgtgagctgcggcgacggcatccagcgccgccgcgacacctgcctgggcccccaggcccaggcccccgtgcccgccgacttctgccagcacctgcccaagcccgtgaccgtgcgcggctgctgggccggcccctgcgtgggccagggcgcctgcggccgccagcacctggagcccaccggcaccatcgacatgcgcggccccggccaggccgactgcgccgtggccatcggccgccccctgggcgaggtggtgaccctgcgcgtgctggagagcagcctgaactgcagcgccggcgacatgctgctgctgtggggccgcctgacctggcgcaagatgtgccgcaagctgctggacatgaccttcagcagcaagaccaacaccctggtggtgcgccagcgctgcggccgccccggcggcggcgtgctgctgcgctacggcagccagctggcccccgagaccttctaccgcgagtgcgacatgcagctgttcggcccctggggcgagatcgtgagccccagcctgagccccgccaccagcaacgccggcggctgccgcctgttcatcaacgtggccccccacgcccgcatcgccatccacgccctggccaccaacatgggcgccggcaccgagggcgccaacgccagctacatcctgatccgcgacacccacagcctgcgcaccaccgccttccacggccagcaggtgctgtactgggagagcgagagcagccaggccgagatggagttcagcgagggcttcctgaaggcccaggccagcctgcgcggccagtactggaccctgcagagctgggtgcccgagatgcaggacccccagagctggaagggcaaggagggcacc

SEQ ID NO: 237988 - DNA, 4442 bp, Artificial Sequence
  derived and/or modified sequence
acactgcctaatcgtcccgcccagtagtgagcaggcctgtcccattccatactgaccagattcccagtcaccaaggccccctctcactccgctccactcctcgggctggctctcctgaggatgcaccagcgtcacccccgggcaagatgccctcccctctgtgtggccggaatccttgcctgtggctttctcctgggctgctggggaccctcccatttccagcagagttgtcttcaggctttggagccacaggccgtgtcttcttacttgagccctggtgctcccttaaaaggccgccctccttcccctggcttccagaggcagaggcagaggcagaggcgggctgcaggcggcatcctacacctggagctgctggtggccgtgggccccgatgtcttccaggctcaccaggaggacacagagcgctatgtgctcaccaacctcaacatcggggcagaactgcttcgggacccgtccctgggggctcagtttcgggtgcacctggtgaagatggtcattctgacagagcctgagggtgccccaaatatcacagccaacctcacctcgtccctgctgagcgtctgtgggtggagccagaccatcaaccctgaggacgacacggatcctggccatgctgacctggtcctctatatcactaggtttgacctggagttgcctgatggtaaccggcaggtgcggggcgtcacccagctgggcggtgcctgctccccaacctggagctgcctcattaccgaggacactggcttcgacctgggagtcaccattgcccatgagattgggcacagcttcggcctggagcacgacggcgcgcccggcagcggctgcggccccagcggacacgtgatggcttcggacggcgccgcgccccgcgccggcctcgcctggtccccctgcagccgccggcagctgctgagcctgctcagcgcaggacgggcgcgctgcgtgtgggacccgccgcggcctcaacccgggtccgcggggcacccgccggatgcgcagcctggcctctactacagcgccaacgagcagtgccgcgtggccttcggccccaaggctgtcgcctgcaccttcgccagggagcacctggatatgtgccaggccctctcctgccacacagacccgctggaccaaagcagctgcagccgcctcctcgttcctctcctggatgggacagaatgtggcgtggagaagtggtgctccaagggtcgctgccgctccctggtggagctgacccccatagcagcagtgcatgggcgctggtctagctggggtccccgaagtccttgctcccgctcctgcggaggaggtgtggtcaccaggaggcggcagtgcaacaaccccagacctgcctttggggggcgtgcatgtgttggtgctgacctccaggccgagatgtgcaacactcaggcctgcgagaagacccagctggagttcatgtcgcaacagtgcgccaggaccgacggccagccgctgcgctcctcccctggcggcgcctccttctaccactggggtgctgctgtaccacacagccaaggggatgctctgtgcagacacatgtgccgggccattggcgagagcttcatcatgaagcgtggagacagcttcctcgatgggacccggtgtatgccaagtggcccccgggaggacgggaccctgagcctgtgtgtgtcgggcagctgcaggacatttggctgtgatggtaggatggactcccagcaggtatgggacaggtgccaggtgtgtggtggggacaacagcacgtgcagcccacggaagggctctttcacagctggcagagcgagagaatatgtcacatttctgacagttacccccaacctgaccagtgtctacattgccaaccacaggcctctcttcacacacttggcggtgaggatcggagggcgctatgtcgtggctgggaagatgagcatctcccctaacaccacctacccctccctcctggaggatggtcgtgtcgagtacagagtggccctcaccgaggaccggctgccccgcctggaggagatccgcatctggggacccctccaggaagatgctgacatccaggtttacaggcggtatggcgaggagtatggcaacctcacccgcccagacatcaccttcacctacttccagcctaagccacggcaggcctgggtgtgggccgctgtgcgtgggccctgctcggtgagctgtggggcagggctgcgctgggtaaactacagctgcctggaccaggccaggaaggagttggtggagactgtccagtgccaagggagccagcagccaccagcgtggccagaggcctgcgtgctcgaaccctgccctccctactgggcggtgggagacttcggcccatgcagcgcctcctgtgggggcggcctgcgggagcggccagtgcgctgcgtggaggcccagggcagcctcctgaagacattgcccccagcccggtgcagagcaggggcccagcagccagctgtggcgctggaaacctgcaacccccagccctgccctgccaggtgggaggtgtcagagcccagctcatgcacatcagctggtggagcaggcctggccttggagaacgagacctgtgtgccaggggcagatggcctggaggctccagtgactgaggggcctggctccgtagatgagaagctgcctgcccctgagccctgtgtcgggatgtcatgtcctccaggctggggccatctggatgccacctctgcaggggagaaggctccctccccatggggcagcatcaggacgggggctcaagctgcacacgtgtggacccctgcggcagggtcgtgctccgtctcctgcgggcgaggtctgatggagctgcgtttcctgtgcatggactctgccctcagggtgcctgtccaggaagagctgtgtggcctggcaagcaagcctgggagccggcgggaggtctgccaggctgtcccgtgccctgctcggtggcagtacaagctggcggcctgcagcgtgagctgtgggagaggggtcgtgcggaggatcctgtattgtgcccgggcccatggggaggacgatggtgaggagatcctgttggacacccagtgccaggggctgcctcgcccggaaccccaggaggcctgcagcctggagccctgcccacctaggtggaaagtcatgtcccttggcccatgttcggccagctgtggccttggcactgctagacgctcggtggcctgtgtgcagctcgaccaaggccaggacgtggaggtggacgaggcggcctgtgcggcgctggtgcggcccgaggccagtgtcccctgtctcattgccgactgcacctaccgctggcatgttggcacctggatggagtgctctgtttcctgtggggatggcatccagcgccggcgtgacacctgcctcggaccccaggcccaggcgcctgtgccagctgatttctgccagcacttgcccaagccggtgactgtgcgtggctgctgggctgggccctgtgtgggacagggtgcctgtggcaggcagcaccttgagccaacaggaaccattgacatgcgaggcccagggcaggcagactgtgcagtggccattgggcggcccctcggggaggtggtgaccctccgcgtccttgagagttctctcaactgcagtgcgggggacatgttgctgctttggggccggctcacctggaggaagatgtgcaggaagctgttggacatgactttcagctccaagaccaacacgctggtggtgaggcagcgctgcgggcggccaggaggtggggtgctgctgcggtatgggagccagcttgctcctgaaaccttctacagagaatgtgacatgcagctctttgggccctggggtgaaatcgtgagcccctcgctgagtccagccacgagtaatgcagggggctgccggctcttcattaatgtggctccgcacgcacggattgccatccatgccctggccaccaacatgggcgctgggaccgagggagccaatgccagctacatcttgatccgggacacccacagcttgaggaccacagcgttccatgggcagcaggtgctctactgggagtcagagagcagccaggctgagatggagttcagcgagggcttcctgaaggctcaggccagcctgcggggccagtactggaccctccaatcatgggtaccggagatgcaggaccctcagtcctggaagggaaaggaaggaacctgagggtcattgaacatttgttccgtgtctggccagccctggagggttgacccctggtctcagtgctttccaattcgaactttttccaatcttaggtatctactttagagtcttctccaatgtccaaaaggctagggggttggaggtggggactctggaaaagcagcccccatttcctcgggtaccaataaataaaacatgcaggctga

SEQ ID NO: 237989 - DNA, 4116 bp, Artificial Sequence
  derived and/or modified sequence
atgcaccagagacaccccagagccagatgcccccccctgtgcgtggccggcatcctggcctgcggcttcctgctgggctgctggggccccagccacttccagcagagctgcctgcaggccctggagccccaggccgtgagcagctacctgagccccggcgcccccctgaagggcagaccccccagccccggcttccagagacagagacagagacagagaagagccgccggcggcatcctgcacctggagctgctggtggccgtgggccccgacgtgttccaggcccaccaggaggacaccgagagatacgtgctgaccaacctgaacatcggcgccgagctgctgagagaccccagcctgggcgcccagttcagagtgcacctggtgaagatggtgatcctgaccgagcccgagggcgcccccaacatcaccgccaacctgaccagcagcctgctgagcgtgtgcggctggagccagaccatcaaccccgaggacgacaccgaccccggccacgccgacctggtgctgtacatcaccagattcgacctggagctgcccgacggcaacagacaggtgagaggcgtgacccagctgggcggcgcctgcagccccacctggagctgcctgatcaccgaggacaccggcttcgacctgggcgtgaccatcgcccacgagatcggccacagcttcggcctggagcacgacggcgcccccggcagcggctgcggccccagcggccacgtgatggccagcgacggcgccgcccccagagccggcctggcctggagcccctgcagcagaagacagctgctgagcctgctgagcgccggcagagccagatgcgtgtgggacccccccagaccccagcccggcagcgccggccacccccccgacgcccagcccggcctgtactacagcgccaacgagcagtgcagagtggccttcggccccaaggccgtggcctgcaccttcgccagagagcacctggacatgtgccaggccctgagctgccacaccgaccccctggaccagagcagctgcagcagactgctggtgcccctgctggacggcaccgagtgcggcgtggagaagtggtgcagcaagggcagatgcagaagcctggtggagctgacccccatcgccgccgtgcacggcagatggagcagctggggccccagaagcccctgcagcagaagctgcggcggcggcgtggtgaccagaagaagacagtgcaacaaccccagacccgccttcggcggcagagcctgcgtgggcgccgacctgcaggccgagatgtgcaacacccaggcctgcgagaagacccagctggagttcatgagccagcagtgcgccagaaccgacggccagcccctgagaagcagccccggcggcgccagcttctaccactggggcgccgccgtgccccacagccagggcgacgccctgtgcagacacatgtgcagagccatcggcgagagcttcatcatgaagagaggcgacagcttcctggacggcaccagatgcatgcccagcggccccagagaggacggcaccctgagcctgtgcgtgagcggcagctgcagaaccttcggctgcgacggcagaatggacagccagcaggtgtgggacagatgccaggtgtgcggcggcgacaacagcacctgcagccccagaaagggcagcttcaccgccggcagagccagagagtacgtgaccttcctgaccgtgacccccaacctgaccagcgtgtacatcgccaaccacagacccctgttcacccacctggccgtgagaatcggcggcagatacgtggtggccggcaagatgagcatcagccccaacaccacctaccccagcctgctggaggacggcagagtggagtacagagtggccctgaccgaggacagactgcccagactggaggagatcagaatctggggccccctgcaggaggacgccgacatccaggtgtacagaagatacggcgaggagtacggcaacctgaccagacccgacatcaccttcacctacttccagcccaagcccagacaggcctgggtgtgggccgccgtgagaggcccctgcagcgtgagctgcggcgccggcctgagatgggtgaactacagctgcctggaccaggccagaaaggagctggtggagaccgtgcagtgccagggcagccagcagccccccgcctggcccgaggcctgcgtgctggagccctgccccccctactgggccgtgggcgacttcggcccctgcagcgccagctgcggcggcggcctgagagagagacccgtgagatgcgtggaggcccagggcagcctgctgaagaccctgccccccgccagatgcagagccggcgcccagcagcccgccgtggccctggagacctgcaacccccagccctgccccgccagatgggaggtgagcgagcccagcagctgcaccagcgccggcggcgccggcctggccctggagaacgagacctgcgtgcccggcgccgacggcctggaggcccccgtgaccgagggccccggcagcgtggacgagaagctgcccgcccccgagccctgcgtgggcatgagctgcccccccggctggggccacctggacgccaccagcgccggcgagaaggcccccagcccctggggcagcatcagaaccggcgcccaggccgcccacgtgtggacccccgccgccggcagctgcagcgtgagctgcggcagaggcctgatggagctgagattcctgtgcatggacagcgccctgagagtgcccgtgcaggaggagctgtgcggcctggccagcaagcccggcagcagaagagaggtgtgccaggccgtgccctgccccgccagatggcagtacaagctggccgcctgcagcgtgagctgcggcagaggcgtggtgagaagaatcctgtactgcgccagagcccacggcgaggacgacggcgaggagatcctgctggacacccagtgccagggcctgcccagacccgagccccaggaggcctgcagcctggagccctgcccccccagatggaaggtgatgagcctgggcccctgcagcgccagctgcggcctgggcaccgccagaagaagcgtggcctgcgtgcagctggaccagggccaggacgtggaggtggacgaggccgcctgcgccgccctggtgagacccgaggccagcgtgccctgcctgatcgccgactgcacctacagatggcacgtgggcacctggatggagtgcagcgtgagctgcggcgacggcatccagagaagaagagacacctgcctgggcccccaggcccaggcccccgtgcccgccgacttctgccagcacctgcccaagcccgtgaccgtgagaggctgctgggccggcccctgcgtgggccagggcgcctgcggcagacagcacctggagcccaccggcaccatcgacatgagaggccccggccaggccgactgcgccgtggccatcggcagacccctgggcgaggtggtgaccctgagagtgctggagagcagcctgaactgcagcgccggcgacatgctgctgctgtggggcagactgacctggagaaagatgtgcagaaagctgctggacatgaccttcagcagcaagaccaacaccctggtggtgagacagagatgcggcagacccggcggcggcgtgctgctgagatacggcagccagctggcccccgagaccttctacagagagtgcgacatgcagctgttcggcccctggggcgagatcgtgagccccagcctgagccccgccaccagcaacgccggcggctgcagactgttcatcaacgtggccccccacgccagaatcgccatccacgccctggccaccaacatgggcgccggcaccgagggcgccaacgccagctacatcctgatcagagacacccacagcctgagaaccaccgccttccacggccagcaggtgctgtactgggagagcgagagcagccaggccgagatggagttcagcgagggcttcctgaaggcccaggccagcctgagaggccagtactggaccctgcagagctgggtgcccgagatgcaggacccccagagctggaagggcaaggagggcacctag

SEQ ID NO: 237990 - DNA, 4116 bp, Artificial Sequence
  derived and/or modified sequence
atgcaccagcgtcatcctcgcgccaggtgtcccccactgtgcgtggccggtatcctggcgtgcgggtttctacttggctgttggggaccatcccatttccaacagagctgtttgcaagcgctagagccccaggccgtgtcctcctatttgtcacctggcgccccattgaagggcaggcctccatcccccggctttcagcgccagcgacagagacaacgcagagccgccggcggcatcttgcacctagagcttctcgtcgccgtgggacctgacgttttccaggctcaccaggaggacacggagcgctatgtgctgaccaatttgaatattggtgccgagttgctgagagatccatcccttggagcccagttccgggtccatctagttaaaatggttatcctaactgaaccggagggcgccccaaatataactgcgaacttgactagttcccttctgagcgtttgcggatggagtcagaccatcaatcccgaggacgatacagatcccggccatgccgatctcgtgttgtatattactcggtttgacctggaactcccagacggcaaccggcaggtccgcggagttacccagttagggggggcttgctcccctacctggagctgtcttattaccgaggacacaggcttcgatctcggcgttacaattgcacacgagatcggtcacagcttcggcctggaacatgatggagcaccaggaagcggctgcggcccctctggacacgttatggcctcggatggggccgctccccgcgccggtctggcctggagcccatgctcgcggaggcagttgttgtcactcctgtctgctgggagggcccgatgtgtgtgggatcctcccagaccccagcctggaagtgccggccaccctccagacgcccagccaggtctgtattattcagcaaacgaacagtgcagagtggcattcggacctaaggctgttgcctgcactttcgcgagggagcatttggatatgtgccaggccctgtcatgccacaccgaccccctcgaccaatcatcgtgttctagactactggtgcccttgctggacgggactgaatgtggcgtggaaaagtggtgctccaaaggcagatgcaggagcctggtggagttaacccctatcgccgccgtacacggtcgctggagttcttggggcccccgcagcccatgttcgaggtcctgcggcggaggagtggtgacccggcgacgccagtgcaacaatccgcgtccggccttcgggggtcgagcatgcgtcggtgcagacctacaggccgagatgtgcaacacacaagcctgcgaaaaaacccagctggaatttatgtcacagcagtgtgcccggaccgatggccagccgctaagatcctcacccggtggcgccagcttctaccactggggagctgcagttccccatagccagggcgacgccctctgcagacatatgtgcagagccattggagagtcttttataatgaaaaggggcgattccttcctggatgggacccgctgcatgccttctgggccacgcgaggatggcactctgtcattatgtgtgtcagggagttgcaggacttttggctgtgacggtagaatggatagccagcaggtctgggatagatgccaggtttgcggaggtgacaattcaacctgcagtccacggaaagggtcttttacagccggccgcgctagggagtacgtcaccttcctcaccgtcactccgaacttgaccagcgtctatattgccaatcataggccactctttacccacctggctgtgaggatcgggggcaggtatgtggtggcgggtaaaatgtccatttcacccaacacgacataccctagtctgctcgaagacggaagagtggaataccgggttgcactgactgaagaccggttaccgagacttgaagagattagaatctggggcccactccaggaagatgctgacatccaggtgtatcgtaggtacggggaggagtacggaaatttgacaaggccagacataacttttacatattttcaaccaaagccaaggcaggcgtgggtgtgggctgcagtgagaggaccctgctctgtctcctgtggcgcaggcttacgctgggtgaactacagttgtctggaccaggcacgaaaggagctcgtggagacagtgcaatgccagggcagccagcagcccccggcttggcctgaggcctgcgtccttgagccctgtcctccctattgggcagtgggcgacttcggaccatgtagtgcaagctgtgggggcggcttgagggagagaccagtgcggtgtgtggaagcgcaaggctccctgctgaaaacactgccacctgcacgatgtcgggctggcgctcaacagcctgcagtggctctggagacctgtaaccctcagccatgccccgctaggtgggaggtgtctgagcctagctcgtgcacctcagccggaggcgccggactcgcactggaaaacgaaacctgtgtgccgggagccgacggcctcgaggctccagtgactgaaggccccggtagcgtcgatgaaaagctgcctgccccagagccctgcgtcggcatgtcttgccctccagggtggggccacctcgacgcaacctcggccggcgagaaagcaccttcaccttggggtagtatcaggacaggagcacaagccgcgcacgtgtggacacccgccgccgggagttgctcagtgtcctgcggaagggggttgatggaactccgtttcctgtgtatggactctgccttgagagtgccggtacaagaagagctgtgtgggctagccagtaagcccggaagcaggagggaggtgtgccaggctgtgccttgcccagcaagatggcaatacaagctggccgcatgctccgtttcgtgcggaagaggggtagtgcggaggatactttattgcgctcgggcccacggggaagatgatggcgaagagatactcttagacactcaatgccaagggttgcccagaccagaacctcaggaggcttgctctctcgagccctgcccaccccggtggaaggttatgtcccttggaccatgtagcgcctcgtgtgggctcggaaccgctagaagatcagtggcttgtgttcagctcgatcagggccaagatgtggaggttgacgaggctgcttgtgcggcactggttagaccagaagcttccgttccctgcctgattgccgattgtacatacaggtggcatgtgggcacgtggatggagtgctcggtgagctgcggcgacggtatacaacggaggagggacacctgtctgggtccgcaggcgcaggctcccgtgcccgctgatttttgtcagcacttacccaaaccagtcactgtgaggggctgctgggctggaccgtgtgtaggacagggggcctgcgggagacaacacctggagcccacaggtactatcgacatgagaggccctggccaagctgactgcgccgtggcaatcggcaggcctttgggcgaagtagtaacattacgcgttctggagagttctttgaattgttcggccggtgatatgctactgctctggggcagacttacttggcgtaaaatgtgtagaaagctgttggatatgacattcagctcaaaaaccaacacgctggtcgttcggcaacgatgcggaagacccggcggaggggttcttcttcgttatggcagccaactggcccctgaaaccttttatagagagtgcgacatgcaactgtttgggccgtggggggagatagtgtcaccctctctgtctccagctacctcaaatgccggcggctgtagactgttcattaacgtggccccgcatgctagaatagccattcacgcccttgcaacaaatatgggggctggcaccgagggagccaatgcaagctacatcctaatacgtgatacacactctttgcggacaacagcctttcacgggcagcaggtactttactgggaaagcgaaagcagtcaggccgagatggaattttctgaggggttcctcaaagcccaggcttccctgcggggccagtattggacacttcagagctgggtgcccgaaatgcaggaccctcaatcttggaaaggcaaggaaggaacatag

SEQ ID NO: 237991 - DNA, 4116 bp, Artificial Sequence
  derived and/or modified sequence
atgcaccagaggcacccccgggcccgctgcccccccctgtgtgtggccggcatcctggcctgtggcttcctgctgggctgctggggccccagccacttccagcagagctgcctgcaggccctggagccccaggccgtgagcagctacctgagccctggggcccccctgaagggccggccccccagccctggcttccagaggcagaggcagaggcagaggagagctgctgggggcatcctgcacctggagctgctggtggccgtgggcccagatgtgttccaggcccaccaggaggacacagaaagatatgtgctgaccaacctgaacatcggggctgagctgctgcgggaccccagcctgggcgcccagttccgggtgcacctggtgaagatggtgatcctgacagagcctgagggcgcccccaacatcacagccaacctgaccagcagcctgctgtctgtgtgtggctggagccagaccatcaacccagaagatgacacagatcctggccacgccgacctggtgctgtacatcaccaggtttgacctggagctgcctgatggcaaccggcaggtgcggggcgtgacccagctgggcggggcctgcagccccacctggagctgcctgatcacagaggacaccggctttgacctgggcgtgaccatcgcccacgagatcggccacagctttggcctggagcatgatggagcccctggcagcggctgcggccccagcggccacgtgatggccagtgatggagctgccccccgggccggcctggcctggagcccctgcagccggcggcagctgctgagcctgctgtctgctggccgggcccgctgtgtgtgggaccccccccggccccagcccggcagcgctggccaccccccagatgcccagcccggcctgtactacagcgccaatgagcagtgccgggtggccttcggccccaaggctgtggcctgcacctttgcccgggagcacctggacatgtgccaggccctgagctgccacacagaccccctggaccagagcagctgcagccggctgctggtgcccctgctggatggaacagaatgtggggtggagaagtggtgcagcaagggccgctgccgcagcctggtggagctgacccccatcgctgctgtgcacggccgctggagctcctggggccccaggagcccctgcagccgcagctgtggcggcggcgtggtgacccggcggcggcagtgcaacaaccccaggcctgccttcggcggccgggcctgtgtgggcgctgacctgcaggccgagatgtgcaacacccaggcctgtgagaagacccagctggagttcatgagccagcagtgtgccaggacagatggccagcccctgcggagcagccctgggggcgccagcttctaccactggggcgctgctgtgccccacagccagggagatgccctgtgccgccacatgtgccgggccatcggggagagcttcatcatgaagagaggagacagcttcctggatggcacccgctgcatgcccagcggccccagagaagatggcaccctgagcctgtgtgtgtctggcagctgcaggaccttcggctgtgatggccgcatggacagccagcaggtgtgggaccgctgccaggtgtgtggcggggacaacagcacctgcagccccaggaagggcagcttcaccgctggccgggcccgggagtatgtgaccttcctgactgtgacccccaacctgacctctgtgtacatcgccaaccaccggcccctcttcacccacctggccgtgagaattggaggccgctacgtggtggccggcaagatgagcatcagccccaacaccacctaccccagcctgctggaggatggccgggtggagtacagagtggccctgacagaggaccggctgccccggctggaggagatccgcatctggggccccctgcaggaggatgctgacatccaggtgtacagaagatatggagaggagtatggcaacctgaccaggccagacatcaccttcacctacttccagcccaagccccggcaggcctgggtgtgggccgctgtgcggggcccctgcagcgtgtcctgtggggccggcctgcgctgggtgaactacagctgcctggaccaggccaggaaggagctggtggagaccgtgcagtgccagggcagccagcagcccccagcctggccagaggcctgtgtgctggagccctgccccccctactgggccgtgggggactttggcccctgcagcgccagctgtggcggcggcctgcgggagaggcctgtgcgctgtgtggaggcccagggcagcctgctgaagaccctgcccccagcccgctgcagagctggggcccagcagcctgctgtggccctggagacctgcaacccccagccctgcccagcccgctgggaggtgtctgagcccagcagctgcaccagcgctggaggagctggcctggccctggagaatgagacctgtgtgcctggagcagatggcctggaggcccctgtgacagagggccctggctctgtggatgagaagctgcctgcccctgagccctgtgtgggcatgagctgccccccaggctggggccacctggatgccaccagcgctggggagaaggcccccagcccctggggcagcatcagaactggagcccaggccgcccacgtgtggaccccagctgctggcagctgcagcgtgtcctgtggccggggcctgatggagctgcgcttcctgtgcatggacagcgccctgcgggtgcctgtgcaggaggagctgtgtggcctggccagcaagccaggcagccggcgggaggtgtgccaggccgtgccctgcccagcccgctggcagtacaagctggccgcctgcagcgtgtcctgtggccggggcgtggtgcggcgcatcctgtactgtgcccgggcccatggagaagatgatggagaggagatcctgctggacacccagtgccagggcctgcccaggcctgagccccaggaggcctgcagcctggagccctgccccccacgctggaaggtgatgagcctgggcccctgcagcgccagctgtggcctgggcacagcccggcgctctgtggcctgtgtgcagctggaccagggccaggatgtggaggtggatgaagctgcctgtgccgccctggtgcggcctgaggcctctgtgccctgcctgattgctgactgcacctaccgctggcacgtgggcacctggatggagtgcagcgtgtcctgtggagatggcatccagaggagaagagacacctgcctgggcccccaggcccaggcccctgtgcctgctgacttctgccagcacctgcccaagcctgtgacagtgcggggctgctgggccggcccctgtgtgggccagggcgcctgtggccggcagcacctggagcccaccggcaccatcgacatgaggggccctggccaggccgactgtgctgtggccatcggccggcccctgggggaggtggtgaccctgcgggtgctggagagcagcctgaactgcagcgctggggacatgctgctgctgtggggccgcctgacctggaggaagatgtgcaggaagctgctggacatgaccttcagcagcaagaccaacaccctggtggtgcggcagagatgtggccggcctgggggcggcgtgctgctgcgctatggcagccagctggcccctgagaccttctaccgggagtgtgacatgcagctgtttggcccctggggcgagatcgtgagccccagcctgagccctgccaccagcaatgctgggggctgccgcctcttcatcaacgtggccccccacgccagaattgccatccacgccctggccaccaacatgggcgccggcacagagggcgccaatgccagctacatcctgatccgggacacccacagcctgcggaccacagccttccacggccagcaggtgctgtactgggagagcgagagcagccaggccgagatggagttcagcgagggcttcctgaaggcccaggccagcctgcggggccagtactggaccctgcagagctgggtgcctgagatgcaggacccccagagctggaagggcaaggagggcacctag

SEQ ID NO: 237992 - DNA, 4116 bp, Artificial Sequence
  derived and/or modified sequence
atgcaccagcggcacccccgggcccggtgcccccccctgtgcgtggctgggattctggcctgcgggttcctgttgggctgctggggtccgtcacatttccagcaaagctgcctccaggcactggagccacaggctgtctccagctatctgtcacctggagccccactaaaggggcggccccctagtcctggctttcaacgccagagacagcgtcaacgccgggccgctgggggcattctccacctggagctcctcgtcgccgtcggtcctgatgtatttcaagcacaccaggaagatacagagagatatgtgctgacgaacctgaatatcggagcggagctcctgcgagaccctagcctcggcgctcagttccgcgtccaccttgtaaagatggttatcctgacggaacctgaaggtgctccaaatattaccgccaatctgacctcctcactcctcagtgtatgcggttggagccagaccatcaaccccgaggatgatacagatccaggccatgctgacctggttttgtatattaccagatttgatttggaattgccagacggaaaccgccaggtacggggtgtgacccaactgggcggcgcatgttccccaacttggagctgcctgattactgaagacactgggttcgacctgggcgttacaatcgcccacgagataggtcatagctttggtctggaacacgatggagccccaggatctggctgtggaccttctggacacgtgatggcctccgatggggcagcccctagagcaggcctcgcctggtcaccatgttcccgccgtcaactactctctctgctttccgctggtcgggcacggtgcgtctgggatcctccgagaccacaacccgggagcgccgggcaccctcctgatgcccagcccggcctatattacagcgccaatgaacaatgccgggtggccttcggcccaaaggcagtggcctgcacattcgccagagaacacttggacatgtgccaagcccttagctgccacactgacccactggatcaatcatcatgttcccgcctcctagtgcctctgctcgacggcacagaatgcggggttgagaagtggtgcagtaaagggcgttgcaggagcttggttgaactgactcctatcgcggccgtgcacggccggtggagctcctggggcccacgcagcccttgttcccgtagttgtggcgggggcgtagtaacacgtcgccggcagtgcaacaatcctagacccgccttcggcggtcgtgcatgcgtgggggccgacctgcaggcagaaatgtgtaacacacaggcatgcgaaaagacacagctggagtttatgtctcagcagtgcgctcgaaccgatggacaaccattaagatcctcgcccgggggcgctagcttttatcattggggagctgcagtacctcactcccagggagacgccctgtgccgccatatgtgtagagcaatcggagagtctttcatcatgaagcgaggcgacagctttctcgatggaacaaggtgcatgccttccggccctcgagaggacggaactctttctctttgcgtgtcaggctcatgccgtaccttcgggtgcgacggccggatggattcacaacaggtctgggacagatgccaggtatgtggcggcgataatagcacttgcagcccacgcaagggatccttcacggctggtagagcacgcgaatatgtgacctttctgaccgtaacgccgaacctgactagcgtctacatcgctaaccaccggcccctgttcactcacttggcagttcggattggcgggcgctacgttgttgccgggaaaatgagtatttccccaaatacaacgtacccctctctgttagaggacgggagggtcgagtaccgcgtggccttaacagaggatcggctgccccgactggaagagattcggatttggggaccgctccaggaggatgccgatatccaggtctaccgcaggtatggcgaggagtacggcaatctgacaaggcccgacattactttcacttacttccaacctaaaccgcgacaggcctgggtgtgggctgcggtgaggggaccctgctccgtgagctgcggggccggcctcagatgggttaattatagctgccttgatcaagctcggaaggagctggtagagacagtacagtgccagggcagccagcagcctcccgcatggcccgaggcttgtgtcctggaaccttgtcccccatactgggcagtaggtgatttcggtccatgttctgcttcctgcgggggaggactgcgagagcgcccagtcagatgcgtcgaagctcaggggtccctgttaaaaacattgccccctgcccgttgtcgcgcaggcgcccagcaacccgctgttgccttagaaacctgtaatcctcaaccgtgtcccgcgcgctgggaagtctccgagccctctagctgcacaagtgcagggggggccggcctcgcccttgaaaatgaaacctgcgttccaggggcagacgggctcgaagccccagtgacagagggtcccgggtccgtggacgagaagttgcccgcccccgagccctgcgtgggcatgagttgcccaccgggatggggacatcttgacgccacctcagcgggcgagaaagcaccgtccccgtggggtagcattaggactggtgctcaggccgcacacgtttggacacccgccgccggctcttgttcagtctcctgcggcagaggtttgatggagctgagattcctttgtatggattcagctctgcgagttccggtgcaagaagaattatgtggcttagctagcaaaccgggtagccgacgagaggtttgccaggcggtcccgtgccctgcacgttggcagtacaagctcgccgcatgttccgtgtcctgtgggcgtggcgtcgttcggaggatcttgtactgcgctcgggcccacggagaggacgacggagaggaaatacttctggacacccagtgtcagggcctgcctaggcccgagccccaggaagcatgcagcctggagccttgtccacctcgctggaaggtgatgtctctgggtccctgcagcgcctcatgtgggctgggaactgcacggcggtctgtcgcctgtgttcaattagaccagggccaggatgtcgaagtagatgaagcggcctgcgccgcactagtgagacccgaggcctctgtcccctgcttgatcgccgattgtacgtatcggtggcacgtggggacatggatggaatgttccgtgtcatgcggagacggcatccagaggcgaagagacacctgtctcggccctcaggctcaggctcctgtgccagctgacttctgccagcacctcccgaagccagtgacagtgcggggatgctgggcgggtccatgtgtggggcagggagcctgcggtcggcagcatttggaaccaacaggtacgattgacatgaggggtccagggcaagccgattgcgcagtcgccattggacgacctctgggcgaagtggtgacccttagagttcttgaaagcagtctgaactgttcagctggtgacatgcttttattatggggccggctcacatggaggaagatgtgtagaaaactcctggatatgacattctcaagcaaaacgaatactctcgtcgtgagacagcgctgcgggagaccggggggaggggtactgttacgttatgggtcccaattggcccctgagacattttaccgcgaatgcgacatgcagttgttcggaccctggggggagatagtaagccctagtctgagccctgcgaccagtaatgcaggaggctgtcgactcttcattaacgttgctcctcatgctcggatagcaatacacgccctcgcaaccaatatgggggcaggcacagagggcgccaacgcgagctatatccttatcagggacactcactctttgcgaacaaccgctttccacggccagcaggtgctatattgggagagcgagtcttcccaagcagagatggaattttcggaagggtttctcaaagcgcaggcaagcctcagaggccagtactggactttacagtcttgggtcccagagatgcaggacccccagagctggaaaggaaaggagggaacatag

SEQ ID NO: 237993 - DNA, 4116 bp, Artificial Sequence
  derived and/or modified sequence
atgcatcagaggcacccacgtgctaggtgccccccactgtgcgtggccggaatcctagcctgtgggtttctgctgggctgttgggggccatcacattttcagcagagttgtctgcaggccttggagccacaggccgtgtcttcctacttgagcccaggggcaccattgaagggtcgtcccccaagccctggctttcagcgtcagagacagcgccagaggcgggctgccggagggattctgcatctagaactgttagtcgccgtgggaccagacgttttccaggcacaccaggaggataccgaaaggtacgtgctgacaaatctgaacatcggggcagagcttctgcgcgatcccagtttgggagcccagtttagggtgcacctggtgaaaatggtgattcttaccgaacccgagggcgctccgaacatcaccgcgaacttaacatcctcactgctgtctgtctgcggctggagtcagacaatcaatcccgaagacgacacagatcccggacatgcagacttggtcctgtacatcacacggtttgacctagaactccccgatggcaatagacaagtgcggggagttactcaactgggaggcgcatgtagtcccacatggtcctgcctgatcactgaggatactggttttgatttgggcgtcaccatcgcgcacgaaattggtcacagtttcggcctggagcatgatggtgctcctgggagcggctgcgggccaagtggtcacgttatggcctccgatggagctgcccctagagcgggtcttgcgtggtccccttgttccagacgccagctgctgagcctgcttagcgccggacgggctcgctgcgtttgggacccgcctagaccacagcctggatccgctggccatcccccagacgctcaacccggactctactactctgctaatgaacagtgcagagtcgcctttggacctaaggcggtagcatgtacgttcgccagggaacatctcgacatgtgtcaggccctgagttgtcataccgaccctttggatcaatcaagctgtagtcggctgcttgtgcctttgcttgacggaacagaatgtggtgtggagaaatggtgcagcaagggtagatgccgctccttggtcgaactcactcctatcgcggctgtgcacgggaggtggagttcatggggacccagatccccttgcagccgaagctgcgggggtggagttgtaacaaggagaagacaatgcaacaaccctcgtcccgcattcgggggacgggcatgcgtgggcgctgatctgcaggccgagatgtgcaatactcaggcatgtgagaagacacaactggaattcatgtctcagcagtgcgctagaacagacggccaaccattacgatcatccccaggaggagcctctttctaccactggggtgccgcagtgcctcactcccaaggggacgccctttgtagacacatgtgtcgggcaatcggggagtccttcatcatgaagcggggtgactctttcctcgacggaacacgttgtatgccttctggccctcgagaggacggcacactgtcgctttgcgtgtccggatcctgtaggaccttcggttgtgatgggcgtatggactcccagcaggtctgggatagatgtcaagtgtgcggcggtgacaactctacctgttcccctcgcaaaggctccttcaccgccggacgcgctagggaatacgttaccttcttaacagttacaccaaacctaactagcgtttatattgcaaaccaccggcctctgttcacccacctcgcggtcagaattggcggtcgctacgtggtggccggtaagatgtctatcagtcctaacaccacttatccttctttgctagaagatggaagggtggaatacagagtggcactcactgaggataggctgcctcggctcgaagagattagaatctggggaccgcttcaggaggacgcagacattcaggtttatcgcaggtatggtgaagagtacggcaatctaacccgccctgatatcacattcacttactttcagccaaagccacgccaggcctgggtctgggcggcagtgcggggaccctgtagtgtgtcgtgtggcgcaggactccgatgggttaactactcctgtctggatcaagctcggaaggaactcgtggaaacagtgcagtgtcaaggtagccagcagcccccagcttggccagaggcctgcgtcctcgagccatgccctccttactgggcggttggagattttggcccatgctcagcttcatgcggaggagggctgcgagagagacctgtgaggtgcgtagaggcccaaggcagtttgttgaaaaccctcccccctgctagatgcagggcgggtgcgcagcagcccgctgtggccctggagacgtgtaatccacagccatgccccgctcgatgggaagtctctgagcctagctcctgcacatcagccggaggagctggcctggccctggagaacgagacctgcgtgccaggcgctgacggccttgaagcccctgtcacagagggcccagggagtgtagacgagaaactgcctgcaccagaaccttgtgtgggcatgagttgcccgccaggttggggccacctggacgccacttccgccggtgagaaagcacccagtccttggggaagtatccgcacaggcgctcaggccgctcacgtatggacccccgctgccggaagttgttcggtatcctgcgggagagggctgatggaattgcggtttctctgcatggacagcgctctccgtgtgcctgtacaagaggagctgtgcggcttggcctctaagcctggctctcgcagagaagtatgtcaagcagtgccctgcccggcacgctggcagtacaaattggcggcttgcagtgtatcctgcggtcggggtgtggttcgcagaattctgtattgtgccagagcacacggcgaagacgacggggaagagatcctgttggatactcagtgccagggcttgccccgacctgagccacaagaggcttgttccctggaaccatgcccgcctagatggaaggtaatgtccctcggaccctgctccgcaagttgcggcttgggtactgctcgtagaagcgtagcttgcgtccagttagatcagggacaggatgtggaggtcgatgaggcagcatgcgctgctttggtgaggcctgaggcatctgttccatgtctcattgcagactgtacttatcggtggcacgtgggcacttggatggagtgttccgtgagctgcggagatggcattcagcggcgaagagatacctgccttggtccccaggcacaggccccagttcctgctgacttctgccagcatctccccaagcctgtgaccgtgcgcggatgctgggcaggtccctgcgtggggcagggcgcatgtggccgtcagcacctcgaaccaactgggactatcgatatgcgtgggcctggtcaggcggactgcgcagtcgcaatcggtcgtccactcggcgaagtcgtcacattaagagtgctggaatccagcctgaactgcagcgccggagacatgctcctgctctggggcagactgacatggaggaagatgtgccgcaagctgctggacatgaccttctcttcaaagacaaacaccttggtggtgcgccagaggtgcgggaggccgggtgggggtgtcctcctgcgttacgggtctcagctggctcctgagacattctatcgagaatgcgatatgcaactctttggaccatggggggaaatcgtgagcccgtctctcagtccggctaccagcaatgcaggcggttgtaggctattcattaatgtggctccacacgcacgcattgcgattcatgcgttggccacaaatatgggtgccggaacagagggggctaatgcttcctacatcctgattcgcgatactcatagcctgaggactacagcctttcacggccaacaggtactctattgggaatcggaaagttctcaagcggagatggagttctcagaaggctttctgaaggcccaggcgtcactcagagggcagtactggacacttcagagctgggtgcctgaaatgcaagatccacagagctggaagggcaaggaaggcacttag

SEQ ID NO: 237994 - DNA, 4116 bp, Artificial Sequence
  derived and/or modified sequence
atgcaccagagacaccctagagcccgctgcccccccctgtgcgtcgcaggcattcttgcctgcgggttcttgttgggatgctggggcccaagccattttcagcaaagttgcttgcaggctctggaacctcaggccgtctccagctacctgtcaccaggtgccccacttaagggaagacctccatcgcccggattccaaaggcagagacaaaggcagcgacgtgccgcaggcgggattctgcacctggagctgctagtggccgttggccctgacgtgtttcaggcccatcaggaagacactgagaggtatgtgctcaccaacttgaatatcggtgctgaattattgcgcgacccctccttaggagctcagttccgcgtccacttagtgaagatggtaatcctgaccgaaccagaaggggcaccgaatattacagccaatctgacatcgagtctcctaagcgtgtgcgggtggagccaaacaattaaccctgaggacgacacagaccctggccacgctgacttggtgctctacatcacaaggtttgaccttgaattgcccgatggaaacagacaggtgcgaggtgtaacccagttagggggtgcctgctcacccacttggagttgccttatcactgaggacactggcttcgacctgggtgtgacaatcgcgcatgaaattgggcactcattcggtctcgagcacgatggcgcgcctggatctggctgtggaccaagtggtcatgtgatggcttcagacggtgcagcaccccgggctgggctggcttggtcgccctgctcacggcgtcagcttctgagcctgctgagcgcaggtagagctaggtgcgtgtgggaccctccccgccctcagcccggctcagcagggcatccccccgacgcacagcctggactctactacagcgctaatgagcagtgcagagtggcgtttggtccaaaggccgtggcctgcaccttcgcccgagagcatttagatatgtgccaggcactgagttgtcacacggaccctctcgaccagtcctcctgcagccgtctcctggtaccacttctggatggcacagaatgtggggtggagaaatggtgttcgaaaggtagatgcagaagtctcgtagagcttacccccatcgctgctgtacatggtagatggtcttcatggggaccgaggagtccgtgcagccggtcttgtggcggcggagtggtcaccaggcggcgacagtgtaacaaccctcgaccagccttcggcggacgtgcctgtgtgggtgccgatttgcaggccgaaatgtgcaacacccaggcctgcgaaaagacacaactggagtttatgtcgcaacagtgtgctagaacggacggccagccactacgtagctctccgggtggagcttccttttatcactggggagccgcggtcccacatagccaaggcgatgcactttgtcggcacatgtgtagggcaatcggcgaatccttcattatgaaacggggcgactcttttctggacgggactagatgcatgccgtctgggccaagagaagacggcactttgagtctctgcgtctctggctcctgccggacttttggttgtgatgggagaatggactctcagcaggtttgggaccggtgtcaagtatgcggcggagacaacagtacctgttctccaagaaaaggaagttttactgcaggacgggctcgagaatatgttacctttcttactgttacgcccaacttgacctcggtatacatcgctaatcaccggcccctatttactcacctggctgtgcgcatagggggtagatacgtggttgcgggcaagatgtccattagtcccaacacaacatacccctcactgctggaagatggtagagtggaataccgtgtggccctcacagaggaccgactcccgaggctcgaggaaatccgaatctggggcccactgcaagaggatgccgatatccaggtctacaggaggtacggagaggagtatggaaatttgactaggccggatatcacgttcacctacttccagcccaagccacgacaggcctgggtgtgggccgccgtgcggggaccatgtagcgtgtcgtgtggagctggactgcgctgggtcaactactcatgtctcgaccaagccaggaaggagcttgtggagactgtacagtgtcaaggttcccagcagccacctgcatggcctgaggcttgtgtccttgagccatgccctccatactgggctgtaggggacttcggtccttgttcggcaagctgtggaggcggtttacgcgaaagacctgtccgctgcgttgaggcgcaaggttccctcctgaagacactgccacccgccaggtgcagagccggagctcaacagccggcagtagcgttggagacctgcaacccccagccctgtccggcacggtgggaggtctcagaaccatccagctgcacgtcagctggcggagccgggttggcactcgagaacgagacgtgtgtgccgggggccgatggtctggaagcacctgtcaccgagggccctgggagtgtagatgagaaacttcctgcgcccgagccctgcgttggcatgtcgtgcccgccagggtggggtcacctggacgccacctccgccggagaaaaggcccccagcccttggggatcaatcaggaccggcgcacaggcagcccatgtctggactccggcagcaggctcatgttccgtatcatgtgggcgcggtcttatggagctgcgtttcctgtgcatggattctgcgctccgcgtgcctgtgcaggaggagctgtgcgggcttgcctctaagcctggctcacggcgagaagtgtgccaggccgtgccctgtcccgcccgctggcagtataagcttgctgcgtgttccgtttcttgtgggcgcggagttgtccgcagaattctttactgtgccagggcccatggagaggatgatggcgaagaaatcctgttggacacccagtgtcagggtctaccgcgacctgagccccaagaagcctgcagcctggaaccatgtccaccacgttggaaagtaatgagcctcggcccttgtagcgcctcgtgtggcctgggaacagcccgcagatcggttgcatgtgtgcagcttgaccagggacaggacgtcgaggtggacgaagcagcgtgcgcggcgctggtgcgaccagaggctagcgtcccatgcttaattgctgattgcacctacaggtggcatgtgggcacatggatggaatgtagcgtttcctgcggggatggaatacagcgtcgccgcgatacatgtcttggacctcaagctcaagccccagttccagcggacttctgccagcacctgccaaagcctgtaactgtgagaggctgttgggcaggcccatgcgtgggacagggagcgtgtggccgccagcacctcgagccaacaggcactattgatatgcggggtccgggccaggcagactgtgctgtcgccatcgggagacctttgggcgaagtggtcactctgcgcgtgctggagtcgagcctcaattgcagcgcaggcgatatgctgttactctggggacgactcacctggcggaaaatgtgccggaaattgctggacatgactttttcctccaagacaaacacacttgtggtgagacagcgttgtggacggccaggaggaggcgtgctgctgcgttatggatctcagctcgccccagaaacattctacagagaatgcgatatgcagctttttggaccgtggggcgaaattgtatcaccaagcctgagccccgcaacatcaaacgctgggggttgcaggttgttcataaatgtggctccacacgcccgaatagcaatccacgcattggctacaaatatgggagccggaacagagggcgccaacgcgtcatatatactaatcagagacacccactcactcaggactacagcttttcacggacagcaggtattgtactgggaatctgaaagtagtcaagcggagatggaatttagtgaagggttcttgaaggcgcaggccagcttacgaggacagtattggaccctccagtcctgggtgccagagatgcaggacccacaatcatggaagggcaaagaagggacttag

SEQ ID NO: 237995 - DNA, 4116 bp, Artificial Sequence
  derived and/or modified sequence
atgcaccaaagacacccccgagcacgctgtccgcctctctgtgtcgctggcatcctggcttgcggattcttgttagggtgttgggggccttctcacttccagcagtcttgcttacaggcactggaaccccaggcagtttcaagttacctctcacctggtgcccctctaaagggacgccctccatctccaggttttcagaggcaacgccagaggcagcgcagagccgccggaggcattctgcacctagaactgctggtcgcagtcggacctgacgttttccaggctcaccaggaagataccgagcggtacgtactgactaacctcaatatcggcgccgaattactgcgggatccttccctgggagcccagtttagagtccacctcgtgaagatggttatccttactgaacccgaaggagctccgaacattacagctaacttgacgagcagcctactgtcagtgtgtggctggtcgcagacaattaatcccgaagatgacactgatcccggacacgcagatctggtgctgtatattaccagattcgatctggaactacccgatggtaacaggcaggtgaggggcgtcacgcagctgggtggggcttgtagccccacatggtcctgtctcatcacagaagatacagggttcgacctcggagtgacaatcgcacacgaaataggccacagctttgggctggaacacgatggtgcccctggatccggctgcggcccctcaggccatgtaatggcttccgacggagcagcacccagagcaggcttagcctggagcccctgcagccgccgccagctcctcagtttgttatctgccggccgggcaaggtgtgtgtgggatcctccccgccctcagcccgggtcagccggacatccccctgatgcacagcccggtctgtactactcagcgaatgagcaatgcagagtcgcattcggacccaaggccgtagcctgtaccttcgcgagagaacacttggatatgtgccaagccttatcctgccacaccgacccactggaccagtcatcctgctcacgactactggtgccgctccttgacggtacggaatgcggagtggagaagtggtgctcgaaaggacgctgccgatctttggttgaacttacgccgattgctgccgtccacgggcgctggtcatcttggggaccgcgttcaccctgttctagatcatgcgggggcggagtggtcaccagacggcggcaatgtaacaatccaagacctgcctttggcggccgcgcatgcgtcggcgctgatcttcaagcagagatgtgtaatactcaggcctgcgaaaaaacgcagctggaattcatgtcacaacaatgcgcaaggacagacgggcaacccttacgatcgtctcctggcggggcatccttctatcattggggcgccgcagttccacactcccaaggagatgccctgtgcaggcacatgtgtcgggctatcggcgaatcctttatcatgaaaagaggcgattcttttctggacggcactaggtgtatgccctcaggccctagagaggatggaactcttagtctatgtgtgtccggatcatgcaggacattcggctgcgatgggagaatggacagccagcaagtgtgggatcggtgccaggtgtgcggaggcgataattccacatgtagcccacgcaaaggttcatttacagctggtagagcccgagaatacgtgacctttctgaccgtcaccccgaatttaacctcagtatacatagcaaatcacagacccctgtttactcatctggcagtgcggatcgggggccggtacgtggttgctggtaaaatgtccattagtcctaataccacataccccagcttactagaggatggccgtgtggaatatagagtcgctctgaccgaggacagactgccccggctggaagagattcgaatttggggaccactacaggaggacgcagacattcaagtgtatagacgttacggtgaagagtacggtaacctcactaggcctgatatcacattcacatacttccaaccaaagccccgacaagcttgggtttgggcagcagtgcgaggcccttgttctgtgtcttgtggcgctggcttacgctgggtgaattactcttgtctggaccaggctcgcaaggagctcgtggaaacagtgcagtgccaaggttcccagcaacctccagcatggcctgaagcttgtgtcctggaaccatgtccaccatattgggccgtgggcgatttcggtccctgtagcgcatcttgcggcggaggattgcgagaaagaccagtgaggtgcgttgaggcacagggtagcctgctcaagactcttccccccgctagatgcagagccggcgctcagcaacctgcagtggcactggagacatgtaacccacagccatgccccgccaggtgggaggtctcagaacctagcagctgcaccagcgcaggcggagcagggctcgccctagaaaacgagacttgcgtgcccggagctgacggcttggaagcacctgtgacagagggacccgggtcggtcgacgagaaacttccagcccccgaaccatgcgtcgggatgagctgcccaccaggatgggggcatttagatgccacaagtgccggcgagaaagcccctagtccatggggatcaattcggactggcgcccaagctgcacatgtctggacaccggcagcaggctcatgttcggtgtcatgtggcaggggcttaatggaactgcggtttctttgtatggactctgctctccgggtccctgtgcaggaggaactttgtggcctagccagtaaaccaggaagcaggcgggaagtatgtcaggcagtaccttgtcctgcaagatggcagtacaagctcgccgcctgtagcgtttcctgcggaagaggtgtggttcgaaggatcttatattgtgcacgtgcacacggagaagacgatggggaggagatcttgctggatactcagtgccaaggactccctcgtcctgaaccccaggaggcttgctctctggaaccttgcccgccgcgttggaaggtcatgtccctgggtccatgcagcgcatcatgcggattaggcacagctcggagaagtgtggcttgtgtacagctagatcagggccaagacgtagaggtggatgaagccgcctgtgctgccttggtgaggccagaagcatctgtaccatgtttaattgctgactgtacatatcgatggcatgtaggtacttggatggaatgctcggtgtcgtgtggcgatgggattcaacggcggagagacacctgcctgggaccccaagcgcaggctcccgtgccagcagacttttgtcagcacttgcctaagcctgttaccgtgcgaggttgttgggccgggccctgcgtcgggcagggggcctgcgggaggcagcatctggaacctacaggtactatagatatgcgagggccaggacaggctgactgtgcggtggccattggccgcccactgggcgaagttgtgacattgagagtacttgaaagctccctcaattgtagcgcgggcgacatgctcctgttgtggggcaggttaacttggagaaaaatgtgtaggaaattgctggacatgacattctcttctaagactaacactctggtcgtcagacagcgttgcggaagaccgggcggtggcgtgctcctgcgctacgggagccaactggcccctgaaactttctatcgtgaatgcgacatgcagctatttggcccatggggagaaatcgtgtcaccatcacttagcccagccacctccaacgcaggagggtgtcggctctttatcaacgtcgccccccacgccaggatagcaattcacgcactcgctacaaatatgggcgccgggacagaaggtgcaaacgcttcgtatatactaatcagagacacccactcactcaggactacagcttttcacggacagcaggtattgtactgggaatctgaaagtagtcaagcggagatggaatttagtgaagggttcttgaaggcgcaggccagcttacgaggacagtattggaccctccagtcctgggtgccagagatgcaggacccacaatcatggaagggcaaagaagggacttag

SEQ ID NO: 237996 - RNA, 4116 nt, Artificial Sequence
  derived and/or modified sequence
augcaccagagacacccuagagcccgcugccccccccugugcgucgcaggcauucuugccugcggguucuuguugggaugcuggggcccaagccauuuucagcaaaguugcuugcaggcucuggaaccucaggccgucuccagcuaccugucaccaggugccccacuuaagggaagaccuccaucgcccggauuccaaaggcagagacaaaggcagcgacgugccgcaggcgggauucugcaccuggagcugcuaguggccguuggcccugacguguuucaggcccaucaggaagacacugagagguaugugcucaccaacuugaauaucggugcugaauuauugcgcgaccccuccuuaggagcucaguuccgcguccacuuagugaagaugguaauccugaccgaaccagaaggggcaccgaauauuacagccaaucugacaucgagucuccuaagcgugugcggguggagccaaacaauuaacccugaggacgacacagacccuggccacgcugacuuggugcucuacaucacaagguuugaccuugaauugcccgauggaaacagacaggugcgagguguaacccaguuagggggugccugcucacccacuuggaguugccuuaucacugaggacacuggcuucgaccugggugugacaaucgcgcaugaaauugggcacucauucggucucgagcacgauggcgcgccuggaucuggcuguggaccaaguggucaugugauggcuucagacggugcagcaccccgggcugggcuggcuuggucgcccugcucacggcgucagcuucugagccugcugagcgcagguagagcuaggugcgugugggacccuccccgcccucagcccggcucagcagggcauccccccgacgcacagccuggacucuacuacagcgcuaaugagcagugcagaguggcguuugguccaaaggccguggccugcaccuucgcccgagagcauuuagauaugugccaggcacugaguugucacacggacccucucgaccaguccuccugcagccgucuccugguaccacuucuggauggcacagaaugugggguggagaaaugguguucgaaagguagaugcagaagucucguagagcuuacccccaucgcugcuguacaugguagauggucuucauggggaccgaggaguccgugcagccggucuuguggcggcggaguggucaccaggcggcgacaguguaacaacccucgaccagccuucggcggacgugccugugugggugccgauuugcaggccgaaaugugcaacacccaggccugcgaaaagacacaacuggaguuuaugucgcaacagugugcuagaacggacggccagccacuacguagcucuccggguggagcuuccuuuuaucacuggggagccgcggucccacauagccaaggcgaugcacuuugucggcacauguguagggcaaucggcgaauccuucauuaugaaacggggcgacucuuuucuggacgggacuagaugcaugccgucugggccaagagaagacggcacuuugagucucugcgucucuggcuccugccggacuuuugguugugaugggagaauggacucucagcagguuugggaccggugucaaguaugcggcggagacaacaguaccuguucuccaagaaaaggaaguuuuacugcaggacgggcucgagaauauguuaccuuucuuacuguuacgcccaacuugaccucgguauacaucgcuaaucaccggccccuauuuacucaccuggcugugcgcauaggggguagauacgugguugcgggcaagauguccauuagucccaacacaacauaccccucacugcuggaagaugguagaguggaauaccguguggcccucacagaggaccgacucccgaggcucgaggaaauccgaaucuggggcccacugcaagaggaugccgauauccaggucuacaggagguacggagaggaguauggaaauuugacuaggccggauaucacguucaccuacuuccagcccaagccacgacaggccugggugugggccgccgugcggggaccauguagcgugucguguggagcuggacugcgcugggucaacuacucaugucucgaccaagccaggaaggagcuuguggagacuguacagugucaagguucccagcagccaccugcauggccugaggcuuguguccuugagccaugcccuccauacugggcuguaggggacuucgguccuuguucggcaagcuguggaggcgguuuacgcgaaagaccuguccgcugcguugaggcgcaagguucccuccugaagacacugccacccgccaggugcagagccggagcucaacagccggcaguagcguuggagaccugcaacccccagcccuguccggcacggugggaggucucagaaccauccagcugcacgucagcuggcggagccggguuggcacucgagaacgagacgugugugccgggggccgauggucuggaagcaccugucaccgagggcccugggaguguagaugagaaacuuccugcgcccgagcccugcguuggcaugucgugcccgccaggguggggucaccuggacgccaccuccgccggagaaaaggcccccagcccuuggggaucaaucaggaccggcgcacaggcagcccaugucuggacuccggcagcaggcucauguuccguaucaugugggcgcggucuuauggagcugcguuuccugugcauggauucugcgcuccgcgugccugugcaggaggagcugugcgggcuugccucuaagccuggcucacggcgagaagugugccaggccgugcccugucccgcccgcuggcaguauaagcuugcugcguguuccguuucuugugggcgcggaguuguccgcagaauucuuuacugugccagggcccauggagaggaugauggcgaagaaauccuguuggacacccagugucagggucuaccgcgaccugagccccaagaagccugcagccuggaaccauguccaccacguuggaaaguaaugagccucggcccuuguagcgccucguguggccugggaacagcccgcagaucgguugcaugugugcagcuugaccagggacaggacgucgagguggacgaagcagcgugcgcggcgcuggugcgaccagaggcuagcgucccaugcuuaauugcugauugcaccuacagguggcaugugggcacauggauggaauguagcguuuccugcggggauggaauacagcgucgccgcgauacaugucuuggaccucaagcucaagccccaguuccagcggacuucugccagcaccugccaaagccuguaacugugagaggcuguugggcaggcccaugcgugggacagggagcguguggccgccagcaccucgagccaacaggcacuauugauaugcgggguccgggccaggcagacugugcugucgccaucgggagaccuuugggcgaaguggucacucugcgcgugcuggagucgagccucaauugcagcgcaggcgauaugcuguuacucuggggacgacucaccuggcggaaaaugugccggaaauugcuggacaugacuuuuuccuccaagacaaacacacuuguggugagacagcguuguggacggccaggaggaggcgugcugcugcguuauggaucucagcucgccccagaaacauucuacagagaaugcgauaugcagcuuuuuggaccguggggcgaaauuguaucaccaagccugagccccgcaacaucaaacgcuggggguugcagguuguucauaaauguggcuccacacgcccgaauagcaauccacgcauuggcuacaaauaugggagccggaacagagggcgccaacgcgucauauauacuaaucagagacacccacucacucaggacuacagcuuuucacggacagcagguauuguacugggaaucugaaaguagucaagcggagauggaauuuagugaaggguucuugaaggcgcaggccagcuuacgaggacaguauuggacccuccaguccugggugccagagaugcaggacccacaaucauggaagggcaaagaagggacuuag

SEQ ID NO: 237997 - RNA, 4116 nt, Artificial Sequence
  derived and/or modified sequence
augcaccaaagacacccccgagcacgcuguccgccucucugugucgcuggcauccuggcuugcggauucuuguuaggguguugggggccuucucacuuccagcagucuugcuuacaggcacuggaaccccaggcaguuucaaguuaccucucaccuggugccccucuaaagggacgcccuccaucuccagguuuucagaggcaacgccagaggcagcgcagagccgccggaggcauucugcaccuagaacugcuggucgcagucggaccugacguuuuccaggcucaccaggaagauaccgagcgguacguacugacuaaccucaauaucggcgccgaauuacugcgggauccuucccugggagcccaguuuagaguccaccucgugaagaugguuauccuuacugaacccgaaggagcuccgaacauuacagcuaacuugacgagcagccuacugucaguguguggcuggucgcagacaauuaaucccgaagaugacacugaucccggacacgcagaucuggugcuguauauuaccagauucgaucuggaacuacccgaugguaacaggcaggugaggggcgucacgcagcuggguggggcuuguagccccacaugguccugucucaucacagaagauacaggguucgaccucggagugacaaucgcacacgaaauaggccacagcuuugggcuggaacacgauggugccccuggauccggcugcggccccucaggccauguaauggcuuccgacggagcagcacccagagcaggcuuagccuggagccccugcagccgccgccagcuccucaguuuguuaucugccggccgggcaaggugugugugggauccuccccgcccucagcccgggucagccggacaucccccugaugcacagcccggucuguacuacucagcgaaugagcaaugcagagucgcauucggacccaaggccguagccuguaccuucgcgagagaacacuuggauaugugccaagccuuauccugccacaccgacccacuggaccagucauccugcucacgacuacuggugccgcuccuugacgguacggaaugcggaguggagaaguggugcucgaaaggacgcugccgaucuuugguugaacuuacgccgauugcugccguccacgggcgcuggucaucuuggggaccgcguucacccuguucuagaucaugcgggggcggaguggucaccagacggcggcaauguaacaauccaagaccugccuuuggcggccgcgcaugcgucggcgcugaucuucaagcagagauguguaauacucaggccugcgaaaaaacgcagcuggaauucaugucacaacaaugcgcaaggacagacgggcaacccuuacgaucgucuccuggcggggcauccuucuaucauuggggcgccgcaguuccacacucccaaggagaugcccugugcaggcacaugugucgggcuaucggcgaauccuuuaucaugaaaagaggcgauucuuuucuggacggcacuagguguaugcccucaggcccuagagaggauggaacucuuagucuauguguguccggaucaugcaggacauucggcugcgaugggagaauggacagccagcaagugugggaucggugccaggugugcggaggcgauaauuccacauguagcccacgcaaagguucauuuacagcugguagagcccgagaauacgugaccuuucugaccgucaccccgaauuuaaccucaguauacauagcaaaucacagaccccuguuuacucaucuggcagugcggaucgggggccgguacgugguugcugguaaaauguccauuaguccuaauaccacauaccccagcuuacuagaggauggccguguggaauauagagucgcucugaccgaggacagacugccccggcuggaagagauucgaauuuggggaccacuacaggaggacgcagacauucaaguguauagacguuacggugaagaguacgguaaccucacuaggccugauaucacauucacauacuuccaaccaaagccccgacaagcuuggguuugggcagcagugcgaggcccuuguucugugucuuguggcgcuggcuuacgcugggugaauuacucuugucuggaccaggcucgcaaggagcucguggaaacagugcagugccaagguucccagcaaccuccagcauggccugaagcuuguguccuggaaccauguccaccauauugggccgugggcgauuucggucccuguagcgcaucuugcggcggaggauugcgagaaagaccagugaggugcguugaggcacaggguagccugcucaagacucuuccccccgcuagaugcagagccggcgcucagcaaccugcaguggcacuggagacauguaacccacagccaugccccgccaggugggaggucucagaaccuagcagcugcaccagcgcaggcggagcagggcucgcccuagaaaacgagacuugcgugcccggagcugacggcuuggaagcaccugugacagagggacccgggucggucgacgagaaacuuccagcccccgaaccaugcgucgggaugagcugcccaccaggaugggggcauuuagaugccacaagugccggcgagaaagccccuaguccauggggaucaauucggacuggcgcccaagcugcacaugucuggacaccggcagcaggcucauguucggugucauguggcaggggcuuaauggaacugcgguuucuuuguauggacucugcucuccgggucccugugcaggaggaacuuuguggccuagccaguaaaccaggaagcaggcgggaaguaugucaggcaguaccuuguccugcaagauggcaguacaagcucgccgccuguagcguuuccugcggaagaggugugguucgaaggaucuuauauugugcacgugcacacggagaagacgauggggaggagaucuugcuggauacucagugccaaggacucccucguccugaaccccaggaggcuugcucucuggaaccuugcccgccgcguuggaaggucaugucccuggguccaugcagcgcaucaugcggauuaggcacagcucggagaaguguggcuuguguacagcuagaucagggccaagacguagagguggaugaagccgccugugcugccuuggugaggccagaagcaucuguaccauguuuaauugcugacuguacauaucgauggcauguagguacuuggauggaaugcucggugucguguggcgaugggauucaacggcggagagacaccugccugggaccccaagcgcaggcucccgugccagcagacuuuugucagcacuugccuaagccuguuaccgugcgagguuguugggccgggcccugcgucgggcagggggccugcgggaggcagcaucuggaaccuacagguacuauagauaugcgagggccaggacaggcugacugugcgguggccauuggccgcccacugggcgaaguugugacauugagaguacuugaaagcucccucaauuguagcgcgggcgacaugcuccuguuguggggcagguuaacuuggagaaaaauguguaggaaauugcuggacaugacauucucuucuaagacuaacacucuggucgucagacagcguugcggaagaccgggcgguggcgugcuccugcgcuacgggagccaacuggccccugaaacuuucuaucgugaaugcgacaugcagcuauuuggcccauggggagaaaucgugucaccaucacuuagcccagccaccuccaacgcaggagggugucggcucuuuaucaacgucgccccccacgccaggauagcaauucacgcacucgcuacaaauaugggcgccgggacagaaggugcaaacgcuucguauauacuaaucagagacacccacucacucaggacuacagcuuuucacggacagcagguauuguacugggaaucugaaaguagucaagcggagauggaauuuagugaaggguucuugaaggcgcaggccagcuuacgaggacaguauuggacccuccaguccugggugccagagaugcaggacccacaaucauggaagggcaaagaagggacuuag

SEQ ID NO: 237998 - protein, 1572 aa, Artificial Sequence
  derived and/or modified sequence
MSTPTDPGAMPHPGPSPGPGPSPGPILGPSPGPGPSPGSVHSMMGPSPGPPSVSHPMPTMGSTDFPQEGMHQMHKPIDGIHDKGIVEDIHCGSMKGTGMRPPHPGMGPPQSPMDQHSQGYMSPHPSPLGAPEHVSSPMSGGGPTPPQMPPSQPGALIPGDPQAMSQPNRGPSPFSPVQLHQLRAQILAYKMLARGQPLPETLQLAVQGKRTLPGLQQQQQQQQQQQQQQQQQQQQQQQPQQQPPQPQTQQQQQPALVNYNRPSGPGPELSGPSTPQKLPVPAPGGRPSPAPPAAAQPPAAAVPGPSVPQPAPGQPSPVLQLQQKQSRISPIQKPQGLDPVEILQEREYRLQARIAHRIQELENLPGSLPPDLRTKATVELKALRLLNFQRQLRQEVVACMRRDTTLETALNSKAYKRSKRQTLREARMTEKLEKQQKIEQERKRRQKHQEYLNSILQHAKDFKEYHRSVAGKIQKLSKAVATWHANTEREQKKETERIEKERMRRLMAEDEEGYRKLIDQKKDRRLAYLLQQTDEYVANLTNLVWEHKQAQAAKEKKKRRRRKKKAEENAEGGESALGPDGEPIDESSQMSDLPVKVTHTETGKVLFGPEAPKASQLDAWLEMNPGYEVAPRSDSEESDSDYEEEDEEEESSRQETEEKILLDPNSEEVSEKDAKQIIETAKQDVDDEYSMQYSARGSQSYYTVAHAISERVEKQSALLINGTLKHYQLQGLEWMVSLYNNNLNGILADEMGLGKTIQTIALITYLMEHKRLNGPYLIIVPLSTLSNWTYEFDKWAPSVVKISYKGTPAMRRSLVPQLRSGKFNVLLTTYEYIIKDKHILAKIRWKYMIVDEGHRMKNHHCKLTQVLNTHYVAPRRILLTGTPLQNKLPELWALLNFLLPTIFKSCSTFEQWFNAPFAMTGERVDLNEEETILIIRRLHKVLRPFLLRRLKKEVESQLPEKVEYVIKCDMSALQKILYRHMQAKGILLTDGSEKDKKGKGGAKTLMNTIMQLRKICNHPYMFQHIEESFAEHLGYSNGVINGAELYRASGKFELLDRILPKLRATNHRVLLFCQMTSLMTIMEDYFAFRNFLYLRLDGTTKSEDRAALLKKFNEPGSQYFIFLLSTRAGGLGLNLQAADTVVIFDSDWNPHQDLQAQDRAHRIGQQNEVRVLRLCTVNSVEEKILAAAKYKLNVDQKVIQAGMFDQKSSSHERRAFLQAILEHEEENEEEDEVPDDETLNQMIARREEEFDLFMRMDMDRRREDARNPKRKPRLMEEDELPSWIIKDDAEVERLTCEEEEEKIFGRGSRQRRDVDYSDALTEKQWLRAIEDGNLEEMEEEVRLKKRKRRRNVDKDPAKEDVEKAKKRRGRPPAEKLSPNPPKLTKQMNAIIDTVINYKDSSGRQLSEVFIQLPSRKELPEYYELIRKPVDFKKIKERIRNHKYRSLGDLEKDVMLLCHNAQTFNLEGSQIYEDSIVLQSVFKSARQKIAKEEESEDESNEEEEEEDEEESESEAKSVKVKIKLNKKDDKGRDKGKGKKRPNRGKAKPVVSDFDSDEEQDEREQSEGSGTDDE

SEQ ID NO: 237999 - protein, 177 aa, Artificial Sequence
  derived and/or modified sequence
MEEEVRLKKRKRRRNVDKDPAKEDVEKAKKRRGRPPAEKLSPNPPKLTKQMNAIIDTVINYKDSSGRQLSEVFIQLPSRKELPEYYELIRKPVDFKKIKERIRNHKYRSLGDLEKDVMLLCHNAQTFNLEGSQIYEDSIVLQSVFKSARQKIAKEEESEDESNEEEEEEDEEESESE

SEQ ID NO: 238000 - DNA, 4719 bp, Artificial Sequence
  derived and/or modified sequence
atgagcacccccaccgaccccggcgccatgccccaccccggccccagccccggccccggccccagccccggccccatcctgggccccagccccggccccggccccagccccggcagcgtgcacagcatgatgggccccagccccggcccccccagcgtgagccaccccatgcccaccatgggcagcaccgacttcccccaggagggcatgcaccagatgcacaagcccatcgacggcatccacgacaagggcatcgtggaggacatccactgcggcagcatgaagggcaccggcatgagacccccccaccccggcatgggccccccccagagccccatggaccagcacagccagggctacatgagcccccaccccagccccctgggcgcccccgagcacgtgagcagccccatgagcggcggcggccccacccccccccagatgccccccagccagcccggcgccctgatccccggcgacccccaggccatgagccagcccaacagaggccccagccccttcagccccgtgcagctgcaccagctgagagcccagatcctggcctacaagatgctggccagaggccagcccctgcccgagaccctgcagctggccgtgcagggcaagagaaccctgcccggcctgcagcagcagcagcagcagcagcagcagcagcagcagcagcagcagcagcagcagcagcagcagcagcagccccagcagcagcccccccagccccagacccagcagcagcagcagcccgccctggtgaactacaacagacccagcggccccggccccgagctgagcggccccagcaccccccagaagctgcccgtgcccgcccccggcggcagacccagccccgccccccccgccgccgcccagccccccgccgccgccgtgcccggccccagcgtgccccagcccgcccccggccagcccagccccgtgctgcagctgcagcagaagcagagcagaatcagccccatccagaagccccagggcctggaccccgtggagatcctgcaggagagagagtacagactgcaggccagaatcgcccacagaatccaggagctggagaacctgcccggcagcctgccccccgacctgagaaccaaggccaccgtggagctgaaggccctgagactgctgaacttccagagacagctgagacaggaggtggtggcctgcatgagaagagacaccaccctggagaccgccctgaacagcaaggcctacaagagaagcaagagacagaccctgagagaggccagaatgaccgagaagctggagaagcagcagaagatcgagcaggagagaaagagaagacagaagcaccaggagtacctgaacagcatcctgcagcacgccaaggacttcaaggagtaccacagaagcgtggccggcaagatccagaagctgagcaaggccgtggccacctggcacgccaacaccgagagagagcagaagaaggagaccgagagaatcgagaaggagagaatgagaagactgatggccgaggacgaggagggctacagaaagctgatcgaccagaagaaggacagaagactggcctacctgctgcagcagaccgacgagtacgtggccaacctgaccaacctggtgtgggagcacaagcaggcccaggccgccaaggagaagaagaagagaagaagaagaaagaagaaggccgaggagaacgccgagggcggcgagagcgccctgggccccgacggcgagcccatcgacgagagcagccagatgagcgacctgcccgtgaaggtgacccacaccgagaccggcaaggtgctgttcggccccgaggcccccaaggccagccagctggacgcctggctggagatgaaccccggctacgaggtggcccccagaagcgacagcgaggagagcgacagcgactacgaggaggaggacgaggaggaggagagcagcagacaggagaccgaggagaagatcctgctggaccccaacagcgaggaggtgagcgagaaggacgccaagcagatcatcgagaccgccaagcaggacgtggacgacgagtacagcatgcagtacagcgccagaggcagccagagctactacaccgtggcccacgccatcagcgagagagtggagaagcagagcgccctgctgatcaacggcaccctgaagcactaccagctgcagggcctggagtggatggtgagcctgtacaacaacaacctgaacggcatcctggccgacgagatgggcctgggcaagaccatccagaccatcgccctgatcacctacctgatggagcacaagagactgaacggcccctacctgatcatcgtgcccctgagcaccctgagcaactggacctacgagttcgacaagtgggcccccagcgtggtgaagatcagctacaagggcacccccgccatgagaagaagcctggtgccccagctgagaagcggcaagttcaacgtgctgctgaccacctacgagtacatcatcaaggacaagcacatcctggccaagatcagatggaagtacatgatcgtggacgagggccacagaatgaagaaccaccactgcaagctgacccaggtgctgaacacccactacgtggcccccagaagaatcctgctgaccggcacccccctgcagaacaagctgcccgagctgtgggccctgctgaacttcctgctgcccaccatcttcaagagctgcagcaccttcgagcagtggttcaacgcccccttcgccatgaccggcgagagagtggacctgaacgaggaggagaccatcctgatcatcagaagactgcacaaggtgctgagacccttcctgctgagaagactgaagaaggaggtggagagccagctgcccgagaaggtggagtacgtgatcaagtgcgacatgagcgccctgcagaagatcctgtacagacacatgcaggccaagggcatcctgctgaccgacggcagcgagaaggacaagaagggcaagggcggcgccaagaccctgatgaacaccatcatgcagctgagaaagatctgcaaccacccctacatgttccagcacatcgaggagagcttcgccgagcacctgggctacagcaacggcgtgatcaacggcgccgagctgtacagagccagcggcaagttcgagctgctggacagaatcctgcccaagctgagagccaccaaccacagagtgctgctgttctgccagatgaccagcctgatgaccatcatggaggactacttcgccttcagaaacttcctgtacctgagactggacggcaccaccaagagcgaggacagagccgccctgctgaagaagttcaacgagcccggcagccagtacttcatcttcctgctgagcaccagagccggcggcctgggcctgaacctgcaggccgccgacaccgtggtgatcttcgacagcgactggaacccccaccaggacctgcaggcccaggacagagcccacagaatcggccagcagaacgaggtgagagtgctgagactgtgcaccgtgaacagcgtggaggagaagatcctggccgccgccaagtacaagctgaacgtggaccagaaggtgatccaggccggcatgttcgaccagaagagcagcagccacgagagaagagccttcctgcaggccatcctggagcacgaggaggagaacgaggaggaggacgaggtgcccgacgacgagaccctgaaccagatgatcgccagaagagaggaggagttcgacctgttcatgagaatggacatggacagaagaagagaggacgccagaaaccccaagagaaagcccagactgatggaggaggacgagctgcccagctggatcatcaaggacgacgccgaggtggagagactgacctgcgaggaggaggaggagaagatcttcggcagaggcagcagacagagaagagacgtggactacagcgacgccctgaccgagaagcagtggctgagagccatcgaggacggcaacctggaggagatggaggaggaggtgagactgaagaagagaaagagaagaagaaacgtggacaaggaccccgccaaggaggacgtggagaaggccaagaagagaagaggcagaccccccgccgagaagctgagccccaacccccccaagctgaccaagcagatgaacgccatcatcgacaccgtgatcaactacaaggacagcagcggcagacagctgagcgaggtgttcatccagctgcccagcagaaaggagctgcccgagtactacgagctgatcagaaagcccgtggacttcaagaagatcaaggagagaatcagaaaccacaagtacagaagcctgggcgacctggagaaggacgtgatgctgctgtgccacaacgcccagaccttcaacctggagggcagccagatctacgaggacagcatcgtgctgcagagcgtgttcaagagcgccagacagaagatcgccaaggaggaggagagcgaggacgagagcaacgaggaggaggaggaggaggacgaggaggagagcgagagcgaggccaagagcgtgaaggtgaagatcaagctgaacaagaaggacgacaagggcagagacaagggcaagggcaagaagagacccaacagaggcaaggccaagcccgtggtgagcgacttcgacagcgacgaggagcaggacgagagagagcagagcgagggcagcggcaccgacgacgagtag

SEQ ID NO: 238001 - DNA, 4719 bp, Artificial Sequence
  derived and/or modified sequence
atgtccacccccaccgaccctggagccatgcctcatcccgggcccagccctggtccagggcccagtccaggcccgattttggggccatcacccggaccaggccccagtcccggcagtgtccactctatgatgggaccatcgcccggacccccatcagtgtcccaccccatgcctacaatgggcagtaccgatttcccacaggaggggatgcaccaaatgcacaagcccatagacgggattcacgacaaggggatagttgaagatatccactgtggctcgatgaaaggcaccggcatgcggcctccacacccaggtatgggccctccacagagccccatggaccaacacagccagggttatatgagcccccatccctctcctctgggagctcccgagcacgtctctagccctatgagcggcggtgggcctacccctccacagatgcctcccagtcaacccggcgccctgatcccaggggacccccaggcaatgtcccaacctaaccgggggccatctcccttctctcccgtgcagctgcatcaactccgcgctcagatcctggcctacaaaatgcttgctcgggggcagccgctcccggagacccttcagctcgctgtgcagggcaagcgcacgctgccgggcctgcagcagcagcagcagcaacagcagcaacagcagcagcagcagcaacaacagcaacagcagcagcagcaaccacaacaacagccacctcagccgcagacccagcagcagcagcaacctgccctggttaactataacagacccagtggcccggggccagagctgtcagggcccagcacgcctcaaaagctcccagtccctgctcccggcggtcgtcccagccctgcccctccggctgctgcccagccaccagcggctgccgtacctggcccatcagtgccccaacctgcaccagggcaacctagccctgttctgcagctgcagcaaaagcaatcccggatcagcccaattcagaaacctcaagggctggaccccgtggagatcttacaggagagagagtataggctccaggcccggatcgcccatcggattcaggagctcgagaatcttcccgggagtctgcctccggatttgaggaccaaagcaacggttgagctgaaggccctgaggctgttaaactttcaacgacaattgcggcaggaggttgttgcgtgtatgagaagagacacaactctagaaacggccctgaacagtaaggcgtataagcggtccaaacgacaaacgttaagggaagcaaggatgaccgaaaagctggagaagcaacagaaaatcgaacaggaacgcaagcgaaggcaaaaacatcaagaatatctgaacagtattttacagcatgcaaaagacttcaaggaataccatcggtccgttgctggcaaaatccaaaagctgtctaaggccgttgccacctggcacgccaataccgaaagggaacagaagaaagagaccgaacggatcgagaaagagcgcatgaggcgattgatggcagaagacgaggaggggtaccgcaagctgattgatcagaagaaagaccggaggctggcctatctgctgcagcagactgatgaatatgtagcgaacttaacgaacctcgtgtgggaacacaagcaggcccaggctgccaaagagaagaagaagcggcgccgcagaaagaaaaaagctgaagagaacgctgagggcggcgagtccgccctcgggcccgacggggaacctattgacgaaagtagtcagatgtcagacctccccgttaaagttacacacacagaaacaggcaaggtgctgttcggccccgaagcccctaaagcgtcacagctggacgcatggctggaaatgaaccccggctatgaggtcgccccgagaagcgactctgaagagagcgacagcgattatgaggaggaggatgaagaagaggagtcttccaggcaggaaaccgaggagaagattcttctcgatcctaattctgaggaggtcagcgagaaggacgcaaagcagataattgagacagcgaaacaggatgtagatgacgagtacagtatgcaatatagtgcacggggatcccagtcatactacaccgtagctcatgccatcagcgaacgggtggaaaagcagagtgccctcctgattaacggcactctcaagcactatcagcttcagggccttgagtggatggtgagcttgtacaataacaatcttaatggaatcctggcggacgaaatggggctggggaagacaatacagactatcgccctgatcacctatttgatggagcacaagcgccttaatgggccctatctcatcatcgtcccactgtctaccctgtctaattggacatacgagttcgacaagtgggccccaagcgtggtgaagatctcttataaaggcacgccagctatgcgccgttctctggttcctcaacttaggagcggtaaattcaacgtgctgttgaccacctacgaatatattatcaaagataaacacatcctcgcaaaaatccggtggaagtacatgatagttgacgaggggcacaggatgaagaatcaccactgcaagttaacacaggtcttgaacacacactacgtcgcccccagacgaatcttgctgaccggtacaccacttcagaataagcttcctgaactgtgggccctgctgaatttcctgctgccaacaatttttaagtcttgttctactttcgaacaatggttcaatgcccctttcgctatgaccggggagcgagttgacctgaacgaagaagagactatcttaatcataagacggcttcacaaggtattgcgacccttcctgctgaggaggctaaaaaaagaagtcgagtctcagctaccagaaaaagttgagtatgttatcaagtgtgacatgtcagctctgcaaaagattctgtaccgacacatgcaagccaaaggaatcttgcttacagacggcagcgaaaaggacaaaaaagggaaaggcggcgcaaaaaccttgatgaacacaattatgcagctgaggaagatatgtaaccatccatacatgttccaacatattgaggagagctttgccgagcatcttggctactccaatggcgtgattaacggcgccgagctgtaccgcgctagtggaaaattcgagctgcttgatcgcattctgcccaagctgcgcgctaccaaccatcgcgttctcttgttctgccagatgacttctcttatgactatcatggaggattatttcgcgttccggaactttctgtacctgagactggatgggaccaccaagagcgaagatagggccgctctgctgaagaaattcaatgaacccggctcacagtatttcatatttcttttatcaaccagagcgggtggtttgggtctcaatctgcaggccgctgataccgttgttatattcgactcagactggaacccgcaccaggatctccaagcccaagatcgtgcccaccggattggtcagcagaatgaagtccgggtattgaggctgtgtacggtgaattctgttgaagaaaagatcttagctgctgccaagtataaacttaacgtggaccagaaagtgattcaagccgggatgttcgatcaaaagtctagtagccatgagcggcgggccttcctgcaagcaatcttagagcacgaggaagagaatgaggaagaagacgaggtgcctgacgacgaaacactcaatcaaatgatagcccgtcgagaggaggaatttgatttgttcatgcgtatggacatggaccgcagacgagaggatgctcggaatccaaaacgcaagccccgtctgatggaagaagatgagttgccatcctggattattaaggatgacgcagaagtggaaaggttgacttgtgaggaagaggaggagaagatctttgggaggggttcgcggcagagacgggacgttgactattccgatgctctgaccgaaaagcaatggctgcgcgctatcgaagatggtaacctggaagaaatggaggaagaagtgcgactgaagaagcggaaacgccggcggaatgtcgacaaggacccggccaaagaggacgtcgaaaaggccaagaaacggcgggggcggcctccagccgagaaactgagcccaaaccctccaaagctgaccaaacagatgaacgctatcatagatactgtgatcaattacaaggatagctcgggtcggcagctttctgaggtctttatccaacttccatccagaaaggaactccctgaatactacgaattgattcgcaaacctgtggacttcaaaaaaatcaaggagagaatacggaatcataagtatagaagccttggagacttggagaaagacgttatgctgctgtgccacaacgcacaaacttttaacctggaggggagtcagatttacgaagattctatcgtcttgcagtcggttttcaaatccgcgagacagaaaatcgccaaggaggaagaatccgaagacgagtccaacgaggaagaggaagaagaagatgaagaggaatcagaatcagaggctaagtcggtcaaggttaagattaaactgaacaaaaaggacgacaagggaagagataagggcaaggggaaaaaaagacctaacagagggaaggcaaagcctgtagtgtccgatttcgactcggacgaggagcaagatgaacgcgagcagtccgaggggtcggggacagacgacgagtag

SEQ ID NO: 238002 - DNA, 4719 bp, Artificial Sequence
  derived and/or modified sequence
atgagtactcccacagaccccggggcgatgccccacccggggccttcccccgggcccggtccttctcctggcccaattcttggaccctccccaggccccggcccgtcccctggttccgtccattccatgatgggcccttcacccggtccaccgtccgtttctcaccccatgcctacaatggggtccactgattttccacaggaaggcatgcaccagatgcataagccaattgatggcatccacgataaaggcattgtggaggatatccactgcggctccatgaagggcaccggcatgaggcccccccatcctgggatggggccaccacagagtccaatggatcagcactctcaaggctatatgagtccccatccatctccattgggggccccagagcacgtatctagtccaatgtccggggggggacctacacctcctcaaatgccaccatctcaaccaggcgctctaattcctggggacccccaagccatgtctcaacccaaccggggaccctcacccttctccccggttcagctgcaccaattgagggctcaaatcctggcttataaaatgctggctcgtggccaaccactgccagagacactccagctggctgttcaagggaaaaggaccttgccaggcctgcagcagcaacagcagcaacagcagcaacaacaacagcaacagcagcagcagcagcagcaacagcagcagccccagcagcagcctcctcagccacaaacccagcagcagcaacagccagccttggtgaattataatagaccctccggccccgggcccgaactgagtggcccatcaactcctcagaagctccctgtcccagctccaggaggaagaccttcccctgcgccccccgctgccgcgcagccccctgcagccgccgtccccggcccaagtgtcccacagcccgcccctgggcagccctctcctgtgctgcaactgcagcaaaagcagtcacgaatctccccgattcaaaaaccacaggggctcgatcctgtggagatactgcaagaacgagagtatcggctgcaggctagaatcgcccatcgtatacaggaactcgagaacttgcccggctcactcccaccggatcttcgaacaaaagccacagtggaactgaaagccctcagactgcttaattttcaacgccagttacggcaagaggtcgttgcatgcatgaggagagacacgacactagaaaccgcccttaattctaaggcctataagagaagcaagcgacaaacactgagggaggcacgaatgacagagaaactcgagaaacaacagaaaattgagcaagaaagaaagcggagacagaagcaccaagagtacttgaactcgatactgcagcacgcaaaagactttaaggaataccaccggtctgtggccggaaaaatccagaaactgagcaaggcggtcgcgacttggcacgccaacactgaaagagagcagaaaaaggaaacggaacggatagagaaagaacgtatgagacgcttaatggccgaagatgaagaggggtaccgcaagttgattgaccagaagaaggatcgtcggctagcttacctgttgcagcaaacagatgaatatgttgctaacctgactaacttagtctgggagcacaaacaagcgcaggcagcaaaagagaaaaagaagcggcggcggagaaagaagaaggccgaagaaaacgccgaagggggtgaatcagccctggggccagatggagagccaatcgacgaatcttcacagatgagtgacttaccagtcaaggtgacgcacaccgaaactggcaaagtcctcttcgggcccgaagcgcctaaggcaagccagctggatgcttggctggagatgaaccccggatacgaagtggccccaaggagtgactccgaggagtctgactccgactacgaggaagaggacgaggaggaggaatcatctaggcaagagacagaagagaaaatcttattggacccaaattctgaggaggtctcggagaaagacgcaaagcaaatcatagaaaccgctaagcaagatgtggatgatgagtatagcatgcaatactcggcgcgcggtagccaatcgtattacaccgtcgctcatgctatcagcgaacgtgtcgagaagcagtccgcgctcctgataaacgggacgctcaaacattatcagttacaaggactggaatggatggtctcactctataacaataatctcaacggaatcctagcagacgagatgggactgggaaaaacgattcaaacgatcgcacttatcacatacctcatggagcacaagcgattaaacggaccgtatttgatcatcgttcccctgagtaccctgtccaactggacatatgaatttgacaagtgggccccatcggtagtgaaaatctcatacaaggggacaccagcaatgaggcgctccttagttccacaactgagaagtggaaaatttaacgtcctgctgaccacttatgaatatattattaaagacaagcacatcttggccaaaattagatggaagtatatgatagtggacgagggccatcggatgaaaaatcatcattgtaaactgacccaggtgctcaatactcactatgtcgctccacggcgcatcttgctgacaggcaccccactacaaaacaagctgcccgagctttgggcactcctcaacttcctattaccgacgatttttaagtcttgttctacatttgaacagtggtttaacgccccattcgcaatgacaggcgaaagggtggatttgaacgaggaggaaactattctgataattaggcggctgcataaggtcctaagaccgtttctactccgaaggctaaaaaaggaggtcgaatcccagctacctgagaaggtcgaatatgtcataaaatgtgacatgtccgcactgcaaaagatcttataccgccacatgcaggcaaaaggcattctactcaccgacggctctgagaaagacaagaaggggaagggcggtgccaaaaccttgatgaacaccatcatgcagttgagaaagatctgtaaccacccctatatgtttcagcacattgaggagagcttcgccgaacacttggggtattctaacggtgtgatcaacggcgccgagctttatcgcgctagcggaaagttcgaactgctagaccggatcctgcccaaactgcgggcaaccaatcaccgtgtgcttctcttctgtcaaatgacctctctcatgactatcatggaagactattttgccttccgaaactttctgtatttgcggctggatggaaccaccaaaagcgaagaccgggctgcactgctgaaaaaattcaatgagcccggctcccagtatttcatcttcctcttgtctactcgagcgggcggactaggcttgaacttgcaggccgcagacacagtggtcatcttcgactccgactggaatccacaccaggatctccaggcgcaggatagagcgcacagaattggccagcaaaatgaggtccgggtcctgcgtctgtgcacagtgaatagtgttgaggaaaaaatcctcgctgctgcgaagtataaactgaatgtggaccagaaagtgatccaggcaggtatgttcgaccagaagagctcctcccacgaacgtcgcgcctttttacaggcaattctggaacatgaagaagagaacgaggaagaggatgaagtccccgacgatgaaaccctgaatcagatgattgcccggagggaggaggagttcgacctgttcatgcgcatggatatggacagacgaagagaggacgcgcgtaatccaaagcggaaacctagacttatggaggaggatgagctcccttcttggatcattaaggatgatgctgaggttgagagactgacctgtgaagaggaagaggaaaagatcttcggtcgcggcagccgccagagacgagatgtagactactccgatgccctgaccgagaagcagtggctgcgggccatcgaggacggcaatctggaggagatggaagaagaagtcagactgaaaaagcggaagcggcggcgcaacgttgacaaggaccctgcgaaggaggatgtcgaaaaagccaagaagaggcgaggcagaccccctgctgaaaaacttagccccaatcctcctaaactcacgaagcagatgaatgcaatcatagataccgttataaattataaagattctagtgggaggcagctgagcgaggtgtttatccagctgccaagccgcaaggagctgcccgaatattacgagttaattaggaagccagtggacttcaagaaaattaaagaaagaatccgaaaccataagtatcggagccttggagatcttgaaaaagatgtgatgcttctttgccataacgcacaaacgttcaatcttgaaggcagccagatatatgaagacagcattgtcttacagtctgtgtttaagagtgcccgccagaagattgcaaaagaagaggagtcagaggacgagagtaatgaagaagaggaggaggaagacgaagaagagtccgaatctgaggctaagtcagtgaaagttaaaataaaattaaataaaaaggacgataaggggcgggacaaaggaaaggggaagaagagacctaatcgaggaaaagctaagcctgtcgtgtctgactttgactcagatgaggaacaggatgaacgcgagcaatccgagggatcagggaccgatgatgagtag

SEQ ID NO: 238003 - DNA, 4719 bp, Artificial Sequence
  derived and/or modified sequence
atgagcacccccacagatcctggggccatgccccaccctggccccagccctggccctggccccagccctggccccatcctgggccccagccctggccctggccccagccctggctctgtgcacagcatgatgggccccagccctggcccccccagcgtgagccaccccatgcccaccatgggcagcacagacttcccccaggagggcatgcaccagatgcacaagcccattgatggcatccatgacaagggcatcgtggaggacatccactgcggctccatgaagggcaccggcatgaggcctccccaccctggcatgggccccccccagagccccatggaccagcacagccagggctacatgagcccccaccccagccccctgggcgcccctgagcacgtgagcagccccatgtctgggggcggccccaccccaccccagatgccacccagccagcccggggccctgatccctggggacccccaggccatgagccagcccaacagaggccccagccccttcagccctgtgcagctgcaccagctgcgggcccagatcctggcctacaagatgctggcccggggccagcccctgcctgagaccctgcagctggccgtgcagggcaagaggaccctgcccggcctgcagcagcagcagcagcagcagcagcagcagcagcagcagcagcagcagcagcagcagcagcagcagcagccccagcagcagcccccccagccccagacccagcagcagcagcagcctgccctggtgaactacaaccggcccagcggccctggccctgagctgagcggccccagcaccccccagaagctgcctgtgcctgcccctgggggccggcccagccctgcccctcctgctgctgcccagcccccagctgctgctgtgcccggccccagcgtgccccagcctgcccctggccagcccagccctgtgctgcagctgcagcagaagcagagccgcatcagccccatccagaagccccagggcctggaccctgtggagatcctgcaggagcgggagtaccgcctgcaggcccgcatcgcccaccgcatccaggagctggagaacctgcccggcagcctgcccccagacctgcggaccaaggccaccgtggagctgaaggccctgcggctgctgaacttccagaggcagctgcggcaggaggtggtggcctgcatgagaagagacaccaccctggagacagccctgaacagcaaggcctacaagaggagcaagaggcagaccctgcgggaggccaggatgacagagaagctggagaagcagcagaagattgagcaggagaggaagaggcggcagaagcaccaggagtacctgaacagcatcctgcagcacgccaaggacttcaaggagtaccacaggtctgtggccggcaagatccagaagctgagcaaggctgtggccacctggcacgccaacacagagcgggagcagaagaaggagacagagcgcatcgagaaggagaggatgaggcggctgatggctgaagatgaggagggctacaggaagctgattgaccagaagaaggaccggcggctggcctacctgctgcagcagacagatgaatatgtggccaacctgaccaacctggtgtgggagcacaagcaggcccaggccgccaaggagaagaagaagagaagaagaaggaagaagaaggccgaggagaatgctgagggcggggagagcgccctgggcccagatggagagcccattgatgagagcagccagatgtctgacctgcctgtgaaggtgacccacacagagaccgggaaggtgctgtttggacctgaggcccccaaggccagccagctggatgcctggctggagatgaaccctggctatgaggtggcccccaggagtgacagcgaggagagtgacagcgactatgaggaggaggatgaggaggaggagagcagccggcaggagacagaggagaagatcctgctggaccccaacagcgaggaggtgtctgagaaggatgccaagcagatcatcgagacagccaagcaggatgtggatgatgagtacagcatgcagtacagcgcccggggcagccagagctactacacagtggcccacgccatcagcgagcgggtggagaagcagagcgccctgctgatcaatggcaccctgaagcactaccagctgcagggcctggagtggatggtgtccctgtacaacaacaacctgaatggcatcctggctgatgagatgggcctgggcaagaccatccagaccatcgccctgatcacctacctgatggagcacaagaggctgaatggcccctacctgatcatcgtgcccctgagcaccctgagcaactggacctatgaatttgacaagtgggcccccagcgtggtgaagatctcctacaagggcaccccagccatgagaagaagcctggtgccccagctgcggagcggcaagttcaacgtgctgctgaccacctatgagtacatcatcaaggacaagcacatcctggccaagatccgctggaagtacatgattgtggatgagggccacaggatgaagaaccaccactgcaagctgacccaggtgctgaacacccactacgtggccccccggcgcatcctgctgaccggcacccccctgcagaacaagctgcctgagctgtgggccctgctgaacttcctgctgcccaccatcttcaagagctgcagcacctttgagcagtggttcaatgccccctttgccatgaccggggagcgggtggacctgaatgaggaggagaccatcctgatcatccggcggctgcacaaggtgctgcggcccttcctgctgcggcggctgaagaaggaggtggagagccagctgcctgagaaggtggagtatgtgatcaagtgtgacatgtctgccctgcagaagatcctgtaccgccacatgcaggccaagggcatcctgctgacagatggcagcgagaaggacaagaagggcaaaggaggagccaagaccctgatgaacaccatcatgcagctgaggaagatctgcaaccacccctacatgttccagcacatcgaggagagctttgctgagcacctgggctacagcaatggagtcatcaatggagctgagctgtaccgggccagcggcaagtttgagctgctggaccgcatcctgcccaagctgcgggccaccaaccaccgggtgctgctcttctgccagatgaccagcctgatgaccatcatggaggactactttgccttcaggaacttcctgtacctgcggctggatggcaccaccaagtcagaagatcgggccgccctgctgaagaagttcaatgaacctggcagccagtacttcatcttcctgctgagcacccgggccggcggcctgggcctgaacctgcaggccgctgacacagtggtgatctttgacagcgactggaacccccaccaggacctgcaggcccaggaccgggcccacagaattggccagcagaatgaggtgcgggtgctgcggctgtgcaccgtgaacagcgtggaggagaagatcctggccgccgccaagtacaagctgaatgtggaccagaaggtgatccaggccggcatgtttgaccagaagagcagcagccatgaaagaagagccttcctgcaggccatcctggagcacgaggaggagaatgaggaggaggatgaggtgcctgatgatgagaccctgaaccagatgattgcccggcgggaggaggagtttgacctcttcatgaggatggacatggacagaagaagagaagatgccaggaaccccaagaggaagccccggctgatggaggaggatgagctgcccagctggatcatcaaggatgatgctgaggtggagcggctgacctgtgaggaggaggaggagaagatcttcggccggggcagccggcagaggagagatgtggactacagtgatgccctgacagagaagcagtggctgcgggccattgaagatggcaacctggaggagatggaggaggaggtgcggctgaagaagaggaagagaagaagaaatgtggacaaggaccctgccaaggaggatgtggagaaggccaagaagagaagaggccggcccccagctgagaagctgagccccaacccccccaagctgaccaagcagatgaatgccatcatcgacaccgtcatcaactacaaggacagcagcggccggcagctgtctgaggtgttcatccagctgcccagcaggaaggagctgcctgagtactatgagctgatcaggaagcctgtggacttcaagaagatcaaggagcgcatccggaaccacaagtaccgcagcctgggggacctggagaaggatgtgatgctgctgtgccacaatgcccagaccttcaacctggagggcagccagatctatgaggacagcatcgtgctgcagagcgtcttcaagagcgcccggcagaagatcgccaaggaggaggagagtgaagatgagagcaatgaggaggaggaggaggaggatgaggaggagagcgagagcgaggccaagtctgtgaaggtgaagatcaagctgaacaagaaggatgacaagggccgggacaagggcaagggcaagaagaggcccaacagaggcaaggccaagcctgtggtgtctgactttgacagtgatgaggagcaggatgagcgggagcagagcgagggcagcggcacagatgatgaatag

SEQ ID NO: 238004 - DNA, 4719 bp, Artificial Sequence
  derived and/or modified sequence
atgagcacccccaccgaccccggcgccatgccccaccccggcccctcgccaggtcctggcccctcccccggcccaattttgggacctagcccgggccccgggccgagccccggctctgtccattctatgatgggaccaagccctggacccccctcagtcagccacccaatgcccacaatgggcagtactgatttcccccaggagggaatgcaccaaatgcacaagcctatcgatggaatccacgataaaggtatcgtcgaagatatccactgcggatctatgaaaggtacaggaatgagacccccgcacccaggcatgggccctccccagtcccccatggaccaacacagtcaaggttatatgtcaccacatccttctccgctaggggcacctgaacatgtttcctcgccaatgagcggcggcggacccaccccaccacagatgcctccctcccaacctggcgccttaattcctggtgacccacaggctatgtcccaacccaaccgcggaccttcgcccttctcgccagtgcaactgcaccagcttcgggctcaaatactggcctacaaaatgctcgccagaggacagcctcttccagagacactccaattggcagttcaggggaaaaggaccctgcccggcctgcaacaacagcagcagcagcaacagcagcagcagcagcagcaacaacagcaacagcagcagcagcaacagcctcaacagcagccaccacaaccacagacacagcagcaacaacaacctgcgttggtcaattacaatcgcccgtcgggacccggtccagaactcagcgggccatcaactccacagaaattacccgtgcctgcacccggtgggcggcccagccccgcccctccggcagcagcacaacctcccgctgccgcagtaccaggtccctccgtgccgcagcctgcccccggtcagccttcccctgtgctgcaattgcagcagaagcaaagcagaatatcacccatccagaagccacagggacttgatcccgttgaaattctccaggagcgcgagtaccgtcttcaagctagaatcgctcatcgaattcaggagctggaaaacctcccagggtcactgcctcccgacctcagaaccaaggccaccgtagaacttaaggccttgaggctcctcaacttccagaggcagttgaggcaggaagtggttgcatgtatgcgaagggatacaactttagagaccgctttgaattcgaaggcttacaaaagatcgaaacgccagaccctgagagaggctagaatgaccgagaagctcgagaaacaacagaaaatcgagcaagaacggaagcggcgacagaaacaccaagaatatctgaatagcattttacagcatgctaaagatttcaaagagtaccacaggtctgttgccggcaagattcaaaaactgagcaaggctgtcgcaacatggcatgcaaacactgaaagggagcagaaaaaggagacagaacgcattgagaaggagcgcatgaggaggctaatggcagaagatgaggagggttataggaaactcatcgaccagaagaaggatcgcaggctcgcatatctgctgcaacagactgacgaatatgtggccaatctgacaaatctggtttgggagcacaagcaagcccaggccgctaaagagaagaagaagcgtagacgcaggaagaaaaaagcggaagagaatgccgagggtggcgaatcagctctgggccccgacggcgaacccattgatgagagctctcagatgagtgatttacctgtcaaagtaacccatactgagacgggaaaggtcctctttggtcccgaggcgcctaaggcttcacaactcgacgcctggctggaaatgaatccgggatacgaggtggctcctcggagcgatagtgaggaatccgactccgactatgaagaagaggatgaagaagaagagtcatcgaggcaggaaaccgaggaaaagatccttttggatccaaacagcgaagaggtcagtgaaaaggacgcaaaacaaatcattgagactgccaaacaggatgtcgatgatgaatattcgatgcaatacagcgcacgggggagccagtcctactacaccgtggcccacgcgataagcgagcgagtcgagaagcagtccgcgttgctgatcaacgggaccctgaaacattatcagctccagggtttggagtggatggtgagcctgtacaacaacaacctgaatgggatcctagcagatgagatgggcctgggaaaaactattcaaaccatcgctctcatcacatacctgatggaacacaaacgcctcaatgggccatatttgatcatcgttcctctctctactctttccaactggacgtacgagtttgacaagtgggccccctctgtggtgaaaatctcatataaagggactcccgcgatgcgccgtagtctcgtgcctcagctgcggtccggaaagtttaatgttctattgactacttatgagtacattattaaagataagcatatcttggcaaaaattcggtggaagtatatgattgtcgacgaaggtcatagaatgaaaaatcaccattgtaagctgacacaggtgttgaatacccactatgtggctccccgacgcattttactgacgggcacgccgcttcagaacaagttacccgagctatgggcacttcttaatttcctactccccacaatcttcaagagctgctccactttcgaacagtggtttaatgctcctttcgctatgacaggggaacgggtggatctgaatgaagaagaaaccatcctgattatacgccggttgcataaggtgctgcgtcctttcctgttgagacggcttaagaaggaggttgaatcgcagctgcccgagaaagttgagtatgtcataaagtgcgatatgagcgccttacagaagattttgtaccgtcacatgcaggccaaagggatcttgctgacagatggctctgagaaggacaagaagggcaagggcggcgcgaagaccctgatgaacactattatgcaactacgcaaaatctgtaatcatccttatatgtttcaacatatagaagagagctttgccgaacacttgggatactctaacggcgtcattaatggtgccgaactgtaccgggcttccggcaagttcgagctgctggatagaatcctgccgaaactgcgggcgaccaaccacagggtgttactgttttgtcagatgacctcactgatgaccataatggaagactacttcgcatttcggaatttcctgtatctcaggttagacggcacgacaaagtccgaggatcgggccgcattgctaaaaaagttcaacgaaccgggcagccaatacttcatctttctactgtcaacgcgcgccggtggtttgggcctgaacctgcaggcagccgacaccgtggtgattttcgacagcgattggaatcctcatcaagacctacaggcccaggatagagcacatcgcattggtcagcagaacgaagtgcgcgttcttagactctgcaccgttaacagtgttgaggaaaagattctcgcggccgcaaagtataagctaaatgtcgatcagaaggtcattcaggccggtatgtttgaccagaaatcttcctcacatgagaggagggctttcctacaggcgattctggagcacgaggaagagaatgaagaagaggacgaagtccccgacgacgagacactcaatcaaatgatcgctaggcgcgaagaggagtttgacctgttcatgcggatggacatggaccgccgtagggaagatgctaggaatcctaaacgcaagcctcgtctgatggaagaggacgagctgccctcttggataattaaggacgacgctgaggtggagcggctcacctgtgaagaggaggaagaaaagatctttggaaggggctcgcgtcagagaagagacgtcgactattccgacgcactgacagaaaaacagtggctgagggcaattgaagatggaaacctagaggagatggaggaagaggtacgtctaaagaaacgaaaacgaaggcgcaatgtagataaggaccccgctaaggaggacgtggagaaagccaagaaacggagagggcgccctccagccgagaaactctcacccaatcctcccaaactcaccaaacagatgaatgcgatcattgatacagttatcaactacaaggactctagcggacggcagctgagtgaagtgttcatccagcttcctagtcggaaggaactgcctgagtactatgagcttatccgaaaacccgtggatttcaagaaaatcaaggaaagaatccggaaccataagtatcggtccctgggggacttggaaaaagatgtgatgttactgtgccacaacgcccagacattcaacctggaaggctctcagatttatgaagattctattgtgttacagagtgttttcaagagtgctcggcaaaaaatcgccaaagaagaggagtctgaggacgagagtaacgaagaggaggaggaagaagacgaagaggagtcagagtcagaggctaagagcgtcaaagtgaaaatcaagctcaacaaaaaagatgacaaggggagggacaaaggcaaggggaagaagagaccaaaccgggggaaggccaagccagtcgtatccgattttgatagcgatgaagagcaggacgagagggagcagtcagagggttccggtacagatgatgagtag

SEQ ID NO: 238005 - DNA, 4719 bp, Artificial Sequence
  derived and/or modified sequence
atgagcacccccaccgaccccggcgccatgccccaccccggcccctcacccggccccggtcccagtcccggccctatcctcggaccctcgcccggaccaggaccatctccagggagcgtccacagcatgatggggccctcccctggccccccgagcgtgtcacaccccatgcctactatgggctcaactgattttcctcaggagggtatgcaccaaatgcataaacccatcgacggtattcatgataaggggatagttgaggatatacactgcggaagtatgaagggtacaggaatgcgccctccccaccctggtatgggtccaccccagtcccctatggaccagcattctcagggttacatgagccctcacccatccccactgggggctccagaacatgtgtcgagtcccatgagcggaggcgggccgacccctccgcagatgccaccatctcagcccggtgcattaattcctggagatccccaggccatgtctcagcccaaccggggacccagcccattcagccctgtgcagcttcatcagttgcgggcacaaatccttgcctacaaaatgttagccagaggccagccactgccagagactcttcagctggctgtacagggcaagcgcaccctccccggcctccagcagcaacagcagcagcagcagcagcagcagcagcagcagcagcaacagcagcagcaacagcagcaaccccaacagcagccccctcagccgcagacccagcagcaacaacagcctgccctggttaactataaccgcccatcagggcctggacccgagctatcaggaccttctactcctcaaaaactccccgttcctgccccaggaggtcgcccgtcccctgccccgccggctgctgcccagccaccagccgcggcggtgcccgggccaagcgtgccacaaccagcccctggacagccttcaccagtccttcaactgcagcagaagcagtcacgcattagtcccatccaaaagccacagggactggaccccgttgagattctacaggaaagggagtatagactccaagctaggattgcccaccgaatccaggagctagagaatctccccggaagcctgccccccgatctcagaacaaaagcaactgtggagctcaaggctcttaggctgctgaattttcagcggcagttgaggcaggaagtggtcgcctgtatgcgaagggacacaacgctggagacagcccttaactctaaggcctataagcggagtaaacggcagacccttcgcgaagctcgcatgacagagaagctagaaaaacagcagaaaattgaacaagaacgaaagcgaaggcaaaagcatcaggagtaccttaacagcattctgcaacacgcgaaggacttcaaagagtaccaccgcagtgtggcaggcaagatccagaaactcagtaaagccgtggcaacttggcatgccaataccgagcgggagcagaagaaagaaaccgaaagaatcgagaaagaaaggatgaggcggttgatggccgaggatgaggaaggctaccgcaaattgatagaccagaaaaaagaccggagactagcttacctcctgcagcagacagatgaatacgtggctaatctgacaaatttggtgtgggaacacaagcaggcccaggccgccaaggagaagaagaagcggagacgacgcaagaagaaggccgaagaaaatgccgaaggcggcgagagcgcactaggacctgatggggagccaatagacgaatcttcccaaatgtccgatttgcccgtgaaggtgacccacacggaaacgggtaaagtccttttcggccccgaagcacccaaggcctcccagctggatgcctggctggaaatgaatcctggttacgaagtcgctccgcgctcagatagtgaagagtccgattccgactatgaggaagaagacgaggaggaagagtcctcaaggcaggaaacagaggaaaaaatactcctggacccaaacagcgaggaggtcagcgaaaaggatgctaaacaaataatcgagaccgccaaacaagatgtggacgatgagtatagtatgcagtattccgccagggggagccagtcgtattacacagttgcccacgcaatttctgaacgcgtagaaaagcaatccgcccttcttataaatggaactctgaagcattaccagctacaagggcttgaatggatggtgtcattgtacaacaacaatctgaacggcatcctcgctgacgaaatgggtctgggaaaaaccattcagaccatcgccctgattacttacctaatggagcataaacgactgaacggcccttacctgatcatcgtgcctctttccaccctatctaactggacctacgaatttgacaagtgggctccttccgtcgttaagatatcatacaagggcacaccagccatgagaagatctcttgttccacaattgcggagtgggaaattcaatgtactcctgaccacctacgagtatattatcaaagataagcatattctcgccaagatcaggtggaagtacatgattgtggacgagggacatcgaatgaaaaatcatcactgtaaacttacgcaggtgctgaatacccattacgttgctccaagacgtatcttgctaacaggcacaccactccagaataaactgcctgagctctgggctttgctgaatttcttacttccaacgatcttcaagtcctgtagtacctttgaacagtggtttaatgctccttttgccatgacaggtgagcgtgtcgacttgaatgaggaggaaaccattttgatcatcaggcggctacacaaggtgcttagacccttccttctaaggaggctaaaaaaagaggtggagtcccaactccctgaaaaggtggagtatgtgatcaaatgtgatatgagtgccctgcagaaaatcctctacaggcacatgcaggctaaaggcatcctactcaccgacggcagtgaaaaagataaaaagggaaagggcggcgccaagactcttatgaatacgatcatgcaactcagaaagatctgtaatcatccgtatatgtttcagcacatcgaggaaagcttcgccgaacacctaggttatagcaatggggtaatcaatggtgccgagttgtatcgagcaagtggcaagttcgaactccttgaccgcattttacccaaattgcgggcgaccaaccacagagtcctattgttctgccagatgacaagtctcatgaccattatggaagactattttgctttcagaaatttcttgtacctcaggcttgatgggactactaaaagtgaggacagggctgcgctgctcaagaaatttaatgagcctggtagccagtactttatcttcttattgtctacacgcgccgggggcttagggcttaatctgcaggccgccgatactgtcgtgatctttgacagtgattggaacccgcatcaagatttacaggcacaggatcgggcacatcgaataggacagcagaacgaagtcagggtgctgaggctctgcactgtgaattcagtggaagaaaaaatactcgcggcagccaagtacaaactcaacgtggatcaaaaagtcatccaagcgggaatgttcgaccagaaaagtagttctcacgagcgcagggcttttctgcaggcaatcctcgagcatgaggaagagaacgaggaagaagacgaggtaccggatgacgagactctgaatcagatgatcgcccgacgagaggaggagtttgacttattcatgcgcatggacatggacagacgtcgagaggatgccaggaatccaaaaagaaaaccccggctcatggaagaagacgagcttcccagctggattataaaggacgacgctgaggtcgaaaggctcacctgtgaggaagaagaggagaaaatttttgggcggggaagtagacagagaagggatgtcgactattcagacgccctgaccgagaaacaatggttacgcgcaatcgaggatggtaatcttgaagagatggaggaagaggtgaggcttaaaaaaaggaagaggcgccggaatgtagataaagatcccgcaaaagaagacgtggagaaggccaaaaagaggcgcggccggccaccagctgaaaaactcagccccaaccccccaaaattgaccaagcagatgaacgcaatcattgatacggttatcaattacaaggacagtagtggaagacagctgtcggaagtgttcatccaactgcccagccgcaaggaactgccagagtactatgaacttatccgaaaaccagtagacttcaagaaaattaaggaacgcattcggaatcataagtaccggtcactcggggaccttgaaaaggatgtcatgctcctttgtcacaacgctcaaacgttcaacctggaaggctctcagatttatgaggactctatagtgctgcaaagcgtgttcaagagcgcgcggcagaaaatcgctaaggaagaggagtcagaggatgagtctaacgaagaggaagaagaggaagacgaggaggaaagcgaatcagaagccaaaagtgtgaaggttaagataaagctgaataaaaaagatgataaaggccgggacaaggggaaaggcaaaaagcgcccaaaccggggcaaggctaagcctgtggtgtccgacttcgattcagacgaggagcaggatgagagagagcaatccgagggcagtggcactgatgatgaatag

SEQ ID NO: 238006 - DNA, 4719 bp, Artificial Sequence
  derived and/or modified sequence
atgtcaacaccaacggatcccggtgctatgccccatcccggaccatcccccggaccgggtccatccccagggccaatcctggggccaagccctggaccaggcccttccccgggttccgtgcactccatgatgggcccaagtcccggacccccaagtgtgagtcaccctatgccaacgatgggctctacggatttcccacaggaaggaatgcaccagatgcacaaaccaattgatgggattcatgacaagggtatcgtggaggacattcattgcgggtccatgaagggcacaggcatgcggccaccacaccctggtatgggaccgcctcagagccccatggatcaacactcccaggggtacatgtccccacaccccagcccactcggagctccagagcatgtgtcctctcccatgtcgggcggaggtccaacccccccacaaatgcctccatcccagccaggtgccctcatccccggagatccccaagccatgtcacagcccaataggggaccatctcctttctcccccgtccaactccatcagctgagggcacaaatcctcgcctacaaaatgctggcccgtgggcagccgctccctgagaccctgcagctggccgtccagggaaagcggactttacctggtctgcagcagcagcagcagcagcagcagcagcagcaacaacagcaacagcagcaacagcagcaacaacagcagcctcagcagcagccgcctcagcctcagacccagcagcagcagcagcctgctttggtcaattacaaccgcccatcaggtcccggacctgagttaagcgggccaagcactccacaaaagctgcctgtaccagcccctggcggacggccatctcccgctcccccagccgctgcacagccaccagcagccgcagtgcccggtcccagtgtgccacagccagccccaggccaaccaagccctgtgttacagttgcagcagaaacagtcccgtatctcaccaattcagaaaccccaaggactggaccctgtagaaattcttcaggaacgggaatatcggcttcaggcacgaatcgcgcatcggattcaggaactggaaaacctccctggcagtcttccaccagatctcagaacaaaagcgacagtcgaattaaaggcccttagactgcttaattttcagcgacaactgagacaggaagtggttgcatgcatgcgcagagacactacactcgagacagcactgaacagcaaggcctataaacgaagcaaacgccagacactaagggaagcgcgtatgacagagaaacttgagaagcaacagaaaattgagcaagagcggaaacgacgacagaagcaccaggagtatctcaactcaatactgcagcatgccaaagactttaaagaatatcatcgctctgtggctggcaaaattcagaagctctctaaggccgtagctacatggcacgctaatacggaacgtgagcagaaaaaggagacggaacgcatcgagaaagagcgtatgcggagattgatggctgaagatgaagagggctatagaaagctgatcgatcaaaagaaggaccgcagattagcctacctgttgcaacagacagatgagtacgttgcaaatctgacaaacttggtttgggaacacaaacaggcgcaggccgcaaaggagaagaagaaaagaaggaggagaaaaaagaaagctgaggagaatgctgaaggaggcgagagtgcactgggccctgacggtgagcccattgatgagtcatcccagatgtcggatctccccgtaaaagtgacccacacggaaaccggaaaggtgttatttggtcctgaggcacccaaggcttcacaattagatgcgtggttggaaatgaaccccggatacgaggtcgcccctaggtctgactcagaggagtccgactcagactatgaagaggaggacgaagaggaggaatcctccaggcaggagaccgaggagaagatcctcctagatccaaatagcgaggaggtctccgaaaaggacgcgaagcagattatcgaaacggctaagcaggatgtagacgatgaatactccatgcagtatagcgctcgcggtagtcagagctattacactgtagcacatgccatctccgagagagtcgaaaaacagtccgctctcctgatcaacggcacattaaagcactatcagcttcaggggcttgaatggatggtgagtctttataacaataaccttaacgggattttggccgatgagatgggactcgggaaaacaatacagacaatcgcactaatcacatacctcatggagcataagcgactcaatggcccttacttaattattgttcctctgagtactctctccaattggacctacgaattcgacaaatgggccccttctgtcgtgaagatctcttacaaaggtacaccggcaatgaggcgtagtctcgtgccacagctcagaagtggcaaatttaatgtgctgctgacaacgtacgagtatatcattaaagataaacacattctcgccaagattcggtggaagtacatgatcgttgacgaagggcaccggatgaagaatcaccactgcaaactgactcaggtgcttaacacacactacgtggcgcctcggcgtattctcctgactggcacccccttgcagaataagcttccagaactgtgggcactgcttaatttcctacttcccactatcttcaagagttgctctacattcgagcagtggttcaatgctccatttgctatgacgggtgagcgtgtcgatcttaatgaagaggagaccatccttattattaggagattgcacaaagtgctgcggccattcttactaagaaggctcaagaaagaggtggaatcacagctcccagaaaaggtggagtatgtcataaagtgtgatatgagtgccttgcaaaagatcctctataggcacatgcaggccaaggggattctgctgacggacggatctgagaaggacaaaaagggaaaaggcggagcaaagaccctgatgaacactatcatgcaactgaggaagatttgtaaccacccctatatgttccagcacattgaggagtcttttgcagagcatctgggatactctaacggagttataaacggtgccgaactgtacagggccagtggtaaatttgagctactggaccggattctccccaaattgcgagcaaccaatcaccgggttctcctattctgtcagatgactagcctgatgactatcatggaggactacttcgcattcaggaattttctctacctgcgcttagacggcaccacaaaaagtgaggatcgcgcagccctgctcaaaaaattcaacgagcccggaagccaatacttcatcttcctcctctctacccgggctggtggacttggtctgaacctgcaggccgctgatactgtggttatttttgattctgattggaacccccaccaagatcttcaggcccaagaccgggcacatcgcattggccagcagaacgaggtgagagtcttgcgactctgcactgtgaacagcgtcgaagagaagattcttgcagcggctaaatataagttgaacgtcgatcagaaggtaatccaggctgggatgttcgaccagaagagcagttcccatgagcgccgtgcattcttgcaggctatactcgaacatgaagaagagaacgaggaggaggatgaggtcccagacgacgagacacttaatcagatgattgcccgaagggaagaggaattcgacctctttatgcgcatggatatggaccggagaagagaggacgcaaggaaccccaagaggaaaccaagattgatggaggaggacgagttaccctcctggatcatcaaggacgacgctgaggttgagagactgacctgtgaggaggaggaggagaaaattttcgggagagggtcacgtcagcgacgtgacgtcgattacagcgatgctcttaccgagaaacagtggttgagagctatcgaggatggaaatctggaagagatggaagaggaggtgagactgaaaaaaaggaaacggaggcgcaacgtggacaaggatcccgctaaagaagatgtggaaaaagcaaagaagcgtaggggcagaccacccgcagagaagctgtcccccaacccccctaaactgaccaaacagatgaacgcaataatagacacagttatcaactacaaggattccagtggaaggcagctttctgaggtctttatacagttgccctcacgcaaagaactaccagaatattacgaacttatcaggaaacccgtagatttcaaaaaaatcaaagagagaatcagaaatcataaatataggtctcttggcgatcttgaaaaggatgtgatgctcctgtgtcataatgctcagaccttcaacctagaaggctctcagatctacgaggactctattgtacttcagagtgtctttaaatccgccaggcagaaaattgcaaaggaagaggagtccgaggacgaaagcaacgaagaagaagaggaggaggacgaggaagaaagcgaatctgaggcaaagagcgttaaggtgaaaattaaactgaacaaaaaggacgacaaaggccgtgataagggaaaagggaagaagaggccaaaccggggtaaagcgaagcctgtcgtttctgacttcgactcagatgaagaacaggacgaaagagaacagagcgagggtagcggcacggacgatgaatag

SEQ ID NO: 238007 - DNA, 4719 bp, Artificial Sequence
  derived and/or modified sequence
atgtcaacacctacagatcctggagctatgccccatccgggaccaagtcccggacctggtccgtcccccggtccaatcctgggacctagccccggtcccggtccaagccccggaagtgtgcacagcatgatgggaccctctccaggccctccttccgtgtcacatcccatgcctactatgggatccactgactttccacaggaagggatgcatcagatgcataaacccatcgacggtattcacgataagggaatcgtggaggacatacactgcgggtccatgaagggaacagggatgcggcctcctcaccctggcatggggccacctcagtcaccaatggatcagcactctcagggctacatgtctccacacccctccccactcggtgcacccgagcacgtgtcatcaccaatgagtggcggaggaccgacgccgccacagatgccaccttctcagccaggcgctctgattccgggtgacccccaagctatgtcccagccaaacagaggtccaagtccattcagccctgtgcagctacaccaactgagggcgcaaattctagcctacaagatgctggcacgtgggcagccactccctgagaccctccaattggccgtgcaggggaagcggaccctcccaggcctgcagcagcaacagcagcagcagcagcaacaacagcagcaacagcagcagcagcagcagcagcaacagcagccccagcaacagccccctcagccccagacacagcaacagcaacaaccagcgctggtgaattacaaccgcccttcaggtccaggacccgagctgtcaggcccatccacccctcagaagctgcccgtcccagcacccggaggcagaccttctcctgccccacctgccgcagcacaacctcccgctgccgcagttcccggacccagcgtcccgcaacctgccccagggcaaccctcccctgttctacagcttcagcaaaaacagtcaaggatcagtcccattcaaaagccgcagggtttggatccagtagagatcctgcaagagcgggagtaccgcttacaggcacggattgctcatcggatacaggagctcgaaaatctgccgggtagcctgcctccagacctgcggactaaagccactgtcgagctgaaggcccttaggctgcttaacttccaacgccagctgaggcaggaggttgttgcctgcatgcggagggacacaacgttggagaccgccctcaactcaaaggcctacaagagatccaaacgccagacattgcgagaggcccgaatgacagaaaagctcgaaaagcaacagaaaatagaacaggagaggaaaaggcgccaaaagcaccaggagtacctgaattctatccttcagcatgctaaggattttaaggagtaccatcgtagcgtggctggcaagattcagaaactgtctaaagccgtggcaacatggcacgcaaacaccgagagagagcagaagaaggagactgagcggatcgagaaggagcgaatgcgaaggttaatggctgaggatgaggagggatatcggaagttaatcgaccagaaaaaggacaggcggctcgcctacctgctgcagcagacagatgagtatgtggctaacctgaccaacctcgtgtgggagcataagcaagcccaggctgccaaggaaaaaaaaaagagaaggagaagaaagaaaaaagctgaagagaatgcggagggcggtgaaagcgccttggggcctgacggcgaacctatcgatgagtcctcacaaatgagcgatttaccagtgaaggtaactcacactgagacaggtaaagtgctgttcggacccgaagcaccaaaagccagtcagttggacgcctggttggagatgaatcccggatacgaggttgctccgaggtcagacagcgaagagtccgatagtgattacgaggaggaggacgaggaggaggaatcctcgcgccaagagacagaagagaaaatactgctggaccctaacagtgaggaagtgagcgaaaaggacgctaaacaaatcatcgaaaccgccaagcaggacgtcgatgacgaatacagcatgcaatattccgcccgaggttcccagtcatactataccgtagcccatgccatttcagagcgtgtcgagaaacaatcagctctgctcatcaatggcaccctcaaacactatcagctgcagggtttggaatggatggtgtctctttacaacaacaatctgaacggaatcctagccgatgagatgggactggggaagacgatccaaacaatcgccctgatcacatatctgatggaacacaagagactgaatggaccttatctaattattgtgcctctaagcacactcagcaactggacttacgaatttgacaaatgggcgccatcagttgttaaaatttcttataagggaacccccgctatgcgaagaagcctggtgccacagctgagatctggcaagttcaatgtacttttgacaacatatgagtacatcatcaaggacaagcatattcttgcgaaaatcagatggaagtatatgattgtagatgaagggcatagaatgaagaaccaccactgtaaattaacacaggtactgaacacacactacgtggccccaaggaggatcctgttgaccgggacgcctctgcagaacaaactgccagagttatgggctctcctgaacttcctgctccctacaattttcaagtcctgtagtacatttgagcagtggttcaacgcgccattcgcgatgaccggcgaacgagtcgaccttaacgaagaagagaccatcctgatcatccgcaggctacataaggtgctgcgtccttttctcctgcggcgactaaagaaagaggtcgagtcacaactgcccgagaaagtcgagtacgtaattaagtgcgatatgagcgcactgcagaagatcttatacaggcacatgcaggctaagggaatcctcctgacagacggcagcgaaaaggacaagaaaggcaaagggggagctaaaaccttgatgaatacgatcatgcaactgagaaaaatctgtaatcatccatatatgttccagcatatcgaagaatcctttgccgaacacctcggctactctaacggggtaattaacggtgctgagctgtatagggctagtggaaaattcgagcttctcgacagaattttaccaaagttgagagcaacgaatcacagagtgctgttattctgtcaaatgacatcacttatgactataatggaagattatttcgcctttcggaattttctgtacctccgtctcgacggaactacaaagtcagaggatagagcggcattgttgaagaagtttaatgagccagggagccaatactttatatttctcctttccaccagggccggtggacttgggttgaatctgcaggctgcagacacggtggtcatatttgattctgattggaatccccatcaggatctgcaggcccaggatcgtgcccatcggattgggcagcagaacgaagtgcgggtgctgcgattatgtaccgtgaattccgtggaggaaaagatcctcgccgctgctaaatataagttgaatgtggaccagaaagtgatacaagccggtatgttcgaccagaagtccagtagtcacgaaaggagggcctttttgcaggctatactggagcacgaagaagaaaatgaagaagaagatgaggtgcctgacgacgagacgcttaatcagatgattgcgagaagggaggaggagtttgatttgtttatgcggatggatatggatcggaggcgagaggacgctcggaatcctaaaagaaaacctcgcctcatggaagaggacgagctgccttcctggatcataaaagatgacgccgaggtggagaggttaacttgtgaggaggaggaggagaagattttcggaaggggatcgcggcaaagacgcgatgtggattatagcgatgctttaactgagaaacaatggttgcgggcaattgaagacggcaatctcgaagaaatggaagaggaagtgagactgaagaagcggaagcgtaggagaaacgtggacaaagaccccgctaaggaagacgtggagaaagccaagaagcggaggggacgccctccggctgagaagctgtcccccaatcctccgaagctgaccaagcagatgaatgctatcattgacacagtcattaactataaagactccagcggccgacaactttctgaagtttttattcagctgccgtcccgaaaggaactccctgaatactacgagttaattcggaaaccagtggactttaaaaaaataaaagaaagaatacggaatcacaaatatagaagtctaggagacctggagaaagacgtcatgcttctgtgtcataatgctcagacattcaacctcgaagggtctcaaatatacgaagactccattgtgctccagtctgtcttcaagagtgctcgccagaaaatcgcgaaggaagaggagagcgaggacgaaagtaacgaagaagaggaggaagaggacgaggaggaatctgagtctgaggctaagagcgtaaaagttaaaattaaactgaacaagaaagacgacaaggggagggataaggggaagggcaaaaaacgacctaatcgcggtaaggcaaaacccgtggtatccgattttgactcagacgaagaacaggacgaacgggagcagtccgagggctccgggacagacgatgagtag

SEQ ID NO: 238008 - DNA, 5703 bp, Artificial Sequence
  derived and/or modified sequence
tttctgtactctgggtgactcagagagggaagagattcagccagcacactcctcgcgagcaagcattactctactgactggcagagacaggagaggtagatgtccacgcccacagaccctggtgcgatgccccacccagggccttcgccggggcctgggccttcccctgggccaattcttgggcctagtccaggaccaggaccatccccaggttccgtccacagcatgatggggccaagtcctggacctccaagtgtctcccatcctatgccgacgatggggtccacagacttcccacaggaaggcatgcatcaaatgcataagcccatcgatggtatacatgacaaggggattgtagaagacatccattgtggatccatgaagggcactggtatgcgaccacctcacccaggcatgggccctccccagagtccaatggatcaacacagccaaggttatatgtcaccacacccatctccattaggagccccagagcacgtctccagccctatgtctggaggaggcccaactccacctcagatgccaccaagccagccgggggccctcatcccaggtgatccgcaggccatgagccagcccaacagaggtccctcacctttcagtcctgtccagctgcatcagcttcgagctcagattttagcttataaaatgctggcccgaggccagcccctccccgaaacgctgcagcttgcagtccaggggaaaaggacgttgcctggcttgcagcaacaacagcagcagcaacagcagcagcagcagcagcagcagcagcagcagcagcagcaacagcagccgcagcagcagccgccgcaaccacagacgcagcaacaacagcagccggcccttgttaactacaacagaccatctggcccggggccggagctgagcggcccgagcaccccgcagaagctgccggtgcccgcgcccggcggccggccctcgcccgcgccccccgcagccgcgcagccgcccgcggccgcagtgcccgggccctcagtgccgcagccggccccggggcagccctcgcccgtcctccagctgcagcagaagcagagccgcatcagccccatccagaaaccgcaaggcctggaccccgtggaaattctgcaagagcgggaatacagacttcaggcccgcatagctcataggatacaagaactggaaaatctgcctggctctttgccaccagatttaagaaccaaagcaaccgtggaactaaaagcacttcggttactcaatttccagcgtcagctgagacaggaggtggtggcctgcatgcgcagggacacgaccctggagacggctctcaactccaaagcatacaaacggagcaagcgccagactctgagagaagctcgcatgaccgagaagctggagaagcagcagaagattgagcaggagaggaaacgccgtcagaaacaccaggaatacctgaacagtattttgcaacatgcaaaagattttaaggaatatcatcggtctgtggccggaaagatccagaagctctccaaagcagtggcaacttggcatgccaacactgaaagagagcagaagaaggagacagagcggattgaaaaggagagaatgcggcgactgatggctgaagatgaggagggttatagaaaactgattgatcaaaagaaagacaggcgtttagcttaccttttgcagcagaccgatgagtatgtagccaatctgaccaatctggtttgggagcacaagcaagcccaggcagccaaagagaagaagaagaggaggaggaggaagaagaaggctgaggagaatgcagagggtggggagtctgccctgggaccggatggagagcccatagatgagagcagccagatgagtgacctccctgtcaaagtgactcacacagaaaccggcaaggttctgttcggaccagaagcacccaaagcaagtcagctggacgcctggctggaaatgaatcctggttatgaagttgcccctagatctgacagtgaagagagtgattctgattatgaggaagaggatgaggaagaagagtccagtaggcaggaaaccgaagagaaaatactcctggatccaaatagcgaagaagtttctgagaaggatgctaagcagatcattgagacagctaagcaagacgtggatgatgaatacagcatgcagtacagtgccaggggctcccagtcctactacaccgtggctcatgccatctcggagagggtggagaaacagtctgccctcctaattaatgggaccctaaagcattaccagctccagggcctggaatggatggtttccctgtataataacaacttgaacggaatcttagccgatgaaatggggcttggaaagaccatacagaccattgcactcatcacttatctgatggagcacaaaagactcaatggcccctatctcatcattgttcccctttcgactctatctaactggacatatgaatttgacaaatgggctccttctgtggtgaagatttcttacaagggtactcctgccatgcgtcgctcccttgtcccccagctacggagtggcaaattcaatgtcctcttgactacttatgagtatattataaaagacaagcacattcttgcaaagattcggtggaaatacatgatagtggacgaaggccaccgaatgaagaatcaccactgcaagctgactcaggtcttgaacactcactatgtggcccccagaaggatcctcttgactgggaccccgctgcagaataagctccctgaactctgggccctcctcaacttcctcctcccaacaatttttaagagctgcagcacatttgaacaatggttcaatgctccatttgccatgactggtgaaagggtggacttaaatgaagaagaaactatattgatcatcaggcgtctacataaggtgttaagaccatttttactaaggagactgaagaaagaagttgaatcccagcttcccgaaaaagtggaatatgtgatcaagtgtgacatgtcagctctgcagaagattctgtatcgccatatgcaagccaaggggatccttctcacagatggttctgagaaagataagaaggggaaaggaggtgctaagacacttatgaacactattatgcagttgagaaaaatctgcaaccacccatatatgtttcagcacattgaggaatcctttgctgaacacctaggctattcaaatggggtcatcaatggggctgaactgtatcgggcctcagggaagtttgagctgcttgatcgtattctgccaaaattgagagcgactaatcaccgagtgctgcttttctgccagatgacatctctcatgaccatcatggaggattattttgcttttcggaacttcctttacctacgccttgatggcaccaccaagtctgaagatcgtgctgctttgctgaagaaattcaatgaacctggatcccagtatttcattttcttgctgagcacaagagctggtggcctgggcttaaatcttcaggcagctgatacagtggtcatctttgacagcgactggaatcctcatcaggatctgcaggcccaagaccgagctcaccgcatcgggcagcagaacgaggtccgggtactgaggctctgtaccgtgaacagcgtggaggaaaagatcctcgcggccgcaaaatacaagctgaacgtggatcagaaagtgatccaggcgggcatgtttgaccaaaagtcttcaagccacgagcggagggcattcctgcaggccatcttggagcatgaggaggaaaatgaggaagaagatgaagtaccggacgatgagactctgaaccaaatgattgctcgacgagaagaagaatttgacctttttatgcggatggacatggaccggcggagggaagatgcccggaacccgaaacggaagccccgtttaatggaggaggatgagctgccctcctggatcattaaggatgacgctgaagtagaaaggctcacctgtgaagaagaggaggagaaaatatttgggagggggtcccgccagcgccgtgacgtggactacagtgacgccctcacggagaagcagtggctaagggccatcgaagacggcaatttggaggaaatggaagaggaagtacggcttaagaagcgaaaaagacgaagaaatgtggataaagatcctgcaaaagaagatgtggaaaaagctaagaagagaagaggccgccctcccgctgagaaactgtcaccaaatccccccaaactgacaaagcagatgaacgctatcatcgatactgtgataaactacaaagatagttcagggcgacagctcagtgaagtcttcattcagttaccttcaaggaaagaattaccagaatactatgaattaattaggaagccagtggatttcaaaaaaataaaggaaaggattcgtaatcataagtaccggagcctaggcgacctggagaaggatgtcatgcttctctgtcacaacgctcagacgttcaacctggagggatcccagatctatgaagactccatcgtcttacagtcagtgtttaagagtgcccggcagaaaattgccaaagaggaagagagtgaggatgaaagcaatgaagaggaggaagaggaagatgaagaagagtcagagtccgaggcaaaatcagtcaaggtgaaaattaagctcaataaaaaagatgacaaaggccgggacaaagggaaaggcaagaaaaggccaaatcgaggaaaagccaaacctgtagtgagcgattttgacagcgatgaggagcaggatgaacgtgaacagtcagaaggaagtgggacggatgatgagtgatcagtatggacctttttccttggtagaactgaattccttcctcccctgtctcatttctacccagtgagttcatttgtcatataggcactgggttgtttctatatcatcatcgtctataaactagctttaggatagtgccagacaaacatatgatatcatggtgtaaaaaacacacacatacacaaatatttgtaacatattgtgaccaaatgggcctcaaagattcagattgaaacaaacaaaaagcttttgatggaaaatatgtgggtggatagtatatttctatgggtgggtctaatttggtaacggtttgattgtgcctggttttatcacctgttcagatgagaagatttttgtcttttgtagcactgataaccaggagaagccattaaaagccactggttattttatttttcatcaggcaattttcgaggtttttatttgttcggtattgtttttttacactgtggtacatataagcaactttaataggtgataaatgtacagtagttagatttcacctgcatatacatttttccattttatgctctatgatctgaacaaaagctttttgaattgtataagatttatgtctactgtaaacattgcttaatttttttgctcttgatttaaaaaaaagttttgttgaaagcgctattgaatattgcaatctatatagtgtattggatggcttcttttgtcaccctgatctcctatgttaccaatgtgtatcgtctccttctccctaaagtgtacttaatctttgctttctttgcacaatgtctttggttgcaagtcataagcctgaggcaaataaaattccagtaatttcgaagaatgtggtgttggtgctttcctaataaagaaataatttagcttgacaaa

SEQ ID NO: 238009 - DNA, 1347 bp, Artificial Sequence
  derived and/or modified sequence
ggccgccctcccgctgagaaactgtcaccaaatccccccaaactgacaaagcagatgaacgctatcatcgatactgtgataaactacaaagataggaaaggattcgtaatcataagtaccggagcctaggcgacctggagaaggatgtcatgcttctctgtcacaacgctcagacgttcaacctggagggatcccagatctatgaagactccatcgtcttacagtcagtgtttaagagtgcccggcagaaaattgccaaagaggaagagagtgaggatgaaagcaatgaagaggaggaagaggaagatgaagaagagtcagagtccgaggcaaaatcagtcaaggtgaaaattaagctcaataaaaaagatgacaaaggccgggacaaagggaaaggcaagaaaaggccaaatcgaggaaaagccaaacctgtagtgagcgattttgacagcgatgaggagcaggatgaacgtgaacagtcagaaggaagtgggacggatgatgagtgatcagtatggacctttttccttggtagaactgaattccttcctcccctgtctcatttctacccagtgagttcatttgtcatataggcactgggttgtttctatatcatcatcgtctataaactagctttaggatagtgccagacaaacatatgatatcatggtgtaaaaaacacacacatacacaaatatttgtaacatattgtgaccaaatgggcctcaaagattcagattgaaacaaacaaaaagcttttgatggaaaatatgtgggtggatagtatatttctatgggtgggtctaatttggtaacggtttgattgtgcctggttttatcacctgttcagatgagaagatttttgtcttttgtagcactgataaccaggagaagccattaaaagccactggttattttatttttcatcaggcaattttcgaggtttttatttgttcggtattgtttttttacactgtggtacatataagcaactttaataggtgataaatgtacagtagttagatttcacctgcatatacatttttccattttatgctctatgatctgaacaaaagctttttgaattgtataagatttatgtctactgtaaacattgcttaatttttttgctcttgatttaaaaaaaagttttgttgaaagcgctattgaatattgcaatctatatagtgtattggatggcttcttttgtcaccctgatctcctatgttaccaatgtgtatcgtctccttctccctaaagtgtacttaatctttgctttctttgcacaatgtctttggttgcaagtcataagcctgaggcaaataaaattccagtaatttcgaagaa

SEQ ID NO: 238010 - DNA, 5561 bp, Artificial Sequence
  derived and/or modified sequence
gtagatgtccacgcccacagaccctggtgcgatgccccacccagggccttcgccggggcctgggccttcccctgggccaattcttgggcctagtccaggaccaggaccatccccaggttccgtccacagcatgatggggccaagtcctggacctccaagtgtctcccatcctatgccgacgatggggtccacagacttcccacaggaaggcatgcatcaaatgcataagcccatcgatggtatacatgacaaggggattgtagaagacatccattgtggatccatgaagggcactggtatgcgaccacctcacccaggcatgggccctccccagagtccaatggatcaacacagccaaggttatatgtcaccacacccatctccattaggagccccagagcacgtctccagccctatgtctggaggaggcccaactccacctcagatgccaccaagccagccgggggccctcatcccaggtgatccgcaggccatgagccagcccaacagaggtccctcacctttcagtcctgtccagctgcatcagcttcgagctcagattttagcttataaaatgctggcccgaggccagcccctccccgaaacgctgcagcttgcagtccaggggaaaaggacgttgcctggcttgcagcaacaacagcagcagcaacagcagcagcagcagcagcagcagcagcagcagcagcagcaacagcagccgcagcagcagccgccgcaaccacagacgcagcaacaacagcagccggcccttgttaactacaacagaccatctggcccggggccggagctgagcggcccgagcaccccgcagaagctgccggtgcccgcgcccggcggccggccctcgcccgcgccccccgcagccgcgcagccgcccgcggccgcagtgcccgggccctcagtgccgcagccggccccggggcagccctcgcccgtcctccagctgcagcagaagcagagccgcatcagccccatccagaaaccgcaaggcctggaccccgtggaaattctgcaagagcgggaatacagacttcaggcccgcatagctcataggatacaagaactggaaaatctgcctggctctttgccaccagatttaagaaccaaagcaaccgtggaactaaaagcacttcggttactcaatttccagcgtcagctgagacaggaggtggtggcctgcatgcgcagggacacgaccctggagacggctctcaactccaaagcatacaaacggagcaagcgccagactctgagagaagctcgcatgaccgagaagctggagaagcagcagaagattgagcaggagaggaaacgccgtcagaaacaccaggaatacctgaacagtattttgcaacatgcaaaagattttaaggaatatcatcggtctgtggccggaaagatccagaagctctccaaagcagtggcaacttggcatgccaacactgaaagagagcagaagaaggagacagagcggattgaaaaggagagaatgcggcgactgatggctgaagatgaggagggttatagaaaactgattgatcaaaagaaagacaggcgtttagcttaccttttgcagcagaccgatgagtatgtagccaatctgaccaatctggtttgggagcacaagcaagcccaggcagccaaagagaagaagaagaggaggaggaggaagaagaaggctgaggagaatgcagagggtggggagtctgccctgggaccggatggagagcccatagatgagagcagccagatgagtgacctccctgtcaaagtgactcacacagaaaccggcaaggttctgttcggaccagaagcacccaaagcaagtcagctggacgcctggctggaaatgaatcctggttatgaagttgcccctagatctgacagtgaagagagtgattctgattatgaggaagaggatgaggaagaagagtccagtaggcaggaaaccgaagagaaaatactcctggatccaaatagcgaagaagtttctgagaaggatgctaagcagatcattgagacagctaagcaagacgtggatgatgaatacagcatgcagtacagtgccaggggctcccagtcctactacaccgtggctcatgccatctcggagagggtggagaaacagtctgccctcctaattaatgggaccctaaagcattaccagctccagggcctggaatggatggtttccctgtataataacaacttgaacggaatcttagccgatgaaatggggcttggaaagaccatacagaccattgcactcatcacttatctgatggagcacaaaagactcaatggcccctatctcatcattgttcccctttcgactctatctaactggacatatgaatttgacaaatgggctccttctgtggtgaagatttcttacaagggtactcctgccatgcgtcgctcccttgtcccccagctacggagtggcaaattcaatgtcctcttgactacttatgagtatattataaaagacaagcacattcttgcaaagattcggtggaaatacatgatagtggacgaaggccaccgaatgaagaatcaccactgcaagctgactcaggtcttgaacactcactatgtggcccccagaaggatcctcttgactgggaccccgctgcagaataagctccctgaactctgggccctcctcaacttcctcctcccaacaatttttaagagctgcagcacatttgaacaatggttcaatgctccatttgccatgactggtgaaagggtggacttaaatgaagaagaaactatattgatcatcaggcgtctacataaggtgttaagaccatttttactaaggagactgaagaaagaagttgaatcccagcttcccgaaaaagtggaatatgtgatcaagtgtgacatgtcagctctgcagaagattctgtatcgccatatgcaagccaaggggatccttctcacagatggttctgagaaagataagaaggggaaaggaggtgctaagacacttatgaacactattatgcagttgagaaaaatctgcaaccacccatatatgtttcagcacattgaggaatcctttgctgaacacctaggctattcaaatggggtcatcaatggggctgaactgtatcgggcctcagggaagtttgagctgcttgatcgtattctgccaaaattgagagcgactaatcaccgagtgctgcttttctgccagatgacatctctcatgaccatcatggaggattattttgcttttcggaacttcctttacctacgccttgatggcaccaccaagtctgaagatcgtgctgctttgctgaagaaattcaatgaacctggatcccagtatttcattttcttgctgagcacaagagctggtggcctgggcttaaatcttcaggcagctgatacagtggtcatctttgacagcgactggaatcctcatcaggatctgcaggcccaagaccgagctcaccgcatcgggcagcagaacgaggtccgggtactgaggctctgtaccgtgaacagcgtggaggaaaagatcctcgcggccgcaaaatacaagctgaacgtggatcagaaagtgatccaggcgggcatgtttgaccaaaagtcttcaagccacgagcggagggcattcctgcaggccatcttggagcatgaggaggaaaatgaggaagaagatgaagtaccggacgatgagactctgaaccaaatgattgctcgacgagaagaagaatttgacctttttatgcggatggacatggaccggcggagggaagatgcccggaacccgaaacggaagccccgtttaatggaggaggatgagctgccctcctggatcattaaggatgacgctgaagtagaaaggctcacctgtgaagaagaggaggagaaaatatttgggagggggtcccgccagcgccgtgacgtggactacagtgacgccctcacggagaagcagtggctaagggccatcgaagacggcaatttggaggaaatggaagaggaagtacggcttaagaagcgaaaaagacgaagaaatgtggataaagatcctgcaaaagaagatgtggaaaaagctaagaagagaagaggccgccctcccgctgagaaactgtcaccaaatccccccaaactgacaaagcagatgaacgctatcatcgatactgtgataaactacaaagatagttcagggcgacagctcagtgaagtcttcattcagttaccttcaaggaaagaattaccagaatactatgaattaattaggaagccagtggatttcaaaaaaataaaggaaaggattcgtaatcataagtaccggagcctaggcgacctggagaaggatgtcatgcttctctgtcacaacgctcagacgttcaacctggagggatcccagatctatgaagactccatcgtcttacagtcagtgtttaagagtgcccggcagaaaattgccaaagaggaagagagtgaggatgaaagcaatgaagaggaggaagaggaagatgaagaagagtcagagtccgaggcaaaatcagtcaaggtgaaaattaagctcaataaaaaagatgacaaaggccgggacaaagggaaaggcaagaaaaggccaaatcgaggaaaagccaaacctgtagtgagcgattttgacagcgatgaggagcaggatgaacgtgaacagtcagaaggaagtgggacggatgatgagtgatcagtatggacctttttccttggtagaactgaattccttcctcccctgtctcatttctacccagtgagttcatttgtcatataggcactgggttgtttctatatcatcatcgtctataaactagctttaggatagtgccagacaaacatatgatatcatggtgtaaaaaacacacacatacacaaatatttgtaacatattgtgaccaaatgggcctcaaagattcagattgaaacaaacaaaaagcttttgatggaaaatatgtgggtggatagtatatttctatgggtgggtctaatttggtaacggtttgattgtgcctggttttatcacctgttcagatgagaagatttttgtcttttgtagcactgataaccaggagaagccattaaaagccactggttattttatttttcatcaggcaattttcgaggtttttatttgttcggtattgtttttttacactgtggtacatataagcaactttaataggtgataaatgtacagtagttagatttcacctgcatatacatttttccattttatgctctatgatctgaacaaaagctttttgaattgtataagatttatgtctactgtaaacattgcttaatttttttgctcttgatttaaaaaaaagttttgttgaaagcgctattgaatattgcaatctatatagtgtattggatggcttcttttgtcaccctgatctcctatgttaccaatgtgtatcgtctccttctccctaaagtgtacttaatctttgctttctttgcacaatgtctttggttgcaagtcataagcctgaggcaaataaaattccagtaatttcgaagaa

SEQ ID NO: 238011 - protein, 950 aa, Artificial Sequence
  derived and/or modified sequence
MLLLGILTLAFAGRTAGGSEPEREVVVPIRLDPDINGRRYYWRGPEDSGDQGLIFQITAFQEDFYLHLTPDAQFLAPAFSTEHLGVPLQGLTGGSSDLRRCFYSGDVNAEPDSFAAVSLCGGLRGAFGYRGAEYVISPLPNASAPAAQRNSQGAHLLQRRGVPGGPSGDPTSRCGVASGWNPAILRALDPYKPRRAGFGESRSRRRSGRAKRFVSIPRYVETLVVADESMVKFHGADLEHYLLTLLATAARLYRHPSILNPINIVVVKVLLLRDRDSGPKVTGNAALTLRNFCAWQKKLNKVSDKHPEYWDTAILFTRQDLCGATTCDTLGMADVGTMCDPKRSCSVIEDDGLPSAFTTAHELGHVFNMPHDNVKVCEEVFGKLRANHMMSPTLIQIDRANPWSACSAAIITDFLDSGHGDCLLDQPSKPISLPEDLPGASYTLSQQCELAFGVGSKPCPYMQYCTKLWCTGKAKGQMVCQTRHFPWADGTSCGEGKLCLKGACVERHNLNKHRVDGSWAKWDPYGPCSRTCGGGVQLARRQCTNPTPANGGKYCEGVRVKYRSCNLEPCPSSASGKSFREEQCEAFNGYNHSTNRLTLAVAWVPKYSGVSPRDKCKLICRANGTGYFYVLAPKVVDGTLCSPDSTSVCVQGKCIKAGCDGNLGSKKRFDKCGVCGGDNKSCKKVTGLFTKPMHGYNFVVAIPAGASSIDIRQRGYKGLIGDDNYLALKNSQGKYLLNGHFVVSAVERDLVVKGSLLRYSGTGTAVESLQASRPILEPLTVEVLSVGKMTPPRVRYSFYLPKEPREDKSSHPKDPRGPSVLHNSVLSLSNQVEQPDDRPPARWVAGSWGPCSASCGSGLQKRAVDCRGSAGQRTVPACDAAHRPVETQACGEPCPTWELSAWSPCSKSCGRGFQRRSLKCVGHGGRLLARDQCNLHRKPQELDFCVLRPC

SEQ ID NO: 238012 - DNA, 2853 bp, Artificial Sequence
  derived and/or modified sequence
atgcttctgctgggtatcctgacccttgcttttgctggcagaaccgcgggaggttccgaacccgagagggaggtcgtcgtgccaatccgcctggatccagacataaacgggcgacgctattactggagaggccctgaggacagtggcgatcaggggctgatctttcagatcactgcatttcaggaggatttttaccttcatcttacccccgatgcccagttcctggctcctgcattctcaacagaacacttgggagtccccctccaggggctgactggaggttcaagcgacctgcggcgatgcttctattcaggggatgtgaacgctgagcccgactcatttgctgctgtttccctgtgcggaggcctacgtggagctttcgggtaccggggagccgaatacgtcatcagtcccctccccaacgcttcagctcccgcagctcagcggaacagccagggcgcacacctgctgcagaggcgtggcgtccctggagggccttcgggcgaccctacgtctagatgtggggtagcaagcggctggaatcccgctattctacgcgcattagacccttacaaacctagacgagctggcttcggggagtcgcgctcaaggcggagatccgggagggccaagaggttcgtgtccattccaaggtacgtcgagacgctagtggtggccgatgagagcatggttaagtttcacggcgctgacctggagcactatctgctgaccctgctggctacagccgcacgactctaccgccacccctctatccttaatcccataaacattgtcgtggtgaaggtgctgcttttgcgagacagagactcgggacctaaggtgaccggaaatgccgctttaaccctgcggaacttttgcgcatggcagaagaagctgaacaaggtttccgataagcacccagagtactgggatacggcaatactgtttacgcgccaagacctgtgcggagccaccacctgcgatacactgggcatggctgatgtcgggaccatgtgcgatccaaagcgcagctgttccgtgatagaggacgacggactcccaagtgcatttactaccgcccacgagctcggacatgtatttaacatgcctcacgacaatgtgaaagtctgcgaagaggtcttcggaaagcttagggcgaaccacatgatgtctccaacgctgattcaaattgatagggccaacccatggagtgcatgtagcgcagcaattatcactgactttctcgatagcggacacggggattgcctgctagatcaaccatctaagcctatttctctgccagaagatctgccgggtgcctcgtataccttgtctcaacaatgtgagctcgcttttggcgtgggcagcaaaccttgtccgtatatgcaatactgtacgaagctttggtgtacagggaaagccaaagggcagatggtctgccagacacggcatttcccctgggcagatggtacatcatgcggagagggcaagctttgtcttaagggcgcttgcgttgagagacataatctgaacaagcatagggtggatggatcctgggccaaatgggacccctacggcccatgttcacgtacctgcggcggtggagtgcagctggcccgacggcagtgtacgaatccgaccccagccaacggtggtaaatattgcgagggagtccgcgtgaagtatcgtagctgtaatttggaaccttgcccctcttcagcctcaggaaaaagctttcgtgaggagcaatgtgaggccttcaacggatacaatcacagtaccaatcgcctcaccctggcagtggcctgggtgcccaagtactcgggagtttcgccacgggacaagtgcaaattgatctgtagagccaacgggacgggttatttctacgtgttggccccaaaggtagttgacgggacactatgttctcctgacagcacttctgtctgcgtgcaaggaaagtgcataaaagcaggatgtgacgggaacttaggcagtaagaagagattcgacaagtgtggggtctgtggaggcgacaataaatcttgtaagaaagtaaccggcctgtttactaaacctatgcacgggtacaatttcgtagtggccattcctgccggagccagttctattgacatccggcagcgcggatataaggggttaattggagacgacaattacctggccttgaagaatagtcagggcaaatacctactgaatggccattttgtggtttctgctgtcgagcgcgatctcgttgtcaagggttccttactgcgttatagcggtacaggcaccgctgtcgagtctctccaagctagcagaccgattttagaaccactgacagtcgaagtcctgtccgttggaaagatgacacctcccagggtgcggtacagcttttatcttccaaaagaaccacgcgaagataagtccagtcacccgaaagatcctagaggaccctctgttttgcataattctgtgttgagtctttccaaccaagtggagcagcctgatgacagacctcctgccagatgggtggcagggtcgtggggcccatgctcagcttcctgcggatcaggcctgcagaaacgggcagtggactgcaggggatccgcaggtcagcgtacagtccctgcttgcgatgcggctcatagaccagtagagacccaggcttgcggcgaaccttgcccaacctgggaactcagcgcctggtccccgtgttcaaaaagctgcgggagaggctttcagcggagatctttaaagtgtgttgggcacggcggtcggctgctggcaagggatcagtgtaacctgcaccgcaaaccccaggagcttgatttctgcgtgctcaggccttgctag

SEQ ID NO: 238013 - DNA, 2853 bp, Artificial Sequence
  derived and/or modified sequence
atgctgctgcttggcattctgaccctggcttttgccggtagaacggcgggaggaagcgagcccgaacgggaagtcgtagtgcctattaggttggaccctgacatcaatggtcgccgatattactggcgaggtcctgaggatagcggggatcaaggattaatcttccaaattaccgccttccaagaggatttctacctgcatctgactcctgacgctcagtttctagcaccagcattttctaccgagcacctgggcgtacctctgcagggactgacgggcggcagcagcgacctccgacgttgcttctattcaggagacgtgaacgccgagccagattcctttgctgccgtgagtctgtgtggaggactccggggcgccttcgggtaccgcggagccgagtatgtcatttcacctttacctaatgccagcgcccccgctgcccaacgtaactcccagggcgcacatttgctccagagacgtggtgtgcccgggggccctagcggagaccccacaagtcgctgtggcgtggcttcaggttggaacccagcaattctgagagctctggacccttacaaacctcggcgtgctggcttcggtgaaagtagatcacgaagacgcagcggacgggccaagagatttgtgtcaattcctaggtacgttgaaactttggtcgtggcagacgagagcatggtgaagttccatggcgccgatctcgagcattacctactgacactgttagccaccgctgcgagactctatagacacccttccatcttaaatcctattaacatcgtagttgtcaaagtgctactacttagggaccgcgattcaggccccaaggtgactggaaatgccgccttgaccctgagaaatttttgcgcatggcagaagaagctgaataaagtgagcgacaaacacccagagtattgggacacagcaattctgtttacccggcaggacctgtgcggcgccaccacctgcgacactctgggcatggctgacgtaggaactatgtgcgatcctaaacgttcgtgctccgtgatcgaagatgatgggctgccaagtgcgtttaccactgcccacgagttgggacatgtgtttaacatgcctcacgataatgtcaaggtgtgcgaggaggtgtttgggaagctgagagcaaatcacatgatgtcgcccaccttaatccagatcgatcgggccaatccatggagcgcgtgtagcgccgctataattacagacttcctagacagcgggcatggcgattgcctgctcgaccagcccagcaagccaatatctttgccagaggatctgcctggagcctcttataccttaagccagcagtgtgagctggcatttggcgtgggtagtaagccctgcccgtacatgcagtattgcactaaattgtggtgcaccgggaaggctaaggggcagatggtttgtcagacccgtcattttccttgggccgatgggacgagttgtggcgagggtaaattatgcctcaagggtgcttgtgtcgaacggcataaccttaataaacaccgcgtggacggatcttgggctaaatgggatccctacggcccgtgtagcagaacttgcggggggggcgtgcaattggccagaagacaatgcaccaatccaactcccgcaaatgggggcaagtattgtgagggtgtacgtgttaaatatcgaagttgtaatctggagccctgccctagctctgcatcagggaaaagtttccgcgaagaacaatgcgaagcctttaatggatataaccactcaactaaccgacttactctggcagtggcgtgggtacccaaatatagcggagtcagcccccgcgataaatgtaaactcatctgccgtgctaacggcactggctacttttatgtgctagccccaaaagtggttgatggcacactgtgctctcctgattccaccagcgtttgtgtacagggaaagtgtatcaaggctggttgtgatggcaaccttggaagcaagaaaaggtttgacaagtgcggcgtgtgcggaggggataataaatcgtgcaaaaaggtcacaggccttttcacgaaacctatgcacggctataacttcgtggtagcgattcctgctggggccagttctatcgatattcgtcagcgcgggtacaagggattgattggagatgataactacctagccctgaaaaattcccagggtaaatacctgcttaacggccattttgtggtttctgccgtagagcgggacttagtcgtcaaaggcagcctccttcggtacagtggtacaggaaccgcagtggagtctctacaggctagccgacccatcttggaaccccttacagtcgaggtgctctctgtgggtaagatgactccaccgagagtgcgctattccttctatctgccaaaggaacctcgtgaagataagagctcacacccaaaagacccaagaggtccctcagtactccacaactctgtcctgagcctttcaaatcaggtggagcaacctgatgacagacccccggcccgctgggtggcaggttcatggggcccttgctctgcctcctgcggatcaggtttacaaaagcgggctgtagattgccgaggcagcgccggccagaggactgttccagcatgcgatgcagcccaccggcctgtggaaactcaggcctgtggagaaccatgccctacatgggaattaagcgcttggtctccctgcagcaagtcctgtggccgtggctttcagcggcggagtcttaaatgcgtcggacacggcggacgactgctcgctcgagaccagtgcaaccttcacaggaagccacaagagctagacttttgcgttttacgaccgtgctag

SEQ ID NO: 238014 - DNA, 2853 bp, Artificial Sequence
  derived and/or modified sequence
atgctgctccttggaatactgactctagcgttcgctggacggacggctggaggatccgagcccgagcgtgaagttgttgtcccaattcggctcgatccggatattaacggcagacgctactactggagaggtccagaagattctggggaccaagggctaatctttcagataaccgctttccaggaggacttctacctccacctcaccccagacgcacagtttcttgctcctgcttttagcaccgaacatttgggggtaccactgcaaggattgacgggtggcagttccgatttgagaaggtgtttttattctggtgacgtgaacgcagagcctgactcattcgccgccgtctccctttgcggtggtctcagaggggcctttgggtaccgcggtgctgagtatgttatcagccctctgccaaatgcctcggcccccgccgcccagcgcaactcccagggtgcccatctcctacagcgacgaggtgttccaggcgggccatcaggcgatccaactagccgctgtggcgtcgcatccgggtggaaccccgcaattttaagagccctagatccatacaaaccccggcgcgccggcttcggagagagtaggagccgcaggcgttcgggacgagccaaaaggtttgtgtctatcccccgctacgtagaaacactggtggtagcggacgaatccatggtaaagtttcacggcgcagacctcgaacactaccttttaaccttactggccactgcagccagactgtaccgccacccgtcaatcctcaaccccattaatatcgtggtcgtcaaagtgctcctgttaagggaccgggactctggaccaaaggtaactggcaatgcagcactgactctgcgaaacttctgtgcctggcagaaaaaactgaacaaagtgagtgacaagcaccctgagtactgggacacagcgatcctgtttacgagacaagacttgtgtggagccacaacatgcgacactcttggcatggcagacgtcggaaccatgtgcgatccaaaacgctcttgttcagtaattgaagatgatggactccccagtgcgttcacaaccgctcatgaacttggtcacgtgttcaacatgccccacgataacgttaaagtttgcgaggaggtgtttggaaaactccgtgctaaccatatgatgtctcctactctcattcagattgatcgtgccaatccttggtcagcatgcagtgcagcaatcattactgattttctcgatagcgggcacggagattgtctgcttgaccaacctagcaagccgatatccctccctgaagatctgcccggagccagctataccttgtcccagcagtgcgagttagctttcggagttggatcaaaaccttgcccttacatgcaatactgtacaaaactgtggtgcacgggaaaggcaaaaggccaaatggtttgtcagaccagacatttcccctgggccgatggtactagttgtggcgaagggaagttatgcttgaagggtgcttgtgtcgaacggcataaccttaataaacaccgcgtggacggatcttgggctaaatgggatccctacggcccgtgtagcagaacttgcggggggggcgtgcaattggccagaagacaatgcaccaatccaactcccgcaaatgggggcaagtattgtgagggtgtacgtgttaaatatcgaagttgtaatctggagccctgccctagctctgcatcagggaaaagtttccgcgaagaacaatgcgaagcctttaatggatataaccactcaactaaccgacttactctggcagtggcatgggtacctaaatactcaggagtcagcccgcgggacaaatgcaaactgatctgtagagcaaatgggacaggctatttttacgttctggctccgaaagtcgtggatggaaccctgtgttcccccgactctactagtgtgtgcgttcaggggaagtgcatcaaggccggctgcgacggtaatctcggctctaaaaaaagattcgataaatgcggcgtctgcggaggggataacaagtcatgtaaaaaggtgaccgggctgttcaccaaaccaatgcatgggtataactttgttgtggctatccctgcgggagcgtcgtcaattgatatcagacagaggggatacaagggactcattggcgatgacaactatttggctctgaaaaatagccaagggaagtacctgctgaacggccactttgtcgtttccgccgttgaaagagacttagtagttaagggatcattgctgcggtattctggtacaggcaccgctgtcgaatctcttcaggcttcaagacctatcttagaacctctcactgttgaagtcctctcagtgggcaaaatgacccctccacgcgtgcgatattcattctaccttccgaaagagccccgtgaggataaatcttcccacccaaaagacccgagaggtcccagcgtcttacataactccgtgttatcattatccaatcaagtagagcagccagacgacaggccccctgcccgttgggtggccgggagctggggaccctgtagcgcctcatgtggctccggtctccagaaacgagcagtggactgtaggggaagtgcaggccaacgcaccgtccctgcttgcgacgccgcgcatcgtcccgttgaaacacaagcttgtggtgaaccttgtcctacttgggaattatcagcatggtcaccctgtagtaaatcttgtggacggggctttcagcggagatccctcaagtgcgtcggacacggaggcagactcctcgccagagaccaatgcaatctacaccgtaagcctcaggaactcgacttttgtgtgctacgcccttgttag

SEQ ID NO: 238015 - DNA, 5669 bp, Artificial Sequence
  derived and/or modified sequence
atgcttctgctgggcatcctaaccctggctttcgccgggcgaaccgctggaggctctgagccagagcgggaggtagtcgttcccatccgactggacccggacattaacggccgccgctactactggcggggtcccgaggactccggggatcagggactcatttttcagatcacagcatttcaggaggacttttacctacacctgacgccggatgctcagttcttggctcccgccttctccactgagcatctgggcgtccccctccaggggctcaccgggggctcttcagacctgcgacgctgcttctattctggggacgtgaacgccgagccggactcgttcgctgctgtgagcctgtgcggggggctccgcggagcctttggctaccgaggcgccgagtatgtcattagcccgctgcccaatgctagcgcgccggcggcgcagcgcaacagccagggcgcacaccttctccagcgccggggtgttccgggcgggccttccggagaccccacctctcgctgcggggtggcctcgggctggaaccccgccatcctacgggccctggacccttacaagccgcggcgggcgggcttcggggagagtcgtagccggcgcaggtctgggcgcgccaagcgtttcgtgtctatcccgcggtacgtggagacgctggtggtcgcggacgagtcaatggtcaagttccacggcgcggacctggaacattatctgctgacgctgctggcaacggcggcgcgactctaccgccatcccagcatcctcaaccccatcaacatcgttgtggtcaaggtgctgcttcttagagatcgtgactccgggcccaaggtcaccggcaatgcggccctgacgctgcgcaacttctgtgcctggcagaagaagctgaacaaagtgagtgacaagcaccccgagtactgggacactgccatcctcttcaccaggcaggacctgtgtggagccaccacctgtgacaccctgggcatggctgatgtgggtaccatgtgtgaccccaagagaagctgctctgtcattgaggacgatgggcttccatcagccttcaccactgcccacgagctgggccacgtgttcaacatgccccatgacaatgtgaaagtctgtgaggaggtgtttgggaagctccgagccaaccacatgatgtccccgaccctcatccagatcgaccgtgccaacccctggtcagcctgcagtgctgccatcatcaccgacttcctggacagcgggcacggtgactgcctcctggaccaacccagcaagcccatctccctgcccgaggatctgccgggcgccagctacaccctgagccagcagtgcgagctggcttttggcgtgggctccaagccctgtccttacatgcagtactgcaccaagctgtggtgcaccgggaaggccaagggacagatggtgtgccagacccgccacttcccctgggccgatggcaccagctgtggcgagggcaagctctgcctcaaaggggcctgcgtggagagacacaacctcaacaagcacagggtggatggttcctgggccaaatgggatccctatggcccctgctcgcgcacatgtggtgggggcgtgcagctggccaggaggcagtgcaccaaccccacccctgccaacgggggcaagtactgcgagggagtgagggtgaaataccgatcctgcaatctggagccctgccccagctcagcctccggaaagagcttccgggaggagcagtgtgaggctttcaacggctacaaccacagcaccaaccggctcactctcgccgtggcatgggtgcccaagtactccggcgtgtctccccgggacaagtgcaagctcatctgccgagccaatggcactggctacttctatgtgctggcacccaaggtggtggacggcacgctgtgctctcctgactccacctccgtctgtgtccaaggcaagtgcatcaaggctggctgtgatgggaacctgggctccaagaagagattcgacaagtgtggggtgtgtgggggagacaataagagctgcaagaaggtgactggactcttcaccaagcccatgcatggctacaatttcgtggtggccatccccgcaggcgcctcaagcatcgacatccgccagcgcggttacaaagggctgatcggggatgacaactacctggctctgaagaacagccaaggcaagtacctgctcaacgggcatttcgtggtgtcggcggtggagcgggacctggtggtgaagggcagtctgctgcggtacagcggcacgggcacagcggtggagagcctgcaggcttcccggcccatcctggagccgctgaccgtggaggtcctctccgtggggaagatgacaccgccccgggtccgctactccttctatctgcccaaagagcctcgggaggacaagtcctctcatcccaaggacccccggggaccctctgtcttgcacaacagcgtcctcagcctctccaaccaggtggagcagccggacgacaggccccctgcacgctgggtggctggcagctgggggccgtgctccgcgagctgcggcagtggcctgcagaagcgggcggtggactgccggggctccgccgggcagcgcacggtccctgcctgtgatgcagcccatcggcccgtggagacacaagcctgcggggagccctgccccacctgggagctcagcgcctggtcaccctgctccaagagctgcggccggggatttcagaggcgctcactcaagtgtgtgggccacggaggccggctgctggcccgggaccagtgcaacttgcaccgcaagccccaggagctggacttctgcgtcctgaggccgtgctgagtggggtcatcgctttctccccctcactctccaccccactgatatgccagcgttctgccagctggagtagcgggcagaggacggtggccaggggctcacgccacgatgtcacccacatccggggacaaggaccatgggctggggcgagaggttccctcctcctccctggactgggcagagggaagcccaggaactcccgcacagtctacctcaggccccgctcctcgggccggttgcggggagaggctttgaggtgcagggcagaaggtgctgaggcccagtttccaaggaacttggaggatgggcaccttccaggcagaacttcagggaccccggcccccagaacggaggccacaggctgctggaagagccatgtcccagcagcttggcaccctcaggtggccccatgggctctgagccgtgtctgaacgaggcagggttttcacggtgcttttagcccactttcctttttgaactgacatggactaagcaataaaagctggctggggctgggcagaagccacggggagagtgagattagggcccctggagcctggcactccaccttggaagacgtggacgtgcacagggagtcccgaggtttctcatcctgcactcttggccctcctataaagaagcagcctctccttcctctgatgtgcagggtgtaggactagtggtagggctgccacggaagtgtcctctgaggctctgcaggtagcggggaaagccagtagggagtctgctgtcttcttcaagatggagccggccattacagaaagatgttgacatttgctaggggctatgcagtctgtggctgatgcagggagttttcagaaagttctggagggttctgctgtcactggactggggttggtgctgagctctgggcctggctttgggagatgtcaccctgggatagggaggaggaagctgcatttctaatggcttcctcctccagagaggcacgtatatgcaggctgacatccgagggtctgtgtcgcctcagacagccctgacagtggccacagtcccgtacccattgtgaggggctggggcatgcctaggagggctaggtgctgaacatctatgtgcctataaactcgtcttcgttccaaacagctactgctgtctgccctgggcacgtcacgttgcatcctaggccttagcttctccactgtttgctacctcagattatgccctctgggaacccagccgtatccctcccctaggacagtggtgacctggtccttccaccacactcagtctttggagagcgagctgtccagccacagaaatgagggtgtggtgcgtggcttcctgctccccacagcccagccccctgttggggctccaaagccgaagacagggcctcttcagactccttgggagtaggtttcaggaggcaccaagaatcaatgactgacccagggggcctggcagccactagtatgaactgctggagacctgtctgtcttatagacatgtcaggaaaatagaaacaggcattttctctagctccaagtggggagatattttggggtcacagcttctttggctaagcagggtgtttcttgaaggttcagatgccccactgtgtacatgggatattctgcttctgagtgtaggtgatgaatccaggtcctcagtggagaattttctggagctaagatcaaagcatgtgtcttcctgggagagaagagttccgttcttttatgtgggtttccctaatagtcagaatccacaaaccagccagccagccagccaagcctctgcgatgatgttctcatccggtctaacgctgggctggaaaccttggacagagttcatgcgggggcagagggggtgccagtctctgaggcagggctgcagtcacccctgaagaactaagtgaacaggaacccctctgtgccagtgaccactgtggggctaaagggacaaaaaggaccagggtaccaggcagaagcagatccttgatagctgacgacagcactgcgccctgtgcttggtgcactccctccttcaggaggagagggtggcatggggtctgtgcgggatggcagggggattgggtgggtgggaagagaggtgccatcggtaggaggctggcctccagtagaggagagcagcttttgccatcagtcactttacaaaccatttcaaggaaggacaacctctctggctcctgacacaagccaggcctcggtgcttttatctgttgtggtggtttttcttctttccctttttaaaagacgcatgaccaagacaacctagggagtttgtcttgcttgcctttgactatttccttaatccaaccatgctctcgagggctgagcagagactagactcaaggcacaggtttctggtgatggagtaaagttacagcggtatctcatgtctacacaagaagaggaacgttctgaaagctccaacaacttcttgagggggatggaccaatacagctttgggctcaggattccctagcctcctctgcccatcgcgtgcactgattggaggagtctggcccaaacactctcatatgaacctcgacatgctggagtggggtctggcaggagctgatgacagtttgagggacttgagtgtccctagcctggcagttggctcccggaagcactagacactgacactcattggtagaccctccctccccgccgttgtgtttggttcttttgcactccatgtactgcagaaggatggaaggacctgggtgctggctgggctgtgtatactgtgtatacaagggagctggctgctgaggtgaccacagccttctcctaataaagctgtaagtattt

SEQ ID NO: 238016 - DNA, 2853 bp, Artificial Sequence
  derived and/or modified sequence
atgctgctgctgggcatcctgaccctggccttcgccggcagaaccgccggcggcagcgagcccgagagagaggtggtggtgcccatcagactggaccccgacatcaacggcagaagatactactggagaggccccgaggacagcggcgaccagggcctgatcttccagatcaccgccttccaggaggacttctacctgcacctgacccccgacgcccagttcctggcccccgccttcagcaccgagcacctgggcgtgcccctgcagggcctgaccggcggcagcagcgacctgagaagatgcttctacagcggcgacgtgaacgccgagcccgacagcttcgccgccgtgagcctgtgcggcggcctgagaggcgccttcggctacagaggcgccgagtacgtgatcagccccctgcccaacgccagcgcccccgccgcccagagaaacagccagggcgcccacctgctgcagagaagaggcgtgcccggcggccccagcggcgaccccaccagcagatgcggcgtggccagcggctggaaccccgccatcctgagagccctggacccctacaagcccagaagagccggcttcggcgagagcagaagcagaagaagaagcggcagagccaagagattcgtgagcatccccagatacgtggagaccctggtggtggccgacgagagcatggtgaagttccacggcgccgacctggagcactacctgctgaccctgctggccaccgccgccagactgtacagacaccccagcatcctgaaccccatcaacatcgtggtggtgaaggtgctgctgctgagagacagagacagcggccccaaggtgaccggcaacgccgccctgaccctgagaaacttctgcgcctggcagaagaagctgaacaaggtgagcgacaagcaccccgagtactgggacaccgccatcctgttcaccagacaggacctgtgcggcgccaccacctgcgacaccctgggcatggccgacgtgggcaccatgtgcgaccccaagagaagctgcagcgtgatcgaggacgacggcctgcccagcgccttcaccaccgcccacgagctgggccacgtgttcaacatgccccacgacaacgtgaaggtgtgcgaggaggtgttcggcaagctgagagccaaccacatgatgagccccaccctgatccagatcgacagagccaacccctggagcgcctgcagcgccgccatcatcaccgacttcctggacagcggccacggcgactgcctgctggaccagcccagcaagcccatcagcctgcccgaggacctgcccggcgccagctacaccctgagccagcagtgcgagctggccttcggcgtgggcagcaagccctgcccctacatgcagtactgcaccaagctgtggtgcaccggcaaggccaagggccagatggtgtgccagaccagacacttcccctgggccgacggcaccagctgcggcgagggcaagctgtgcctgaagggcgcctgcgtggagagacacaacctgaacaagcacagagtggacggcagctgggccaagtgggacccctacggcccctgcagcagaacctgcggcggcggcgtgcagctggccagaagacagtgcaccaaccccacccccgccaacggcggcaagtactgcgagggcgtgagagtgaagtacagaagctgcaacctggagccctgccccagcagcgccagcggcaagagcttcagagaggagcagtgcgaggccttcaacggctacaaccacagcaccaacagactgaccctggccgtggcctgggtgcccaagtacagcggcgtgagccccagagacaagtgcaagctgatctgcagagccaacggcaccggctacttctacgtgctggcccccaaggtggtggacggcaccctgtgcagccccgacagcaccagcgtgtgcgtgcagggcaagtgcatcaaggccggctgcgacggcaacctgggcagcaagaagagattcgacaagtgcggcgtgtgcggcggcgacaacaagagctgcaagaaggtgaccggcctgttcaccaagcccatgcacggctacaacttcgtggtggccatccccgccggcgccagcagcatcgacatcagacagagaggctacaagggcctgatcggcgacgacaactacctggccctgaagaacagccagggcaagtacctgctgaacggccacttcgtggtgagcgccgtggagagagacctggtggtgaagggcagcctgctgagatacagcggcaccggcaccgccgtggagagcctgcaggccagcagacccatcctggagcccctgaccgtggaggtgctgagcgtgggcaagatgaccccccccagagtgagatacagcttctacctgcccaaggagcccagagaggacaagagcagccaccccaaggaccccagaggccccagcgtgctgcacaacagcgtgctgagcctgagcaaccaggtggagcagcccgacgacagaccccccgccagatgggtggccggcagctggggcccctgcagcgccagctgcggcagcggcctgcagaagagagccgtggactgcagaggcagcgccggccagagaaccgtgcccgcctgcgacgccgcccacagacccgtggagacccaggcctgcggcgagccctgccccacctgggagctgagcgcctggagcccctgcagcaagagctgcggcagaggcttccagagaagaagcctgaagtgcgtgggccacggcggcagactgctggccagagaccagtgcaacctgcacagaaagccccaggagctggacttctgcgtgctgagaccctgctag

SEQ ID NO: 238017 - DNA, 2853 bp, Artificial Sequence
  derived and/or modified sequence
atgctccttctcgggatactgaccctggcattcgcaggccggaccgccggaggctccgagccggaaagagaggtggttgtcccaatccggctggatccagacataaatggaagacggtactattggcgaggaccagaggactcaggggatcagggccttatttttcagatcacggctttccaggaggacttctacctccacttaacccccgacgcccagttcctcgctcctgcattcagcacagaacacttgggggtaccacttcaaggtctgaccggggggagttccgacttacgaagatgcttctactcaggcgatgtaaatgcagagcctgactcatttgcagcggtcagcctctgcgggggactccgaggtgcgtttgggtaccggggagcggaatacgtaatcagtccactccccaatgccagcgccccagccgcacaacgcaacagtcaaggcgcccacctgcttcaacgtcgtggagtaccaggaggcccatctggagaccctacaagtagatgcggcgtggcctcaggttggaatcccgcaatactgagggccctggatccttacaaaccccgccgcgctgggtttggcgagtcccgtagccgacgccggtctggaagagcaaaacgctttgtgtctatcccccgttatgtggagacactggttgtcgcagacgagtcaatggttaagttccatggtgcggacctggaacactatttactgacactccttgccactgcggcaagactgtatcggcatccctctatcctgaaccccatcaatatcgtggttgtgaaagtgctgctcctccgagacagggactcagggcccaaggtcacgggtaacgccgcgctgacgctgaggaatttttgtgcctggcagaaaaaacttaataaggtatctgacaaacatccagaatattgggatacggcaattctgtttacccgccaggatctatgtggggccaccacgtgcgacaccctgggcatggccgatgtgggaaccatgtgcgatcctaaaaggagttgtagcgttatcgaagatgacggtttgccgagtgccttcacaaccgcacacgaactcggccacgtgttcaatatgccacatgataacgtgaaagtgtgcgaggaggtgttcggcaaacttcgtgctaaccacatgatgtcacccacactaattcagatcgacagagccaatccttggtctgcttgctccgcagccataatcactgactttctggacagtggacacggcgattgcctcctcgaccagccaagcaaacctatttctctgcctgaggatttgcccggcgcctcctatacactatcccagcagtgcgagttagctttcggggtcggaagcaagccatgtccgtatatgcagtattgcacgaaactttggtgtacagggaaggccaaggggcagatggtgtgtcagacacggcatttcccctgggccgatgggacctcgtgcggagaaggaaagctttgtctaaagggcgcctgtgtggagcggcacaatttgaacaaacaccgggttgatgggtcatgggctaaatgggacccttacgggccgtgttctcgcacctgtgggggaggggtgcagctggcacggcgtcagtgcactaatcccacaccagccaatggcggtaagtattgtgaaggtgttagagtcaaataccgatcatgtaacctggagccatgtccatcttccgcgagcggcaaatcattccgggaggagcagtgcgaagcctttaacggatataatcacagtacaaaccgcctaacccttgccgtggcttgggtgccaaaatattcgggggtgtctccaagagataaatgtaagcttatctgtagggccaatggcaccgggtacttttacgttctcgcccctaaggtggtggatggaacactgtgttctcccgattctacatctgtttgcgtacagggcaagtgcattaaggcaggctgtgacgggaatttaggcagcaagaaacgcttcgacaaatgcggcgtgtgtggcggggacaacaagtcttgcaaaaaggtgaccggactctttacgaaacccatgcacggatataactttgtcgtcgctattcctgcaggtgcatcctcaattgacatccggcagcggggatataagggcctcataggcgacgataattacctcgccctgaagaatagtcagggaaagtacctcttgaatggccatttcgtcgtgagcgcagttgagagagacttagtggtcaaggggagcctgttgaggtatagcggaacaggcaccgctgttgaatccctacaggcctccagaccgattcttgaacccttgacagtggaagtattaagcgtgggtaaaatgaccccacctcgggtcaggtatagtttctaccttccaaaggagcctcgagaagataagtcctctcacccaaaggacccgaggggtccttctgtcctgcacaactctgtgctgagccttagcaatcaggttgagcagccagatgatcgcccccccgcacgctgggttgctgggtcttggggcccatgttctgccagttgcggctctggtttacagaaaagggctgtggactgtcgtggctctgccgggcagaggactgttcccgcatgcgatgccgcgcatcggcccgtggaaacccaggcatgtggcgagccctgtcccacctgggaactttccgcctggtctccctgcagcaagtcatgtggtcgcgggttccagaggagaagcctgaagtgcgtggggcacggcggcaggctcctagccagagaccagtgcaaccttcaccggaaaccccaggagttggacttttgtgttctaaggccctgttag

SEQ ID NO: 238018 - DNA, 2853 bp, Artificial Sequence
  derived and/or modified sequence
atgctgctgctgggcatcctgaccctggcctttgctggccgcacagctgggggcagcgagcctgagcgggaggtggtggtgcccatccggctggaccctgacatcaatggccgccgctactactggaggggccctgaggacagcggggaccagggcctcatcttccagatcacagccttccaggaggacttctacctgcacctgaccccagatgcccagttcctggccccagccttcagcacagagcacctgggcgtgcccctgcagggcctgaccggcggcagcagtgacctgcggcgctgcttctacagcggagatgtgaatgctgagccagacagctttgctgctgtgtccctgtgtggcggcctgcggggggccttcggctacagaggagcagaatatgtgatcagccccctgcccaatgccagcgccccagctgcccagaggaacagccagggcgcccacctgctgcagaggagaggagtgcctgggggccccagcggggaccccaccagccgctgtggggtggccagcggctggaacccagccatcctgcgggccctggacccctacaagccccggcgggccggctttggagagagccgcagcagaagaagaagtggccgggccaagagatttgtgtccatccccaggtatgtggagaccctggtggtggctgatgagagcatggtgaagttccacggggctgacctggagcactacctgctgaccctgctggccacagctgcccggctgtaccgccaccccagcatcctgaaccccatcaacatcgtggtggtgaaggtgctgctgctgcgggaccgggacagcggccccaaggtgactggaaatgctgccctgaccctgaggaacttctgtgcctggcagaagaagctgaacaaggtgtctgacaagcaccctgagtactgggacacagccatcctcttcacccggcaggacctgtgtggggccaccacctgtgacaccctgggcatggctgatgtgggcaccatgtgtgaccccaagaggagctgcagcgtgattgaagatgatggcctgcccagcgccttcaccacagcccacgagctgggccacgtgttcaacatgcctcatgacaacgtgaaggtgtgtgaggaggtgtttgggaagctgcgggccaaccacatgatgagccccaccctcatccagattgaccgggccaacccctggagcgcctgcagcgctgccatcatcacagacttcctggacagcggccatggagactgcctgctggaccagcccagcaagcccatcagcctgcctgaggacctgcccggggccagctacaccctgagccagcagtgtgagctggccttcggcgtgggcagcaagccctgcccctacatgcagtactgcaccaagctgtggtgcaccgggaaggccaagggccagatggtgtgccagaccaggcacttcccctgggcagatggcaccagctgtggggagggcaagctgtgcctgaagggggcctgtgtggagcggcacaacctgaacaagcaccgggtggatggctcctgggccaagtgggacccctacggcccctgcagcaggacctgtggcggcggcgtgcagctggcccggcggcagtgcaccaaccccaccccagccaacggcggcaagtactgtgaaggagtgcgggtgaagtaccgcagctgcaacctggagccctgccccagcagcgccagcggcaagagcttccgggaggagcagtgtgaggccttcaacggctacaaccacagcaccaaccggctgaccctggccgtggcctgggtgcccaagtacagcggcgtgagcccccgggacaagtgcaagctgatctgccgggccaatggaacaggctacttctacgtgctggcccccaaggtggtggatggcaccctgtgcagcccagacagcacctctgtgtgtgtgcagggcaagtgcatcaaggccggctgtgatggcaacctgggcagcaagaagagatttgataaatgtggggtgtgtggcggggacaacaagagctgcaagaaggtgacaggcctcttcaccaagcccatgcacggctacaactttgtggtggccatcccagctggggccagcagcattgacatccggcagaggggctacaagggcctgattggagatgacaactacctggccctgaagaacagccagggcaagtacctgctgaatggccactttgtggtgtctgctgtggagcgggacctggtggtgaagggcagcctgctgcgctacagcggcaccggcacagctgtggagagcctgcaggccagccggcccatcctggagcccctgactgtggaggtgctgtctgtgggcaagatgaccccaccccgggtgcgctacagcttctacctgcccaaggagccccgggaggacaagagcagccaccccaaggacccccggggccccagcgtgctgcacaacagcgtgctgagcctgagcaaccaggtggagcagccagatgaccggcccccagcccgctgggtggccggctcctggggcccctgcagcgccagctgtggcagcggcctgcagaagagagctgtggactgccggggcagcgctggccagaggacagtgcctgcctgtgatgctgcccacaggcctgtggagacccaggcctgtggggagccctgccccacctgggagctgagcgcctggagcccctgcagcaagagctgtggccggggcttccagaggaggagcctgaagtgtgtgggccatggaggccgcctgctggcccgggaccagtgcaacctgcacaggaagccccaggagctggacttctgtgtgctgcggccctgctag

SEQ ID NO: 238019 - DNA, 2853 bp, Artificial Sequence
  derived and/or modified sequence
atgctgctgctgggcatcctgaccctggccttcgccggccggaccgcaggcggctcggagcctgagcgagaggttgtcgtgccaatccgcctggacccagacatcaacggccgccggtattattggaggggccccgaagatagcggtgaccagggcttaatattccagatcactgcctttcaggaagacttctacctgcacttaactcccgatgcacaatttttggcccctgctttcagtaccgaacacttaggagtaccacttcagggtttgaccggcggaagtagcgatctgcggagatgtttctatagcggagacgtgaacgctgaacccgattcattcgccgctgtctctctatgtggggggctccggggcgcatttggataccggggggcagagtacgtgatatctccactaccaaatgcctccgccccagcagcccagagaaactcccagggcgcacatctcttgcagagaaggggagttcctggtggcccttcaggggacccaacgtccaggtgtggcgtggcctccggttggaaccccgccatcctccgggcgcttgacccctacaagcctcgaagggccggctttggggagagtcggagccgacgacgcagtgggcgggctaagcgctttgtttccatccccagatacgtggagaccttggtagtggccgacgagtccatggttaaattccacggcgctgacctggaacattatttgcttaccctgctcgcgactgcagctcgactgtatcgtcatccctccatcctaaaccccatcaatatcgtcgtcgtgaaggtactgctcctgcgggatagagacagcggcccgaaggtcacaggaaatgctgccctcacgctcaggaacttctgcgcatggcagaaaaagctaaacaaggtgagcgataagcaccctgagtactgggataccgccatcctgttcacacgtcaggacctttgtggcgcgaccacttgcgatacattgggaatggcagacgtcgggaccatgtgcgacccaaagcggtcctgcagtgttattgaggatgatggattgccctcagccttcactactgctcacgagctgggtcacgtgttcaatatgccacacgacaatgtcaaggtatgtgaagaggtcttcggaaagctgcgggccaaccacatgatgtccccaaccctaatacagatagaccgggccaatccatggtctgcatgttctgctgcaatcattactgattttctggactcaggccacggcgattgtctccttgaccagccttctaagccaattagccttcctgaagatcttcccggcgcctcatacacgctttcccagcagtgtgagctggccttcggggttggatctaagccttgcccttacatgcagtactgtaccaagttatggtgcaccggaaaagcaaagggccaaatggtgtgccagacaagacatttcccatgggccgacgggaccagttgtggtgaaggcaagttgtgcctcaagggggcttgtgtagaacggcacaatttgaacaagcaccgggtagacggtagttgggcaaaatgggatccctacggcccgtgttcccgcacttgtggcggcggagtccagttggcccgccgtcaatgcactaaccctacacccgctaatggcggtaaatactgcgaaggtgtgagggtgaaatatcgaagttgtaacttagaaccctgtccttcttctgcttctgggaaatcatttcgggaggaacagtgcgaagccttcaatggctacaatcactccaccaatcgactgacactggccgttgcttgggtccccaagtacagcggtgtatcgcctcgggataaatgtaaactcatatgtagagcaaatggcacagggtacttctatgttttggcccccaaggtggtggacggaaccctatgctctccggactcaacgagcgtttgcgtgcagggtaagtgcatcaaagccggctgtgacggcaacctgggcagtaagaaaaggtttgataagtgcggcgtgtgcggcggagataacaaaagttgcaagaaggtaacaggtctgtttaccaagcccatgcacggatacaactttgtcgtcgcaatccctgcaggcgcctcctcaatagatatcaggcagagaggctataaaggactgatcggagatgacaactacctcgcactgaaaaattcacagggaaaatatctgttaaacggccatttcgtagtcagcgctgtcgaaagagacctggttgtcaagggctcactgctgaggtacagtggtaccggaactgcagtggagtcactgcaggcctctaggccaatcctggagccccttacagtggaagtgttgagtgtgggtaagatgacaccccccagggtccggtacagcttttacctccctaaggagccgcgagaggacaagtcttctcacccaaaggaccctcggggaccctcagtcttacacaacagcgtgttgagcctcagtaaccaggtcgagcagcccgacgaccggccccctgcacggtgggttgctggctcatgggggccctgctctgcatcttgcggttctggtttgcagaagcgtgctgtggattgccgcggaagcgccggccagcggacagtacctgcttgcgatgctgctcatcgccctgtggagacccaggcttgcggggaaccatgtccaacatgggagcttagtgcgtggtccccatgcagcaaatcatgcgggcgcggcttccagcgtcgcagcctgaagtgtgtgggccacggcggacgtcttcttgcccgggaccagtgcaacctgcaccgtaaacctcaggagctggacttctgtgttttgcgcccctgttag

SEQ ID NO: 238020 - RNA, 2853 nt, Artificial Sequence
  derived and/or modified sequence
augcugcugcuuggcauucugacccuggcuuuugccgguagaacggcgggaggaagcgagcccgaacgggaagucguagugccuauuagguuggacccugacaucaauggucgccgauauuacuggcgagguccugaggauagcggggaucaaggauuaaucuuccaaauuaccgccuuccaagaggauuucuaccugcaucugacuccugacgcucaguuucuagcaccagcauuuucuaccgagcaccugggcguaccucugcagggacugacgggcggcagcagcgaccuccgacguugcuucuauucaggagacgugaacgccgagccagauuccuuugcugccgugagucuguguggaggacuccggggcgccuucggguaccgcggagccgaguaugucauuucaccuuuaccuaaugccagcgcccccgcugcccaacguaacucccagggcgcacauuugcuccagagacguggugugcccgggggcccuagcggagaccccacaagucgcuguggcguggcuucagguuggaacccagcaauucugagagcucuggacccuuacaaaccucggcgugcuggcuucggugaaaguagaucacgaagacgcagcggacgggccaagagauuugugucaauuccuagguacguugaaacuuuggucguggcagacgagagcauggugaaguuccauggcgccgaucucgagcauuaccuacugacacuguuagccaccgcugcgagacucuauagacacccuuccaucuuaaauccuauuaacaucguaguugucaaagugcuacuacuuagggaccgcgauucaggccccaaggugacuggaaaugccgccuugacccugagaaauuuuugcgcauggcagaagaagcugaauaaagugagcgacaaacacccagaguauugggacacagcaauucuguuuacccggcaggaccugugcggcgccaccaccugcgacacucugggcauggcugacguaggaacuaugugcgauccuaaacguucgugcuccgugaucgaagaugaugggcugccaagugcguuuaccacugcccacgaguugggacauguguuuaacaugccucacgauaaugucaaggugugcgaggagguguuugggaagcugagagcaaaucacaugaugucgcccaccuuaauccagaucgaucgggccaauccauggagcgcguguagcgccgcuauaauuacagacuuccuagacagcgggcauggcgauugccugcucgaccagcccagcaagccaauaucuuugccagaggaucugccuggagccucuuauaccuuaagccagcagugugagcuggcauuuggcguggguaguaagcccugcccguacaugcaguauugcacuaaauuguggugcaccgggaaggcuaaggggcagaugguuugucagacccgucauuuuccuugggccgaugggacgaguuguggcgaggguaaauuaugccucaagggugcuugugucgaacggcauaaccuuaauaaacaccgcguggacggaucuugggcuaaaugggaucccuacggcccguguagcagaacuugcggggggggcgugcaauuggccagaagacaaugcaccaauccaacucccgcaaaugggggcaaguauugugaggguguacguguuaaauaucgaaguuguaaucuggagcccugcccuagcucugcaucagggaaaaguuuccgcgaagaacaaugcgaagccuuuaauggauauaaccacucaacuaaccgacuuacucuggcaguggcguggguacccaaauauagcggagucagcccccgcgauaaauguaaacucaucugccgugcuaacggcacuggcuacuuuuaugugcuagccccaaaagugguugauggcacacugugcucuccugauuccaccagcguuuguguacagggaaaguguaucaaggcugguugugauggcaaccuuggaagcaagaaaagguuugacaagugcggcgugugcggaggggauaauaaaucgugcaaaaaggucacaggccuuuucacgaaaccuaugcacggcuauaacuucgugguagcgauuccugcuggggccaguucuaucgauauucgucagcgcggguacaagggauugauuggagaugauaacuaccuagcccugaaaaauucccaggguaaauaccugcuuaacggccauuuugugguuucugccguagagcgggacuuagucgucaaaggcagccuccuucgguacagugguacaggaaccgcaguggagucucuacaggcuagccgacccaucuuggaaccccuuacagucgaggugcucucuguggguaagaugacuccaccgagagugcgcuauuccuucuaucugccaaaggaaccucgugaagauaagagcucacacccaaaagacccaagaggucccucaguacuccacaacucuguccugagccuuucaaaucagguggagcaaccugaugacagacccccggcccgcuggguggcagguucauggggcccuugcucugccuccugcggaucagguuuacaaaagcgggcuguagauugccgaggcagcgccggccagaggacuguuccagcaugcgaugcagcccaccggccuguggaaacucaggccuguggagaaccaugcccuacaugggaauuaagcgcuuggucucccugcagcaaguccuguggccguggcuuucagcggcggagucuuaaaugcgucggacacggcggacgacugcucgcucgagaccagugcaaccuucacaggaagccacaagagcuagacuuuugcguuuuacgaccgugcuag

SEQ ID NO: 238021 - RNA, 2853 nt, Artificial Sequence
  derived and/or modified sequence
augcugcuccuuggaauacugacucuagcguucgcuggacggacggcuggaggauccgagcccgagcgugaaguuguugucccaauucggcucgauccggauauuaacggcagacgcuacuacuggagagguccagaagauucuggggaccaagggcuaaucuuucagauaaccgcuuuccaggaggacuucuaccuccaccucaccccagacgcacaguuucuugcuccugcuuuuagcaccgaacauuuggggguaccacugcaaggauugacggguggcaguuccgauuugagaagguguuuuuauucuggugacgugaacgcagagccugacucauucgccgccgucucccuuugcgguggucucagaggggccuuuggguaccgcggugcugaguauguuaucagcccucugccaaaugccucggcccccgccgcccagcgcaacucccagggugcccaucuccuacagcgacgagguguuccaggcgggccaucaggcgauccaacuagccgcuguggcgucgcauccggguggaaccccgcaauuuuaagagcccuagauccauacaaaccccggcgcgccggcuucggagagaguaggagccgcaggcguucgggacgagccaaaagguuugugucuaucccccgcuacguagaaacacuggugguagcggacgaauccaugguaaaguuucacggcgcagaccucgaacacuaccuuuuaaccuuacuggccacugcagccagacuguaccgccacccgucaauccucaaccccauuaauaucguggucgucaaagugcuccuguuaagggaccgggacucuggaccaaagguaacuggcaaugcagcacugacucugcgaaacuucugugccuggcagaaaaaacugaacaaagugagugacaagcacccugaguacugggacacagcgauccuguuuacgagacaagacuuguguggagccacaacaugcgacacucuuggcauggcagacgucggaaccaugugcgauccaaaacgcucuuguucaguaauugaagaugauggacuccccagugcguucacaaccgcucaugaacuuggucacguguucaacaugccccacgauaacguuaaaguuugcgaggagguguuuggaaaacuccgugcuaaccauaugaugucuccuacucucauucagauugaucgugccaauccuuggucagcaugcagugcagcaaucauuacugauuuucucgauagcgggcacggagauugucugcuugaccaaccuagcaagccgauaucccucccugaagaucugcccggagccagcuauaccuugucccagcagugcgaguuagcuuucggaguuggaucaaaaccuugcccuuacaugcaauacuguacaaaacuguggugcacgggaaaggcaaaaggccaaaugguuugucagaccagacauuuccccugggccgaugguacuaguuguggcgaagggaaguuaugcuugaagggugcuugugucgaacggcauaaccuuaauaaacaccgcguggacggaucuugggcuaaaugggaucccuacggcccguguagcagaacuugcggggggggcgugcaauuggccagaagacaaugcaccaauccaacucccgcaaaugggggcaaguauugugaggguguacguguuaaauaucgaaguuguaaucuggagcccugcccuagcucugcaucagggaaaaguuuccgcgaagaacaaugcgaagccuuuaauggauauaaccacucaacuaaccgacuuacucuggcaguggcauggguaccuaaauacucaggagucagcccgcgggacaaaugcaaacugaucuguagagcaaaugggacaggcuauuuuuacguucuggcuccgaaagucguggauggaacccuguguucccccgacucuacuagugugugcguucaggggaagugcaucaaggccggcugcgacgguaaucucggcucuaaaaaaagauucgauaaaugcggcgucugcggaggggauaacaagucauguaaaaaggugaccgggcuguucaccaaaccaaugcauggguauaacuuuguuguggcuaucccugcgggagcgucgucaauugauaucagacagaggggauacaagggacucauuggcgaugacaacuauuuggcucugaaaaauagccaagggaaguaccugcugaacggccacuuugucguuuccgccguugaaagagacuuaguaguuaagggaucauugcugcgguauucugguacaggcaccgcugucgaaucucuucaggcuucaagaccuaucuuagaaccucucacuguugaaguccucucagugggcaaaaugaccccuccacgcgugcgauauucauucuaccuuccgaaagagccccgugaggauaaaucuucccacccaaaagacccgagaggucccagcgucuuacauaacuccguguuaucauuauccaaucaaguagagcagccagacgacaggcccccugcccguuggguggccgggagcuggggacccuguagcgccucauguggcuccggucuccagaaacgagcaguggacuguaggggaagugcaggccaacgcaccgucccugcuugcgacgccgcgcaucgucccguugaaacacaagcuuguggugaaccuuguccuacuugggaauuaucagcauggucacccuguaguaaaucuuguggacggggcuuucagcggagaucccucaagugcgucggacacggaggcagacuccucgccagagaccaaugcaaucuacaccguaagccucaggaacucgacuuuugugugcuacgcccuuguuag

SEQ ID NO: 238022 - protein, 1224 aa, Artificial Sequence
  derived and/or modified sequence
MKPRARGWRGLAALWMLLAQVAEQAPACAMGPAAAAPGSPSVPRPPPPAERPGWMEKGEYDLVSAYEVDHRGDYVSHEIMHHQRRRRAVPVSEVESLHLRLKGSRHDFHMDLRTSSSLVAPGFIVQTLGKTGTKSVQTLPPEDFCFYQGSLRSHRNSSVALSTCQGLSGMIRTEEADYFLRPLPSHLSWKLGRAAQGSSPSHVLYKRSTEPHAPGASEVLVTSRTWELAHQPLHSSDLRLGLPQKQHFCGRRKKYMPQPPKEDLFILPDEYKSCLRHKRSLLRSHRNEELNVETLVVVDKKMMQNHGHENITTYVLTILNMVSALFKDGTIGGNINIAIVGLILLEDEQPGLVISHHADHTLSSFCQWQSGLMGKDGTRHDHAILLTGLDICSWKNEPCDTLGFAPISGMCSKYRSCTINEDTGLGLAFTIAHESGHNFGMIHDGEGNMCKKSEGNIMSPTLAGRNGVFSWSPCSRQYLHKFLSTAQAICLADQPKPVKEYKYPEKLPGELYDANTQCKWQFGEKAKLCMLDFKKDICKALWCHRIGRKCETKFMPAAEGTICGHDMWCRGGQCVKYGDEGPKPTHGHWSDWSSWSPCSRTCGGGVSHRSRLCTNPKPSHGGKFCEGSTRTLKLCNSQKCPRDSVDFRAAQCAEHNSRRFRGRHYKWKPYTQVEDQDLCKLYCIAEGFDFFFSLSNKVKDGTPCSEDSRNVCIDGICERVGCDNVLGSDAVEDVCGVCNGNNSACTIHRGLYTKHHHTNQYYHMVTIPSGARSIRIYEMNVSTSYISVRNALRRYYLNGHWTVDWPGRYKFSGTTFDYRRSYNEPENLIATGPTNETLIVELLFQGRNPGVAWEYSMPRLGTEKQPPAQPSYTWAIVRSECSVSCGGGQMTVREGCYRDLKFQVNMSFCNPKTRPVTGLVPCKVSACPPSWSVGNWSACSRTCGGGAQSRPVQCTRRVHYDSEPVPASLCPQPAPSSRQACNSQSCPPAWSAGPWAECSHTCGKGWRKRAVACKSTNPSARAQLLPDAVCTSEPKPRMHEACLLQRCHKPKKLQWLVSAWSQCSVTCERGTQKRFLKCAEKYVSGKYRELASKKCSHLPKPSLELERACAPLPCPRHPPFAAAGPSRGSWFASPWSQCTASCGGGVQTRSVQCLAGGRPASGCLLHQKPSASLACNTHFCPIAEKKDAFCKDYFHWCYLVPQHGMCSHKFYGKQCCKTCSKSNL

SEQ ID NO: 238023 - protein, 928 aa, Artificial Sequence
  derived and/or modified sequence
MKPRARGWRGLAALWMLLAQVAEQAPACAMGPAAAAPGSPSVPRPPPPAERPGWMEKGEYDLVSAYEVDHRGDYVSHEIMHHQRRRRAVPVSEVESLHLRLKGSRHDFHMDLRTSSSLVAPGFIVQTLGKTGTKSVQTLPPEDFCFYQGSLRSHRNSSVALSTCQGLSGMIRTEEADYFLRPLPSHLSWKLGRAAQGSSPSHVLYKRSTEPHAPGASEVLVTSRTWELAHQPLHSSDLRLGLPQKQHFCGRRKKYMPQPPKEDLFILPDEYKSCLRHKRSLLRSHRNEELNVETLVVVDKKMMQNHGHENITTYVLTILNMVSALFKDGTIGGNINIAIVGLILLEDEQPGLVISHHADHTLSSFCQWQSGLMGKDGTRHDHAILLTGLDICSWKNEPCDTLGFAPISGMCSKYRSCTINEDTGLGLAFTIAHESGHNFGMIHDGEGNMCKKSEGNIMSPTLAGRNGVFSWSPCSRQYLHKFLSTAQAICLADQPKPVKEYKYPEKLPGELYDANTQCKWQFGEKAKLCMLDFKKDICKALWCHRIGRKCETKFMPAAEGTICGHDMWCRGGQCVKYGDEGPKPTHGHWSDWSSWSPCSRTCGGGVSHRSRLCTNPKPSHGGKFCEGSTRTLKLCNSQKCPRDSVDFRAAQCAEHNSRRFRGRHYKWKPYTQVEDQDLCKLYCIAEGFDFFFSLSNKVKDGTPCSEDSRNVCIDGICERVGCDNVLGSDAVEDVCGVCNGNNSACTIHRGLYTKHHHTNQYYHMVTIPSGARSIRIYEMNVSTSYISVRNALRRYYLNGHWTVDWPGRYKFSGTTFDYRRSYNEPENLIATGPTNETLIVELLFQGRNPGVAWEYSMPRLGTEKQPPAQPSYTWAIVRSECSVSCGGGQMTVREGCYRDFLYFMFYLSQLFASECPFKNTLLHAFLCK

SEQ ID NO: 238024 - DNA, 3675 bp, Artificial Sequence
  derived and/or modified sequence
atgaagccccgagcccgcggttggaggggactggctgccttgtggatgctcctggctcaggtggccgaacaagcccccgcctgcgctatggggccagccgccgcggctccaggctcccccagtgtccccagacccccgccgcccgccgagcgaccgggatggatggaaaagggcgagtatgatttagtgagcgcttatgaggtggaccatagaggagactatgtgtctcatgaaattatgcaccaccagcggaggcgacgggcagtgcccgtctctgaagtggagagcctgcacttgcgccttaaaggaagccggcacgactttcatatggatttgaggacgtcttctagcttagtcgccccagggttcattgtccagaccctgggaaagactggcaccaagtccgtgcagactttgccacccgaggatttctgcttttaccagggaagtcttagaagccacagaaattcttctgtggccttgagcacctgccagggcctgagtggcatgattcgtacggaggaggcagactattttctgcgccccctgcccagtcacttatcatggaagctgggcagggctgcccagggatcgtccccctcacacgttttatataagaggtcaaccgaaccccacgctccgggggctagcgaggtgctggtcacgtcaaggacctgggaattggctcaccagccactccactcatccgacctgcggctgggactcccccagaagcaacatttttgcggacggcgtaagaagtacatgccccagccccccaaggaggatctattcatcctcccggacgaatacaaatcatgtttgaggcataaacggtctttgcttcgctctcaccggaatgaagagcttaacgtcgagacactcgttgtcgtggataagaaaatgatgcagaaccacggacacgagaacatcaccacttatgtgctgacaatcctgaacatggtgagtgcgctttttaaagacggaaccatcggcggaaatattaatattgccatcgtcggcctcatcctgctggaagacgaacagccaggactcgtcatctcacatcacgccgatcacacactttccagcttttgtcaatggcagtccggattgatgggcaaagatgggacccggcacgaccacgcaatcctgctcaccggccttgatatttgttcttggaaaaacgagccttgtgacaccctggggttcgctcccattagcgggatgtgtagcaaatacagatcctgcacaataaacgaagatacgggactcggccttgcatttactatcgcacacgagtctggacataacttcggaatgatccacgatggggaagggaacatgtgcaaaaagagtgagggaaatatcatgtccccgaccctcgctggacgtaatggtgtcttttcgtggagcccatgctcccggcaatacctgcacaagttcttatcaacagcacaggcaatatgcttggccgatcaaccaaagccggtgaaggagtataaatacccagagaaattgcctggcgaattatatgacgccaacacgcagtgcaagtggcagttcggcgagaaagcaaagttgtgtatgctcgattttaaaaaggacatctgcaaggccttatggtgtcatcgcatcggacgcaagtgcgagacaaaattcatgcctgcagccgaagggactatttgcggacacgatatgtggtgtaggggtgggcagtgcgtaaagtacggcgatgaggggcccaaacccacacacggccattggtccgattggtccagttggtccccttgttcccgtacctgtgggggaggggtgtcccacagatcccggctctgtacgaacccaaaaccctcccatggaggcaagttctgcgaaggcagcacccgcaccctaaagctttgcaactctcagaaatgtccccgtgattcagtggactttcgggcagcacagtgcgctgagcataattctcggcgctttaggggccggcactacaagtggaagccgtacactcaggtagaggatcaggatttgtgcaagctgtactgcatagctgaaggcttcgatttttttttttctctaagcaataaggtgaaggatgggacaccctgcagcgaggattccaggaacgtgtgcatagatggtatctgcgagcgcgtggggtgcgataacgttttgggaagcgatgccgttgaagatgtgtgtggcgtttgtaacggtaacaacagcgcatgcaccatccatcggggcctttatacaaagcaccaccatactaatcagtattaccacatggtaacgatcccgagtggtgccagatcaatcaggatttatgagatgaacgtgagtacaagctatatatctgtgaggaacgccttacgaagatattacttgaatggacactggacagtggactggcccgggcgttacaagtttagtggcactacatttgactacagacgcagttataacgagccggagaacctaatagcaactggcccaacaaacgagaccctgattgtggaattactgtttcagggtaggaacccaggcgtggcatgggagtactcgatgccaagactgggcacagagaaacagccccctgcacaaccgtcctacacttgggccatcgtccgtagcgagtgcagcgtgagctgcggcggaggtcaaatgactgtaagagaggggtgctaccgcgatctgaagttccaggttaatatgtcattctgtaatcccaagaccagacccgtcacaggtttagttccttgtaaagtttccgcctgcccgccttcatggtccgttggcaattggtccgcctgttctcgaacctgtggcggcggcgctcaatcccgcccggtccagtgtacaaggcgcgtccattatgatagtgagcctgttcccgctagcttgtgtccccagcccgccccttcctcccggcaagcctgtaatagccagtcatgcccaccagcgtggtctgcaggaccatgggccgaatgctcccatacatgtggtaaaggctggcggaaacgcgcggtggcctgcaagagcaccaatcctagcgcccgagctcaactcctcccggacgcagtttgcacatcagagcccaagcccaggatgcatgaggcatgtctgctgcagaggtgccataagccaaaaaagcttcaatggctggtgagcgcttggtcgcagtgctctgtaacgtgcgagcgcgggactcagaagcggtttttgaagtgcgcggagaaatacgtgagcggaaagtaccgcgagctcgcaagcaaaaaatgcagtcatctcccaaagccgagcttagaacttgaaagagcatgtgcccctcttccctgcccaagacaccctcctttcgccgccgcaggccccagcaggggctcatggttcgctagcccctggtcccagtgcacagcctcttgcggcgggggcgtccagacccgaagtgtgcagtgtctcgcggggggtcggcctgcatccgggtgtctgctccatcaaaagccttctgccagcctggcttgcaacactcacttttgtccgatcgcagaaaaaaaggacgccttctgtaaagactactttcactggtgctatctggtgcctcagcacgggatgtgttcacacaaattttatggcaaacaatgttgtaagacatgctcaaagagtaacctgtag

SEQ ID NO: 238025 - DNA, 2787 bp, Artificial Sequence
  derived and/or modified sequence
atgaagccacgagcaagaggctggcgcggactggccgctctgtggatgcttctggcgcaggtggctgagcaagctcctgcgtgtgctatggggcctgccgccgcagcccctggttctccctctgtgcccagacccccaccgccagctgaaaggcctggttggatggaaaagggggagtacgatctggtcagcgcatatgaagtggaccacagaggggattacgtgtcacatgaaattatgcaccaccaaaggcggcggagggcagtgccagtaagcgaggttgagagcctccaccttcgcttgaaaggtagtaggcacgacttccatatggatctccggacctcctcctccttagtcgctcctggtttcattgtgcagaccctcgggaaaaccggtaccaaatcagtgcagaccctccccccagaagacttctgcttctaccaagggtccttgaggtcccacagaaactcatcagtcgctctgtcaacttgccaggggctgtcaggcatgatacggacagaggaagcggattattttctgaggccccttcctagccacctatcatggaaactgggcagagctgcacagggcagctctccatcccatgtcctgtataagcggagcaccgaacctcacgcccctggagcaagcgaggtactggtgaccagtaggacgtgggaactcgcccaccaaccactgcactccagcgatctgcggttgggcctcccacaaaaacagcatttctgcggccgtaggaaaaaatacatgccacagcctcccaaagaggacctctttatcctgcctgatgaatataaaagctgcctccggcacaagaggtcactgctcaggagccaccgtaacgaggaactgaatgttgagactttagtggtggtcgataaaaaaatgatgcagaatcacggccacgaaaacatcaccacatacgtgctcacgatactcaatatggtgtcggccctgttcaaagacggtacaatcggcggcaatatcaatattgcaattgttggcctgatccttctcgaggacgagcagcctggcttagtgatttcacatcatgctgatcatacgttgtcatccttttgtcagtggcagagcgggcttatgggcaaagacggcaccaggcatgaccacgctatcctgctcaccggactggacatctgtagctggaagaatgagccttgcgacacactgggctttgcccccatcagcggaatgtgttcaaagtatcgtagttgcactattaacgaagatactggactgggtctagccttcaccatcgcccacgaatctgggcacaactttggcatgattcatgacggtgaagggaatatgtgtaagaaatctgaggggaacatcatgtcacccactctggcagggcgcaacggcgtctttagctggagtccctgttccagacagtaccttcataagtttttgtctaccgcccaggctatctgcctggccgatcaacccaagccagtaaaggagtataagtatccagaaaagctgccaggggaactgtatgacgcgaacacccagtgtaaatggcaatttggggagaaggctaagctatgtatgctcgattttaagaaagacatatgcaaagccctctggtgtcaccgcatagggagaaaatgtgagaccaagtttatgccagctgccgaaggaaccatctgtggacacgatatgtggtgtcggggcgggcagtgcgtgaagtatggagacgagggaccgaaaccaacccacggccactggagtgactggtccagctggagcccctgttctagaacttgcgggggaggagtgtcccatcgatccaggctttgtactaatcctaagccatcacacgggggcaaattctgtgaaggctctacacgtacactcaagctgtgcaactcccagaaatgcccacgagactctgtggactttagagctgcccaatgtgccgagcacaactctcggcggtttagaggacgccactacaagtggaagccttatacccaagttgaggatcaggatctgtgcaagctatactgtatagccgaaggtttcgatttcttctttagtttgagtaacaaagtgaaggacggtactccctgctccgaggatagtcggaatgtgtgtattgacgggatctgtgaaagggtgggttgtgacaatgtgctcggttccgatgctgtagaggatgtctgcggagtgtgcaacggtaacaacagcgcttgtacaatacatagaggattgtacaccaagcaccatcacaccaaccagtactaccacatggttaccattccgtcaggtgcccggtcaatccgcatctacgagatgaacgtgtctacctcttacatttccgtaaggaatgctctccggaggtattacctgaacggccactggaccgtcgactggcccggaaggtataaatttagcggcaccacgtttgactaccgcaggtcatataacgaacccgaaaatctgatcgctactggcccaacgaacgaaaccctgattgtagaactgctgttccaaggtaggaatcccggagttgcctgggagtactcgatgcctcgtttaggaactgaaaaacagccgcccgcccaaccaagctatacctgggcaattgtcagaagcgagtgctccgtcagctgcgggggtgggcagatgactgtgcgagaaggatgctatcgggactttttatattttatgttctatctgagtcagttatttgcctccgagtgccccttcaaaaatacactgctgcacgcttttctctgcaagtag

SEQ ID NO: 238026 - DNA, 3675 bp, Artificial Sequence
  derived and/or modified sequence
atgaagccccgggcccggggctggaggggcctggccgccctgtggatgctgctggcccaggtggccgagcaggccccagcctgtgccatgggccctgctgctgctgcccctggcagccccagcgtgcccaggcctcctcctcctgctgagcggcccggctggatggagaagggggagtatgacctggtgtctgcctatgaggtggaccacagaggagactatgtgtcccatgagatcatgcaccaccagaggagaagaagagctgtgcctgtgtctgaggtggagagcctgcacctgcggctgaagggcagcagacatgacttccacatggacctgcggaccagcagcagcctggtggcccctggcttcatcgtgcagaccctgggcaagacaggcaccaagtctgtgcagaccctgcccccagaggacttctgcttctaccagggcagcctgcggagccacaggaacagctctgtggccctgagcacctgccagggcctgagcggcatgatcagaacagaggaggccgactacttcctgcggcccctgcccagccacctgtcctggaagctgggccgggccgcccagggcagcagccccagccacgtgctgtacaagaggagcacagagccccacgcccctggggccagcgaggtgctggtgaccagcaggacctgggagctggcccaccagcccctgcacagcagtgacctgcggctgggcctgccccagaagcagcacttctgtggccgcaggaagaagtacatgccccagccccccaaggaggacctcttcatcctgcctgatgagtacaagagctgcctgcggcacaagaggagcctgctgcggagccacagaaatgaggagctgaatgtggagaccctggtggtggtggacaagaagatgatgcagaaccacggccacgagaacatcaccacctacgtgctgaccatcctgaacatggtgtctgccctcttcaaggatggcaccatcggcggcaacatcaacatcgccatcgtgggcctcatcctgctggaggatgagcagcccggcctggtgatcagccaccacgccgaccacaccctgagcagcttctgccagtggcagagcggcctgatgggcaaggatggcaccaggcatgaccacgccatcctgctgaccggcctggacatctgctcctggaagaatgagccctgtgacaccctgggctttgcccccatcagcggcatgtgcagcaagtaccgcagctgcaccatcaatgaagacaccggcctgggcctggccttcaccatcgcccatgaaagtggccacaactttggcatgattcatgatggagagggcaacatgtgcaagaagtctgagggcaacatcatgagccccaccctggccggcagaaatggagtcttctcctggagcccctgcagccggcagtacctgcacaagttcctgagcacagcccaggccatctgcctggccgaccagcccaagcctgtgaaggagtacaagtacccagagaagctgcccggggagctgtatgatgccaacacccagtgcaagtggcagtttggagagaaggccaagctgtgcatgctggacttcaagaaggacatctgcaaggccctgtggtgccaccgcatcggcaggaaatgtgagaccaagttcatgcctgctgctgagggcaccatctgtggccatgacatgtggtgccggggcggccagtgtgtgaagtatggagatgagggccccaagcccacccacggccactggagcgactggagctcctggagcccctgcagcaggacctgtggcggcggcgtgagccacaggagccggctgtgcaccaaccccaagcccagccacggcggcaagttctgtgagggcagcaccaggaccctgaagctgtgcaacagccagaagtgcccccgggacagcgtggacttccgggccgcccagtgtgccgagcacaacagccgccgcttccggggccgccactacaagtggaagccctacacccaggtggaggaccaggacctgtgcaagctgtactgcatcgccgagggctttgacttcttcttcagcctgagcaacaaggtgaaggatggcaccccctgcagcgaggacagcagaaatgtgtgcattgatggcatctgtgagcgggtgggctgtgacaacgtgctgggcagtgatgctgtggaggatgtgtgtggggtgtgcaatggaaacaacagcgcctgcaccatccaccggggcctgtacaccaagcaccaccacaccaaccagtactaccacatggtgaccatccccagcggggcccggagcatccgcatctatgagatgaatgtgtccaccagctacatctctgtgagaaatgccctgcggcgctactacctgaatggccactggacagtggactggccaggccgctacaagttcagcggcaccacctttgactacagaagaagctacaatgaacctgagaacctgattgccaccggccccaccaatgagaccctgattgtggagctgctcttccagggcagaaatcctggggtggcctgggagtacagcatgccccggctgggcacagagaagcagcccccagcccagcccagctacacctgggccatcgtgcgctctgagtgcagcgtgtcctgtggcggcggccagatgacagtgcgggagggctgctacagagacctgaagttccaggtgaacatgtccttctgcaaccccaagaccaggcctgtgacaggcctggtgccctgcaaggtgtctgcctgcccccccagctggagcgtgggcaactggagcgcctgcagcaggacctgtggcggcggggcccagagcaggcctgtgcagtgcacccggcgggtgcactatgacagcgagcctgtgcctgccagcctgtgcccccagcctgcccccagcagccggcaggcctgcaacagccagagctgccccccagcctggagcgctggcccctgggccgagtgcagccacacctgtgggaagggctggaggaagagagctgtggcctgcaagagcaccaaccccagcgcccgggcccagctgctgcctgatgctgtgtgcaccagcgagcccaagcccaggatgcatgaggcctgcctgctgcagcgctgccacaagcccaagaagctgcagtggctggtgtctgcctggagccagtgcagcgtgacctgtgagcggggcacccagaagcgcttcctgaagtgtgccgagaagtatgtgtctgggaagtaccgggagctggccagcaagaagtgcagccacctgcccaagcccagcctggagctggagcgggcctgtgcccccctgccctgccccaggcaccccccatttgctgctgctggccccagccggggctcctggtttgccagcccctggagccagtgcacagccagctgtggcggcggcgtgcagaccaggtctgtgcagtgcctggccggcggccgcccagccagcggctgcctgctgcaccagaagcccagcgccagcctggcctgcaacacccacttctgccccatcgccgagaagaaggatgccttctgcaaggactacttccactggtgctacctggtgccccagcacggcatgtgcagccacaagttctacggcaagcagtgctgcaagacctgcagcaagagcaacctgtag

SEQ ID NO: 238027 - DNA, 2787 bp, Artificial Sequence
  derived and/or modified sequence
atgaagccccgggcccggggctggaggggcctggccgccctgtggatgctgctggcccaggtggccgagcaggccccagcctgtgccatgggccctgctgctgctgcccctggcagccccagcgtgcccaggcctcctcctcctgctgagcggcccggctggatggagaagggggagtatgacctggtgtctgcctatgaggtggaccacagaggagactatgtgtcccatgagatcatgcaccaccagaggagaagaagagctgtgcctgtgtctgaggtggagagcctgcacctgcggctgaagggcagcagacatgacttccacatggacctgcggaccagcagcagcctggtggcccctggcttcatcgtgcagaccctgggcaagacaggcaccaagtctgtgcagaccctgcccccagaggacttctgcttctaccagggcagcctgcggagccacaggaacagctctgtggccctgagcacctgccagggcctgagcggcatgatcagaacagaggaggccgactacttcctgcggcccctgcccagccacctgtcctggaagctgggccgggccgcccagggcagcagccccagccacgtgctgtacaagaggagcacagagccccacgcccctggggccagcgaggtgctggtgaccagcaggacctgggagctggcccaccagcccctgcacagcagtgacctgcggctgggcctgccccagaagcagcacttctgtggccgcaggaagaagtacatgccccagccccccaaggaggacctcttcatcctgcctgatgagtacaagagctgcctgcggcacaagaggagcctgctgcggagccacagaaatgaggagctgaatgtggagaccctggtggtggtggacaagaagatgatgcagaaccacggccacgagaacatcaccacctacgtgctgaccatcctgaacatggtgtctgccctcttcaaggatggcaccatcggcggcaacatcaacatcgccatcgtgggcctcatcctgctggaggatgagcagcccggcctggtgatcagccaccacgccgaccacaccctgagcagcttctgccagtggcagagcggcctgatgggcaaggatggcaccaggcatgaccacgccatcctgctgaccggcctggacatctgctcctggaagaatgagccctgtgacaccctgggctttgcccccatcagcggcatgtgcagcaagtaccgcagctgcaccatcaatgaagacaccggcctgggcctggccttcaccatcgcccatgaaagtggccacaactttggcatgattcatgatggagagggcaacatgtgcaagaagtctgagggcaacatcatgagccccaccctggccggcagaaatggagtcttctcctggagcccctgcagccggcagtacctgcacaagttcctgagcacagcccaggccatctgcctggccgaccagcccaagcctgtgaaggagtacaagtacccagagaagctgcccggggagctgtatgatgccaacacccagtgcaagtggcagtttggagagaaggccaagctgtgcatgctggacttcaagaaggacatctgcaaggccctgtggtgccaccgcatcggcaggaaatgtgagaccaagttcatgcctgctgctgagggcaccatctgtggccatgacatgtggtgccggggcggccagtgtgtgaagtatggagatgagggccccaagcccacccacggccactggagcgactggagctcctggagcccctgcagcaggacctgtggcggcggcgtgagccacaggagccggctgtgcaccaaccccaagcccagccacggcggcaagttctgtgagggcagcaccaggaccctgaagctgtgcaacagccagaagtgcccccgggacagcgtggacttccgggccgcccagtgtgccgagcacaacagccgccgcttccggggccgccactacaagtggaagccctacacccaggtggaggaccaggacctgtgcaagctgtactgcatcgccgagggctttgacttcttcttcagcctgagcaacaaggtgaaggatggcaccccctgcagcgaggacagcagaaatgtgtgcattgatggcatctgtgagcgggtgggctgtgacaacgtgctgggcagtgatgctgtggaggatgtgtgtggggtgtgcaatggaaacaacagcgcctgcaccatccaccggggcctgtacaccaagcaccaccacaccaaccagtactaccacatggtgaccatccccagcggggcccggagcatccgcatctatgagatgaatgtgtccaccagctacatctctgtgagaaatgccctgcggcgctactacctgaatggccactggacagtggactggccaggccgctacaagttcagcggcaccacctttgactacagaagaagctacaatgaacctgagaacctgattgccaccggccccaccaatgagaccctgattgtggagctgctcttccagggcagaaatcctggggtggcctgggagtacagcatgccccggctgggcacagagaagcagcccccagcccagcccagctacacctgggccatcgtgcgctctgagtgcagcgtgtcctgtggcggcggccagatgacagtgcgggagggctgctacagagacttcctgtacttcatgttctacctgagccagctgtttgccagcgagtgccccttcaagaacaccctgctgcacgccttcctgtgcaagtag

SEQ ID NO: 238028 - DNA, 3675 bp, Artificial Sequence
  derived and/or modified sequence
atgaagccccgggcccggggctggcggggcctggccgccctgtggatgctgctagcacaggtcgcggagcaggctcctgcttgtgctatgggaccagctgccgccgctcccggctctcccagcgttccaaggccccccccaccggctgagaggcccggttggatggagaagggcgagtacgaccttgtaagcgcctatgaggttgaccataggggcgactacgtgagccacgagatcatgcatcaccagcgcaggcgtcgcgccgtcccagtcagtgaggtggaatccttgcatctgcggctgaaggggagccggcatgacttccacatggatctccgcacgtcctcatctctggtagcccctggcttcattgttcagactcttgggaaaacaggcactaagagcgtgcagacgctgcccccggaggacttttgcttctatcaaggcagcctgcggtcgcacaggaactcgagcgtagccctctccacttgccaaggtctgagcggcatgatcagaactgaagaggccgactattttttgagacccctgccctctcacctctcttggaagctggggagggccgcccagggttcaagtccgagccatgtactgtataagagaagcaccgaaccacacgctcccggcgccagcgaagtcctcgtcacttcccgcacgtgggagctcgcacatcagcctctccatagttccgatctgcgactgggcttgcctcagaaacagcacttctgtggtaggcgcaaaaagtacatgccccagcctcccaaagaagacctctttattctccctgatgagtataaaagctgcttgaggcacaagcggtctctgctgcgttctcacaggaacgaagagctcaacgtcgagaccctggtcgtagtggacaaaaagatgatgcagaatcacggacatgaaaatataactacgtatgtactgactattcttaatatggtcagcgcgttatttaaagacgggacgatcggcgggaacattaacattgcaatcgtgggcctcattctgctggaagacgaacagcctggcctggtcatctcacaccacgctgaccacactctgagctccttttgtcagtggcaaagtggtctgatgggcaaggatggaacccggcacgatcacgctatcctgctaaccggcctcgatatttgtagctggaaaaacgagccctgtgatacattggggtttgctcctatctcgggcatgtgctccaagtaccgttcgtgcacaattaacgaggacaccggcttgggtctggctttcaccatagctcatgaatccgggcacaacttcggaatgatccatgatggcgagggcaatatgtgcaaaaagagcgaaggcaacatcatgtcccccacactggccggccgcaacggggtattttcatggtcaccgtgctcaagacagtacctgcataagttcctgagtactgcccaggccatatgcctagcagatcaaccaaaacccgttaaagagtacaagtatcctgagaagctgccaggtgaactgtacgatgctaatacgcagtgtaaatggcagtttggtgagaaagctaagctgtgtatgttggatttcaagaaagatatttgtaaggccttgtggtgtcatcgcataggccggaagtgcgaaactaagtttatgcctgccgcggaaggcactatctgcggtcatgacatgtggtgccgcggaggacagtgcgtgaaatacggggacgagggccctaagcccacccatggacactggtccgattggtccagctggtcaccatgttcccggacctgcggcggtggcgtgtctcatcgctcccgcctctgcactaaccccaaaccttcacatgggggaaagttctgtgagggatctacaagaacgctgaaactgtgcaactctcagaaatgtcctagagactccgtcgatttccgtgccgcccagtgtgctgaacacaattctaggcgctttcggggacgtcactataaatggaaaccgtacacccaggtagaagaccaggatctctgtaagctgtactgtattgcagaggggttcgatttctttttcagcctgagcaacaaggtgaaagacgggacaccatgtagcgaggactcacgaaacgtgtgtatagacggtatctgtgagagggtcggatgcgacaatgtgctaggatctgacgccgtagaggacgtgtgtggggtgtgcaatgggaacaattctgcgtgcacaattcaccggggactatatacaaaacatcaccacacgaatcagtactaccatatggtgacaataccctccggcgctcggtccatccggatctacgaaatgaatgtttcaacttcatatattagcgtccggaacgcgctcaggagatattatcttaatggtcattggacggttgactggccaggtcgctacaagttctctggcactaccttcgattaccgccgttcctacaacgaaccagagaatctgatcgcgacaggtccaactaacgaaacccttattgttgaactgctctttcagggtcgcaaccctggcgttgcctgggagtatagcatgccaaggctgggcacggagaaacagccccctgcccagcccagctacacgtgggcgatcgtgcgctctgaatgctctgtatcctgtgggggcggccagatgacagtgagggagggatgctatcgcgatctgaaattccaagtcaatatgagcttttgcaaccctaagacccgcccagtgacggggctcgtaccttgtaaagtgtccgcctgcccgcccagctggtctgtgggcaactggtcagcgtgttcacgcacctgtggtggtggcgcacagtcccgaccagtccagtgtacaagacgcgtacattatgacagcgagcctgtgcctgcctcgttgtgtccccagcccgctcctagctcgcggcaagcatgcaactcccaaagctgtcctcccgcctggtccgcaggcccatgggccgaatgtagccatacgtgcgggaaggggtggcgtaagcgcgccgtggcctgcaaaagtactaatcccagcgccagggctcagttactccctgacgctgtctgtacctcggagcccaagccccgcatgcacgaggcctgcttgttacaaaggtgtcacaaacccaaaaagctgcaatggcttgtcagcgcttggtctcagtgtagcgtgacctgcgagaggggtacccaaaaaaggtttctgaagtgcgcagagaaatatgtgtcgggaaagtatagggaactggcaagcaagaagtgctcacacttgcctaagccctctctggagctcgaaagggcctgtgccccactgccgtgcccccggcacccgcctttcgcagcggccggaccaagtcgaggctcctggttcgctagcccctggagtcagtgtaccgcgagctgtggcgggggagttcagacacgatctgtgcaatgcctggccggcggacggcctgccagtggctgtctgctgcaccagaagcccagcgcatcccttgcttgtaatacacacttttgcccaatcgccgagaagaaagatgctttctgcaaagattactttcactggtgctatctcgtgccacagcacggaatgtgctcacacaaattctacggaaagcagtgttgcaagacctgttcaaaaagcaacctgtag

SEQ ID NO: 238029 - DNA, 2787 bp, Artificial Sequence
  derived and/or modified sequence
atgaagccccgggcccggggctggcggggcctggccgccctgtggatgctgcttgctcaggtggctgagcaagctcctgcgtgtgctatgggtccagcagctgcagcccctggcagtccgagcgtgccccgcccacctcccccggccgaacgtcctggatggatggaaaaaggcgagtacgatttagtctcagcctacgaggttgatcatcggggcgactatgtgagtcatgaaattatgcatcaccagcggaggagaagggcagtgcctgtttccgaagtggagtcattgcacctccgcctcaaggggagcagacacgactttcatatggacttgcggacatccagctctctggtggcacccggcttcatcgtgcagacactcggcaagaccggaacaaaatcggtgcagaccttgcctccagaggacttctgcttttaccaggggtcgctacggagccaccgcaattccagtgttgcgctttctacctgtcagggtctttccggcatgatccggaccgaagaggctgattactttttgagacctctgccctctcacctcagttggaaactcggaagagcggcacaaggaagcagccctagccatgtcctgtacaagcgatctaccgagccccacgcacccggagcctccgaagtcttagttaccagccggacctgggaacttgcccaccaacctttgcatagtagcgatctccgactcggattgcctcaaaaacagcacttctgcggtagacgcaaaaaatacatgccccagcctcctaaagaggacctgttcatcctgccagacgaatacaaaagttgcctgaggcataagcgatctttactgcggtcccatcgcaacgaagagctcaacgtcgagacattggttgtggtggataagaagatgatgcagaatcacgggcacgaaaatattaccacctacgtgctcactattctcaacatggtgagtgccttatttaaagacgggactatcggggggaatatcaacattgcaattgtgggactcatcctactggaggacgagcaacccggtcttgttataagccaccacgctgaccacacccttagttctttttgtcaatggcaatcaggactcatggggaaggatggcacccggcatgaccacgcaattcttctaacaggtctggacatatgttcctggaaaaacgaaccctgtgacactctcggcttcgcccctataagtggaatgtgttcgaagtatcgctcctgcactatcaatgaagacaccggcctgggactggcctttactatcgcccacgaaagcgggcacaactttggaatgatccacgacggggaggggaatatgtgtaaaaaaagcgagggcaatataatgtcgcccacgctggccgggaggaatggtgttttttcttggtcaccttgctccaggcagtatctccacaagttcctgtccacagcacaggcaatatgcctcgccgatcagccaaagccagttaaggagtacaagtaccctgagaaactcccgggagagctctacgatgccaatacccagtgcaagtggcaatttggggaaaaggccaagttatgcatgcttgattttaaaaaagatatctgcaaggcgctttggtgccataggatcggtcggaagtgcgaaaccaaatttatgccagctgcggagggcactatatgtggccatgacatgtggtgcaggggaggccaatgcgtcaagtacggggatgagggacctaagccaacacacggacactggtcagattggtcatcttggagcccgtgctcccggacctgcgggggtggggtgagccatagatcccggctttgtaccaaccccaagccctcccacggggggaaattttgcgagggttcaaccagaacactgaaactttgtaatagccagaagtgcccacgggacagcgtggacttccgtgctgcacaatgtgctgaacataatagccgtagatttaggggacggcactacaagtggaaaccgtatacccaggtggaagaccaggatttgtgcaagttgtattgcatcgccgagggcttcgactttttcttcagtttatccaataaggtcaaggacgggaccccctgctccgaagacagccggaacgtgtgcattgacggcatttgtgagcgggtgggttgcgataacgtcctgggctcagacgctgtggaggacgtctgtggcgtttgtaacggaaacaattcggcatgtacaattcatcgcggtctatataccaaacatcaccacacaaaccagtactaccacatggtgactatcccgagtggagccaggagcatccgcatatacgaaatgaacgtctcaaccagctatatttctgtgagaaatgccctcaggagatactacttaaatggccactggaccgtggactggcctggacgatataagttctctggtactacctttgattataggcggtcatacaatgaaccagaaaaccttatcgcgaccggacctaccaatgaaactctgattgtagaacttttattccaagggcgtaaccctggggtggcctgggagtattccatgcccaggctggggaccgagaagcagccccctgcccagcccagttacacctgggccattgtacgttcagaatgctccgtctcatgtgggggcgggcaaatgacggtccgggagggatgctatagggacttcttgtacttcatgttctacctctcccaactcttcgccagtgagtgtccattcaaaaacacgttgctgcacgccttcctgtgcaaatag

SEQ ID NO: 238030 - DNA, 3675 bp, Artificial Sequence
  derived and/or modified sequence
atgaaaccccgagccaggggctggcggggtctggcggctttatggatgttactggctcaggtcgccgaacaggcaccagcctgcgcgatgggcccagctgctgctgccccaggaagcccttccgtcccgagaccgccacctccagcggaaaggcccggttggatggagaagggcgaatacgacctggtttcagcttacgaggttgatcaccggggagactacgtgtcccatgaaattatgcaccaccagcggaggcgtcgtgcggtaccagtgtccgaggtcgagtccctgcacctccgccttaaaggctcacggcacgacttccacatggacctgcgaacaagtagctctctggtggcccctggatttatcgtacagacattgggtaaaacgggaacaaagtccgtccagaccctgccccctgaagacttttgtttttaccagggctctcttaggtcacacagaaacagctcagttgctttatccacatgtcagggactgtccggtatgattcggaccgaggaagctgactacttcctccggccactgccgtctcatctctcgtggaagttgggcagagcagctcagggttctagcccgagccacgtattgtacaaacgatccaccgagccgcacgctcccggtgcctctgaagttctcgtaacttcccgtacttgggagctggcccaccagccactgcacagctccgatctgcgtttaggactgccccagaagcagcatttttgtggccgaagaaaaaagtacatgccacagccccctaaggaggatctgtttatcctgccagacgaatataaatcctgcctgcggcataagcggagcctgcttcgctctcataggaatgaagagctcaacgttgaaacgttggttgttgtggacaaaaaaatgatgcagaatcatgggcacgaaaatatcaccacatacgtcttgacaatactcaatatggtcagcgccttattcaaggacggtactattggcggaaatattaacattgccatcgtcggactgatcctcctcgaggacgaacagccgggactggtcattagccaccatgccgaccacaccctcagctcgttctgccagtggcagtccggcctcatgggaaaagacggtacccggcatgatcacgcgatactacttacaggattagatatatgtagttggaaaaatgagccctgtgatacactggggtttgcacccatttccgggatgtgctccaagtatcgcagctgcaccatcaatgaagatactggactgggcttagcctttacgatcgctcatgagagtgggcacaattttgggatgattcatgatggcgaaggcaacatgtgtaagaagagcgagggaaacataatgagtcctaccctcgccggtaggaacggcgtattcagctggtcaccctgttcgcgccagtacctccacaagtttctttccacggcacaagctatttgcttggccgatcagccaaagcccgttaaggagtacaaatacccagagaagttgcctggtgagctgtatgacgcaaatactcagtgcaaatggcagttcggggagaaggctaaactgtgcatgctggatttcaaaaaggatatttgcaaggctctttggtgtcaccggatcggcaggaaatgtgagaccaaattcatgcccgcagcagaaggcacgatttgcggccatgacatgtggtgcagaggaggccagtgcgtgaagtatggagacgagggccctaagccgactcacggtcactggtcggattggagttcttggagtccgtgctctaggacttgcggtggcggagtctctcaccgatctaggctttgcacaaatcctaaaccaagccatggcggaaagttttgtgaaggctcgacacggactctgaaactatgcaacagccagaagtgcccaagagactctgtcgatttccgagccgcacagtgtgccgaacataattcaaggagattccggggaagacattataaatggaagccttacacacaagtggaggaccaggatctctgcaaactttactgcatcgctgaggggttcgactttttcttctccctgagcaacaaagtaaaagatggtacaccatgctctgaagatagtcgcaacgtctgtattgacggaatttgcgaaagggtaggttgtgataacgtgctcggcagcgacgcagtggaggatgtttgcggagtgtgtaacggcaacaacagcgcatgtactatccatagaggcctttataccaaacaccatcacaccaatcagtactaccatatggtcacgatcccttccggcgcaagatcaattcgcatttacgaaatgaacgtgtccactagttacatatccgtgcggaatgccctcagacgctattatcttaacggccactggacagtcgactggccaggacgatataaattctctgggacaacgtttgattatagaaggtcttataacgagcctgaaaatctgatcgctaccgggcctaccaacgaaacgcttattgtcgagcttctttttcaagggagaaatccgggtgtcgcttgggaatacagcatgccccgtctgggaactgagaaacagccaccggcacagccgtcttatacctgggctatagtaagatccgagtgctccgtctcttgcggtggagggcaaatgaccgtgagagagggttgctaccgagacttgaaatttcaggttaacatgagtttctgcaacccaaaaactcggccagttacaggactggtgccttgtaaggtttccgcttgtcccccatcatggagtgtgggaaattggtcagcctgctcccgcacttgcggtgggggagcgcagtctcgtccggtccaatgcacaaggagagttcattacgattccgagcccgtgccagctagtctgtgccctcaacccgctccttctagcaggcaggcctgtaactcacagtcctgtccccctgcctggagcgccggaccctgggcagaatgctcccacacatgcggcaaaggatggcgcaagcgggcagtggcatgtaaatcaaccaatccaagtgcacgggctcagctgttgccagatgccgtttgcaccagtgagcccaagccccgtatgcacgaggcatgtctcctgcagaggtgccacaagccaaagaagctacagtggttggtgtccgcatggtcccagtgctccgtcacctgcgaacgaggtacccagaagcggttcctgaagtgtgccgagaaatatgtgtcagggaagtaccgcgaactcgcaagtaaaaagtgctctcatcttcccaagccttctctggagctggagcgtgcctgtgccccactgccctgcccaaggcacccgccattcgccgctgctggtccttccagaggctcgtggttcgcgagcccctggtcccagtgtacagctagttgcggtggcggagtgcaaactagatctgtgcagtgcctcgcagggggtcggccagcgtctggctgcctgttgcatcagaagccgagtgcttctctcgcatgcaacacccatttttgtccgattgccgagaagaaagacgctttttgtaaggactacttccactggtgttacctcgttccacagcatgggatgtgctctcacaaattttatgggaaacagtgctgcaagacctgtagcaagagcaatctgtag

SEQ ID NO: 238031 - DNA, 2787 bp, Artificial Sequence
  derived and/or modified sequence
atgaagcccagggcccgaggatggcggggtctggctgctctgtggatgttgctcgcccaggttgcagagcaggctcccgcttgcgccatggggccagccgctgccgcacctggttcgccctcggtgcccaggccgcctcctcctgccgagagaccagggtggatggagaagggggaatatgatctggtgagtgcttacgaagtggaccataggggtgactacgtaagccacgagatcatgcaccatcagcggagaagacgcgctgtgccggtcagcgaagtggagtcactgcacctgaggttaaaagggtcacgccacgacttccacatggatttacgcacgagctcctcccttgttgctcctgggtttatcgtgcaaacgctgggaaagacagggaccaaatcggtccagactttaccaccagaagatttctgtttttatcagggatctctccgtagccatcgcaatagtagcgttgccttgtctacttgtcagggtctatcaggaatgatccgaaccgaggaagctgattacttcctgcgccctctacctagccacctcagttggaagctgggcagagcggctcaagggtcctccccttcacatgtgctctacaagaggtctaccgaaccccacgcacccggtgccagcgaggtgctcgtgacatctaggacctgggaactcgcccaccaaccgctgcatagcagtgacctccgcctggggctgccacaaaagcagcacttctgtgggaggagaaagaaatatatgccccagccccctaaggaagatttattcatccttcccgacgagtataaatcctgcttaagacacaagcggtcactgttgcgttcacacaggaatgaggaacttaatgtcgaaacacttgtcgtcgttgataagaaaatgatgcaaaaccatggccacgagaacatcacgacttacgtgctgactatacttaatatggtatccgcattattcaaagatggcaccatcggaggaaatattaatattgccatcgtcgggcttattctcctcgaagacgaacaaccaggactggtgatatcgcatcatgcagatcatacactgagtagtttttgtcaatggcagtccgggctcatgggcaaggatgggactcgccatgatcacgccatcttgcttaccgggctggacatatgcagctggaaaaacgagccatgtgatacattggggttcgctccaatctcaggtatgtgttctaaatacaggagttgtaccattaacgaggacacgggtcttgggctcgcgttcacaatcgcacacgaaagcggccataactttggcatgattcacgatggggagggcaacatgtgcaagaagagtgaaggcaacatcatgagccctactctcgcagggagaaatggagtcttcagttggtccccatgttcccgacagtacttgcacaagttcctctcaactgcacaggccatctgtttagctgatcagcccaaacccgtaaaggagtacaaatacccggagaaactgcctggcgaactgtatgacgcgaacacccagtgtaagtggcagttcggggagaaggccaagctgtgtatgctggactttaagaaggatatctgtaaagccctctggtgtcatcggattggccgtaagtgtgagaccaagtttatgcctgctgccgaggggaccatctgtgggcacgatatgtggtgccggggtggccagtgcgtcaaatatggtgacgagggccctaagcccacccatggccactggagcgattggagttcgtggagcccttgttctagaacatgcggtgggggtgtctcacaccgcagtcggctgtgtactaatcccaagccaagtcatggcggtaagttctgtgaaggctcaactcgcacactgaaactgtgcaactcacagaaatgcccacgggactccgtggactttcgtgccgcacagtgcgcagagcataatagccggagatttagaggtaggcattacaaatggaagccgtacacccaagttgaggaccaggatctctgcaagctgtactgtatcgctgaagggtttgacttctttttttctttgtctaacaaggtcaaggacggaacaccttgttctgaagattcccggaatgtgtgcattgacggtatctgcgaaagggtggggtgtgataatgtgctcggcagcgacgctgttgaggacgtatgtggcgtatgcaatggcaacaatagcgcgtgtacaatccatcgcggactgtacactaaacatcaccataccaaccagtactatcatatggtgaccattccgagtggtgcaaggtcaattcggatttacgagatgaacgtgtctacctcatatatctctgtgcgcaatgccctaagaagatattaccttaacggccattggaccgtggactggccaggtcgctacaaattcagcggcacgacattcgattacaggaggtcatacaacgagccagagaacctgattgctaccggcccaaccaatgaaacactcatagtggagctcctgtttcagggacgcaacccgggtgttgcatgggagtacagtatgcctcggctcgggacggagaagcagccacctgcccagccctcctatacctgggcgattgtgcgttctgaatgctcagtgtcatgtggagggggacagatgaccgtcagggaaggctgttaccgggacttcctgtatttcatgttctacctctcccagctttttgcttctgagtgccccttcaaaaacacattgcttcatgcattcctgtgtaaatag

SEQ ID NO: 238032 - DNA, 3675 bp, Artificial Sequence
  derived and/or modified sequence
atgaagcccagagccagaggctggagaggcctggccgccctgtggatgctgctggcccaggtggccgagcaggcccccgcctgcgccatgggccccgccgccgccgcccccggcagccccagcgtgcccagaccccccccccccgccgagagacccggctggatggagaagggcgagtacgacctggtgagcgcctacgaggtggaccacagaggcgactacgtgagccacgagatcatgcaccaccagagaagaagaagagccgtgcccgtgagcgaggtggagagcctgcacctgagactgaagggcagcagacacgacttccacatggacctgagaaccagcagcagcctggtggcccccggcttcatcgtgcagaccctgggcaagaccggcaccaagagcgtgcagaccctgccccccgaggacttctgcttctaccagggcagcctgagaagccacagaaacagcagcgtggccctgagcacctgccagggcctgagcggcatgatcagaaccgaggaggccgactacttcctgagacccctgcccagccacctgagctggaagctgggcagagccgcccagggcagcagccccagccacgtgctgtacaagagaagcaccgagccccacgcccccggcgccagcgaggtgctggtgaccagcagaacctgggagctggcccaccagcccctgcacagcagcgacctgagactgggcctgccccagaagcagcacttctgcggcagaagaaagaagtacatgccccagccccccaaggaggacctgttcatcctgcccgacgagtacaagagctgcctgagacacaagagaagcctgctgagaagccacagaaacgaggagctgaacgtggagaccctggtggtggtggacaagaagatgatgcagaaccacggccacgagaacatcaccacctacgtgctgaccatcctgaacatggtgagcgccctgttcaaggacggcaccatcggcggcaacatcaacatcgccatcgtgggcctgatcctgctggaggacgagcagcccggcctggtgatcagccaccacgccgaccacaccctgagcagcttctgccagtggcagagcggcctgatgggcaaggacggcaccagacacgaccacgccatcctgctgaccggcctggacatctgcagctggaagaacgagccctgcgacaccctgggcttcgcccccatcagcggcatgtgcagcaagtacagaagctgcaccatcaacgaggacaccggcctgggcctggccttcaccatcgcccacgagagcggccacaacttcggcatgatccacgacggcgagggcaacatgtgcaagaagagcgagggcaacatcatgagccccaccctggccggcagaaacggcgtgttcagctggagcccctgcagcagacagtacctgcacaagttcctgagcaccgcccaggccatctgcctggccgaccagcccaagcccgtgaaggagtacaagtaccccgagaagctgcccggcgagctgtacgacgccaacacccagtgcaagtggcagttcggcgagaaggccaagctgtgcatgctggacttcaagaaggacatctgcaaggccctgtggtgccacagaatcggcagaaagtgcgagaccaagttcatgcccgccgccgagggcaccatctgcggccacgacatgtggtgcagaggcggccagtgcgtgaagtacggcgacgagggccccaagcccacccacggccactggagcgactggagcagctggagcccctgcagcagaacctgcggcggcggcgtgagccacagaagcagactgtgcaccaaccccaagcccagccacggcggcaagttctgcgagggcagcaccagaaccctgaagctgtgcaacagccagaagtgccccagagacagcgtggacttcagagccgcccagtgcgccgagcacaacagcagaagattcagaggcagacactacaagtggaagccctacacccaggtggaggaccaggacctgtgcaagctgtactgcatcgccgagggcttcgacttcttcttcagcctgagcaacaaggtgaaggacggcaccccctgcagcgaggacagcagaaacgtgtgcatcgacggcatctgcgagagagtgggctgcgacaacgtgctgggcagcgacgccgtggaggacgtgtgcggcgtgtgcaacggcaacaacagcgcctgcaccatccacagaggcctgtacaccaagcaccaccacaccaaccagtactaccacatggtgaccatccccagcggcgccagaagcatcagaatctacgagatgaacgtgagcaccagctacatcagcgtgagaaacgccctgagaagatactacctgaacggccactggaccgtggactggcccggcagatacaagttcagcggcaccaccttcgactacagaagaagctacaacgagcccgagaacctgatcgccaccggccccaccaacgagaccctgatcgtggagctgctgttccagggcagaaaccccggcgtggcctgggagtacagcatgcccagactgggcaccgagaagcagccccccgcccagcccagctacacctgggccatcgtgagaagcgagtgcagcgtgagctgcggcggcggccagatgaccgtgagagagggctgctacagagacctgaagttccaggtgaacatgagcttctgcaaccccaagaccagacccgtgaccggcctggtgccctgcaaggtgagcgcctgcccccccagctggagcgtgggcaactggagcgcctgcagcagaacctgcggcggcggcgcccagagcagacccgtgcagtgcaccagaagagtgcactacgacagcgagcccgtgcccgccagcctgtgcccccagcccgcccccagcagcagacaggcctgcaacagccagagctgcccccccgcctggagcgccggcccctgggccgagtgcagccacacctgcggcaagggctggagaaagagagccgtggcctgcaagagcaccaaccccagcgccagagcccagctgctgcccgacgccgtgtgcaccagcgagcccaagcccagaatgcacgaggcctgcctgctgcagagatgccacaagcccaagaagctgcagtggctggtgagcgcctggagccagtgcagcgtgacctgcgagagaggcacccagaagagattcctgaagtgcgccgagaagtacgtgagcggcaagtacagagagctggccagcaagaagtgcagccacctgcccaagcccagcctggagctggagagagcctgcgcccccctgccctgccccagacacccccccttcgccgccgccggccccagcagaggcagctggttcgccagcccctggagccagtgcaccgccagctgcggcggcggcgtgcagaccagaagcgtgcagtgcctggccggcggcagacccgccagcggctgcctgctgcaccagaagcccagcgccagcctggcctgcaacacccacttctgccccatcgccgagaagaaggacgccttctgcaaggactacttccactggtgctacctggtgccccagcacggcatgtgcagccacaagttctacggcaagcagtgctgcaagacctgcagcaagagcaacctgtag

SEQ ID NO: 238033 - DNA, 2787 bp, Artificial Sequence
  derived and/or modified sequence
atgaagcccagagccagaggctggagaggcctggccgccctgtggatgctgctggcccaggtggccgagcaggcccccgcctgcgccatgggccccgccgccgccgcccccggcagccccagcgtgcccagaccccccccccccgccgagagacccggctggatggagaagggcgagtacgacctggtgagcgcctacgaggtggaccacagaggcgactacgtgagccacgagatcatgcaccaccagagaagaagaagagccgtgcccgtgagcgaggtggagagcctgcacctgagactgaagggcagcagacacgacttccacatggacctgagaaccagcagcagcctggtggcccccggcttcatcgtgcagaccctgggcaagaccggcaccaagagcgtgcagaccctgccccccgaggacttctgcttctaccagggcagcctgagaagccacagaaacagcagcgtggccctgagcacctgccagggcctgagcggcatgatcagaaccgaggaggccgactacttcctgagacccctgcccagccacctgagctggaagctgggcagagccgcccagggcagcagccccagccacgtgctgtacaagagaagcaccgagccccacgcccccggcgccagcgaggtgctggtgaccagcagaacctgggagctggcccaccagcccctgcacagcagcgacctgagactgggcctgccccagaagcagcacttctgcggcagaagaaagaagtacatgccccagccccccaaggaggacctgttcatcctgcccgacgagtacaagagctgcctgagacacaagagaagcctgctgagaagccacagaaacgaggagctgaacgtggagaccctggtggtggtggacaagaagatgatgcagaaccacggccacgagaacatcaccacctacgtgctgaccatcctgaacatggtgagcgccctgttcaaggacggcaccatcggcggcaacatcaacatcgccatcgtgggcctgatcctgctggaggacgagcagcccggcctggtgatcagccaccacgccgaccacaccctgagcagcttctgccagtggcagagcggcctgatgggcaaggacggcaccagacacgaccacgccatcctgctgaccggcctggacatctgcagctggaagaacgagccctgcgacaccctgggcttcgcccccatcagcggcatgtgcagcaagtacagaagctgcaccatcaacgaggacaccggcctgggcctggccttcaccatcgcccacgagagcggccacaacttcggcatgatccacgacggcgagggcaacatgtgcaagaagagcgagggcaacatcatgagccccaccctggccggcagaaacggcgtgttcagctggagcccctgcagcagacagtacctgcacaagttcctgagcaccgcccaggccatctgcctggccgaccagcccaagcccgtgaaggagtacaagtaccccgagaagctgcccggcgagctgtacgacgccaacacccagtgcaagtggcagttcggcgagaaggccaagctgtgcatgctggacttcaagaaggacatctgcaaggccctgtggtgccacagaatcggcagaaagtgcgagaccaagttcatgcccgccgccgagggcaccatctgcggccacgacatgtggtgcagaggcggccagtgcgtgaagtacggcgacgagggccccaagcccacccacggccactggagcgactggagcagctggagcccctgcagcagaacctgcggcggcggcgtgagccacagaagcagactgtgcaccaaccccaagcccagccacggcggcaagttctgcgagggcagcaccagaaccctgaagctgtgcaacagccagaagtgccccagagacagcgtggacttcagagccgcccagtgcgccgagcacaacagcagaagattcagaggcagacactacaagtggaagccctacacccaggtggaggaccaggacctgtgcaagctgtactgcatcgccgagggcttcgacttcttcttcagcctgagcaacaaggtgaaggacggcaccccctgcagcgaggacagcagaaacgtgtgcatcgacggcatctgcgagagagtgggctgcgacaacgtgctgggcagcgacgccgtggaggacgtgtgcggcgtgtgcaacggcaacaacagcgcctgcaccatccacagaggcctgtacaccaagcaccaccacaccaaccagtactaccacatggtgaccatccccagcggcgccagaagcatcagaatctacgagatgaacgtgagcaccagctacatcagcgtgagaaacgccctgagaagatactacctgaacggccactggaccgtggactggcccggcagatacaagttcagcggcaccaccttcgactacagaagaagctacaacgagcccgagaacctgatcgccaccggccccaccaacgagaccctgatcgtggagctgctgttccagggcagaaaccccggcgtggcctgggagtacagcatgcccagactgggcaccgagaagcagccccccgcccagcccagctacacctgggccatcgtgagaagcgagtgcagcgtgagctgcggcggcggccagatgaccgtgagagagggctgctacagagacttcctgtacttcatgttctacctgagccagctgttcgccagcgagtgccccttcaagaacaccctgctgcacgccttcctgtgcaagtag

SEQ ID NO: 238034 - DNA, 4979 bp, Artificial Sequence
  derived and/or modified sequence
agtaataaccccggcgcggcggcggagtcgctgtggggaatcctcccgcgctctgcctgggtcgggtcctccctgcccgctcgcacgctgccggccggggaccctccggtggcccctagcccctcggagcgctcctggatgaagccccgcgcgcgcggatggcggggcttggcggcgctgtggatgctgttggcgcaggtggccgagcaggcacctgcgtgcgccatgggacccgcagcggcagcgcctgggagcccgagcgtcccgcgtcctcctccacccgcggagcggccgggctggatggaaaagggcgaatatgacctggtctctgcctacgaggttgaccacaggggcgattacgtgtcccatgaaatcatgcaccatcagcggcggagaagagcagtgcccgtgtccgaggttgagtctcttcaccttcggctgaaaggctccaggcacgacttccacatggatctgaggacttccagcagcctagtggctcctggctttattgtgcagacgttgggaaagacaggcactaagtctgtgcagactttaccgccagaggacttctgtttctatcaaggctctttgcgatcacacagaaactcctcagtggccctttcaacctgccaaggcttgtcaggcatgatacgaacagaagaggcagattacttcctaaggccacttccttcacacctctcatggaaactcggcagagctgcccaaggcagctcgccatcccacgtactgtacaagagatccacagagccccatgctcctggggccagtgaggtcctggtgacctcaaggacatgggagctggcacatcaacccctgcacagcagcgaccttcgcctgggactgccacaaaagcagcatttctgtggaagacgcaagaaatacatgccccagcctcccaaggaagacctcttcatcttgccagatgagtataagtcttgcttacggcataagcgctctcttctgaggtcccatagaaatgaagaactgaacgtggagaccttggtggtggtcgacaaaaagatgatgcaaaaccatggccatgaaaatatcaccacctacgtgctcacgatactcaacatggtatctgctttattcaaagatggaacaataggaggaaacatcaacattgcaattgtaggtctgattcttctagaagatgaacagccaggactggtgataagtcaccacgcagaccacaccttaagtagcttctgccagtggcagtctggattgatggggaaagatgggactcgtcatgaccacgccatcttactgactggtctggatatatgttcctggaagaatgagccctgtgacactttgggatttgcacccataagtggaatgtgtagtaaatatcgcagctgcacgattaatgaagatacaggtcttggactggccttcaccattgcccatgagtctggacacaactttggcatgattcatgatggagaagggaacatgtgcaaaaagtccgagggcaacatcatgtcccctacattggcaggacgcaatggagtcttctcctggtcaccctgcagccgccagtatctacacaaatttctaagcaccgctcaagctatctgccttgctgatcagccaaagcctgtgaaggaatacaagtatcctgagaaattgccaggagaattatatgatgcaaacacacagtgcaagtggcagttcggagagaaagccaagctctgcatgctggactttaaaaaggacatctgtaaagccctgtggtgccatcgtattggaaggaaatgtgagactaaatttatgccagcagcagaaggcacaatttgtgggcatgacatgtggtgccggggaggacagtgtgtgaaatatggtgatgaaggccccaagcccacccatggccactggtcggactggtcttcttggtccccatgctccaggacctgcggagggggagtatctcataggagtcgcctctgcaccaaccccaagccatcgcatggagggaagttctgtgagggctccactcgcactctgaagctctgcaacagtcagaaatgtccccgggacagtgttgacttccgtgctgctcagtgtgccgagcacaacagcagacgattcagagggcggcactacaagtggaagccttacactcaagtagaagatcaggacttatgcaaactctactgtatcgcagaaggatttgatttcttcttttctttgtcaaataaagtcaaagatgggactccatgctcggaggatagccgtaatgtttgtatagatgggatatgtgagagagttggatgtgacaatgtccttggatctgatgctgttgaagacgtctgtggggtgtgtaacgggaataactcagcctgcacgattcacaggggtctctacaccaagcaccaccacaccaaccagtattatcacatggtcaccattccttctggagcccggagtatccgcatctatgaaatgaacgtctctacctcctacatttctgtgcgcaatgccctcagaaggtactacctgaatgggcactggaccgtggactggcccggccggtacaaattttcgggcactactttcgactacagacggtcctataatgagcccgagaacttaatcgctactggaccaaccaacgagacactgattgtggagctgctgtttcagggaaggaacccgggtgttgcctgggaatactccatgcctcgcttggggaccgagaagcagccccctgcccagcccagctacacttgggccatcgtgcgctctgagtgctccgtgtcctgcggagggggacagatgaccgtgagagagggctgctacagagacctgaagtttcaagtaaatatgtccttctgcaatcccaagacacgacctgtcacggggctggtgccttgcaaagtatctgcctgtcctcccagctggtccgtggggaactggagtgcctgcagtcggacgtgtggcgggggtgcccagagccgccccgtgcagtgcacacggcgggtgcactatgactcggagccagtcccggccagcctgtgccctcagcctgctccctccagcaggcaggcctgcaactctcagagctgcccacctgcatggagcgccgggccctgggcagagtgctcacacacctgtgggaaggggtggaggaagcgggcagtggcctgtaagagcaccaacccctcggccagagcgcagctgctgcccgacgctgtctgcacctccgagcccaagcccaggatgcatgaagcctgtctgcttcagcgctgccacaagcccaagaagctgcagtggctggtgtccgcctggtcccagtgctctgtgacatgtgaaagaggaacacagaaaagattcttaaaatgtgctgaaaagtatgtttctggaaagtatcgagagctggcctcaaagaagtgctcacatttgccgaagcccagcctggagctggaacgtgcctgcgccccgcttccatgccccaggcaccccccatttgctgctgcgggaccctcgaggggcagctggtttgcctcaccctggtctcagtgcacggccagctgtgggggaggcgttcagacgaggtccgtgcagtgcctggctgggggccggccggcctcaggctgcctcctgcaccagaagccttcggcctccctggcctgcaacactcacttctgccccattgcagagaagaaagatgccttctgcaaagactacttccactggtgctacctggtaccccagcacgggatgtgcagccacaagttctacggcaagcagtgctgcaagacttgctctaagtccaacttgtgagttgggaccgctctccgtagcagagaaagtgcctgcgtggcacagaaatttcccacaaatgagctgtgcaatctacgtcggaatacatccaaggaagagcaaagccaaaagaagaaaaccgtgttaggctctttgaccaggagtgtatgtatgtgtttcactgtgagcctgggtgcagacctgtgtccccatgcacacagtgtctcctgtcaggctgaaatgtggcaccctggcagacagagctgtggctcgtgaggcagaaggcaggcaccacaacgggagaggcagcactcacccctgcctgttgcagctaaatcaagtcaaaaagacaggcgaggctgaacttgctaaatgtctggtgccttagaaaaagaaggaaaggccatgaaataaggaaaacatacaaaatatgtaccccctagttcaccagcctcccctcccactaggagggcccctcgagccatcaggagtgaccaacttcctgggtggaggtcaggggagctccaggaggctgcccaggctcctcctcctcctccccagcggccgagcatctcttaccaggaacctggagccaccgccggagccagcgtcatctctagggtcactggccaggggactgcattctggtttgggactttgcctatggaaatgggaaaaatgaaattcctgctaaggtgcttctatctctttcagattcatgcattgaaggagagattttttatactttatgttttatctttctcagttatttgcaagtgagtgtccttttaaaaacacacttcttcatgcttttctttgtaaatgacagatcgaagtataggttacatcaaaaccctaccatcctgagaagagttatggttctattatagcagacgtcagccacacagcctatgtgacaataaccttagagtcctgtgttttgtttttgtgtgttgtgagattttaatcttttttttttcggtgagtctggccatttctataatgccaggtgggaagccaggctgcgggtgttagggtgggaatctgcccggcgtctctggcaccctccctgccatcctcagtgcggctgctgttctcctgtccggtgctgtggctccattccaaaggggcacctggatatttatatttgctgaagttttataataaagtttatatggtacagtgtg

SEQ ID NO: 238035 - DNA, 3286 bp, Artificial Sequence
  derived and/or modified sequence
agtaataaccccggcgcggcggcggagtcgctgtggggaatcctcccgcgctctgcctgggtcgggtcctccctgcccgctcgcacgctgccggccggggaccctccggtggcccctagcccctcggagcgctcctggatgaagccccgcgcgcgcggatggcggggcttggcggcgctgtggatgctgttggcgcaggtggccgagcaggcacctgcgtgcgccatgggacccgcagcggcagcgcctgggagcccgagcgtcccgcgtcctcctccacccgcggagcggccgggctggatggaaaagggcgaatatgacctggtctctgcctacgaggttgaccacaggggcgattacgtgtcccatgaaatcatgcaccatcagcggcggagaagagcagtgcccgtgtccgaggttgagtctcttcaccttcggctgaaaggctccaggcacgacttccacatggatctgaggacttccagcagcctagtggctcctggctttattgtgcagacgttgggaaagacaggcactaagtctgtgcagactttaccgccagaggacttctgtttctatcaaggctctttgcgatcacacagaaactcctcagtggccctttcaacctgccaaggcttgtcaggcatgatacgaacagaagaggcagattacttcctaaggccacttccttcacacctctcatggaaactcggcagagctgcccaaggcagctcgccatcccacgtactgtacaagagatccacagagccccatgctcctggggccagtgaggtcctggtgacctcaaggacatgggagctggcacatcaacccctgcacagcagcgaccttcgcctgggactgccacaaaagcagcatttctgtggaagacgcaagaaatacatgccccagcctcccaaggaagacctcttcatcttgccagatgagtataagtcttgcttacggcataagcgctctcttctgaggtcccatagaaatgaagaactgaacgtggagaccttggtggtggtcgacaaaaagatgatgcaaaaccatggccatgaaaatatcaccacctacgtgctcacgatactcaacatggtatctgctttattcaaagatggaacaataggaggaaacatcaacattgcaattgtaggtctgattcttctagaagatgaacagccaggactggtgataagtcaccacgcagaccacaccttaagtagcttctgccagtggcagtctggattgatggggaaagatgggactcgtcatgaccacgccatcttactgactggtctggatatatgttcctggaagaatgagccctgtgacactttgggatttgcacccataagtggaatgtgtagtaaatatcgcagctgcacgattaatgaagatacaggtcttggactggccttcaccattgcccatgagtctggacacaactttggcatgattcatgatggagaagggaacatgtgcaaaaagtccgagggcaacatcatgtcccctacattggcaggacgcaatggagtcttctcctggtcaccctgcagccgccagtatctacacaaatttctaagcaccgctcaagctatctgccttgctgatcagccaaagcctgtgaaggaatacaagtatcctgagaaattgccaggagaattatatgatgcaaacacacagtgcaagtggcagttcggagagaaagccaagctctgcatgctggactttaaaaaggacatctgtaaagccctgtggtgccatcgtattggaaggaaatgtgagactaaatttatgccagcagcagaaggcacaatttgtgggcatgacatgtggtgccggggaggacagtgtgtgaaatatggtgatgaaggccccaagcccacccatggccactggtcggactggtcttcttggtccccatgctccaggacctgcggagggggagtatctcataggagtcgcctctgcaccaaccccaagccatcgcatggagggaagttctgtgagggctccactcgcactctgaagctctgcaacagtcagaaatgtccccgggacagtgttgacttccgtgctgctcagtgtgccgagcacaacagcagacgattcagagggcggcactacaagtggaagccttacactcaagtagaagatcaggacttatgcaaactctactgtatcgcagaaggatttgatttcttcttttctttgtcaaataaagtcaaagatgggactccatgctcggaggatagccgtaatgtttgtatagatgggatatgtgagagagttggatgtgacaatgtccttggatctgatgctgttgaagacgtctgtggggtgtgtaacgggaataactcagcctgcacgattcacaggggtctctacaccaagcaccaccacaccaaccagtattatcacatggtcaccattccttctggagcccggagtatccgcatctatgaaatgaacgtctctacctcctacatttctgtgcgcaatgccctcagaaggtactacctgaatgggcactggaccgtggactggcccggccggtacaaattttcgggcactactttcgactacagacggtcctataatgagcccgagaacttaatcgctactggaccaaccaacgagacactgattgtggagctgctgtttcagggaaggaacccgggtgttgcctgggaatactccatgcctcgcttggggaccgagaagcagccccctgcccagcccagctacacttgggccatcgtgcgctctgagtgctccgtgtcctgcggagggggacagatgaccgtgagagagggctgctacagagattttttatactttatgttttatctttctcagttatttgcaagtgagtgtccttttaaaaacacacttcttcatgcttttctttgtaaatgacagatcgaagtataggttacatcaaaaccctaccatcctgagaagagttatggttctattatagcagacgtcagccacacagcctatgtgacaataaccttagagtcctgtgttttgtttttgtgtgttgtgagattttaatcttttttttttcggtgagtctggccatttctataatgccaggtgggaagccaggctgcgggtgttagggtgggaatctgcccggcgtctctggcaccctccctgccatcctcagtgcggctgctgttctcctgtccggtgctgtggctccattccaaaggggcacctggatatttatatttgctgaagttttataataaagtttatatggtacagtgtg

SEQ ID NO: 238036 - protein, 1095 aa, Artificial Sequence
  derived and/or modified sequence
MCDGALLPPLVLPVLLLLVWGLDPGTAVGDAAADVEVVLPWRVRPDDVHLPPLPAAPGPRRRRRPRTPPAAPRARPGERALLLHLPAFGRDLYLQLRRDLRFLSRGFEVEEAGAARRRGRPAELCFYSGRVLGHPGSLVSLSACGAAGGLVGLIQLGQEQVLIQPLNNSQGPFSGREHLIRRKWSLTPSPSAEAQRPEQLCKVLTEKKKPTWGRPSRDWRERRNAIRLTSEHTVETLVVADADMVQYHGAEAAQRFILTVMNMVYNMFQHQSLGIKINIQVTKLVLLRQRPAKLSIGHHGERSLESFCHWQNEEYGGARYLGNNQVPGGKDDPPLVDAAVFVTRTDFCVHKDEPCDTVGIAYLGGVCSAKRKCVLAEDNGLNLAFTIAHELGHNLGMNHDDDHSSCAGRSHIMSGEWVKGRNPSDLSWSSCSRDDLENFLKSKVSTCLLVTDPRSQHTVRLPHKLPGMHYSANEQCQILFGMNATFCRNMEHLMCAGLWCLVEGDTSCKTKLDPPLDGTECGADKWCRAGECVSKTPIPEHVDGDWSPWGAWSMCSRTCGTGARFRQRKCDNPPPGPGGTHCPGASVEHAVCENLPCPKGLPSFRDQQCQAHDRLSPKKKGLLTAVVVDDKPCELYCSPLGKESPLLVADRVLDGTPCGPYETDLCVHGKCQKIGCDGIIGSAAKEDRCGVCSGDGKTCHLVKGDFSHARGTALKDSGKGSINSDWKIELPGEFQIAGTTVRYVRRGLWEKISAKGPTKLPLHLMVLLFHDQDYGIHYEYTVPVNRTAENQSEPEKPQDSLFIWTHSGWEGCSVQCGGGERRTIVSCTRIVNKTTTLVNDSDCPQASRPEPQVRRCNLHPCQSRWVAGPWSPCSATCEKGFQHREVTCVYQLQNGTHVATRPLYCPGPRPAAVQSCEGQDCLSIWEASEWSQCSASCGKGVWKRTVACTNSQGKCDASTRPRAEEACEDYSGCYEWKTGDWSTCSSTCGKGLQSRVVQCMHKVTGRHGSECPALSKPAPYRQCYQEVCNDRINANTITSPRLAALTYKCTRDQWTVYCRVIREKNLCQDMRWYQRCCQTCRDFYANKMRQPPPNS

SEQ ID NO: 238037 - DNA, 3288 bp, Artificial Sequence
  derived and/or modified sequence
atgtgcgacggcgcccttctcccgcccctggtgctgcccgtgctgctgcttcttgtgtgggggcttgaccccggcacagcagttggcgacgccgccgccgacgtagaagtggtgttaccatggagagtgcggcccgatgacgtgcacttgccaccgctgcccgcggcacccggacctagaagaaggagacggccccgcactcccccagccgctccaagggcgagacctggcgaacgagctctgcttctgcacctgcctgccttcggccgagatttatatctccaattgcgaagggacctgaggttcttgagcagagggtttgaggttgaggaagccggcgccgcgagacgtcgcggccgccctgctgagctatgtttctactccggtcgggtgctcggacatccggggtcactggtctccctgagcgcttgcggagccgctggggggctggtggggctgatccagctggggcaggagcaggtgctcatacagccactcaacaattcccagggcccattctctggcagggagcatttaatccggaggaaatggtccctaacaccttctccttctgccgaagcgcagaggccggagcaactgtgcaaagtgctgacagagaagaagaagccaacttggggtaggccgtcccgtgattggagagagaggcggaatgctatacgattgacctccgaacatacagtagagacacttgtggtagccgacgccgatatggtccagtatcacggggccgaggccgcccagcgtttcatattaaccgtgatgaacatggtgtacaacatgttccagcatcaatctctaggcataaaaataaacatccaggtgacaaagttagttctgctgcgccagcgaccagccaagctatcaattggtcaccatggcgaaagatcactcgaatccttttgtcactggcagaacgaagaatatggcggcgccagatatttggggaacaaccaggtgcccggggggaaagacgatccaccactggttgacgcagccgtttttgtgacacgcaccgatttctgtgtccataaggacgagccgtgcgacactgtgggtattgcgtatctaggtggcgtctgtagtgctaagcggaagtgcgtcctggcagaagataatggtctcaacctggctttcacgattgcccatgagctggggcacaacttgggcatgaatcacgatgacgaccattcctcttgcgcgggaagaagtcacataatgtctggcgaatgggttaaggggcgtaatccgtccgatttgtcgtggtccagttgttctcgggatgatctagagaatttcctcaagagcaaagtcagtacctgcctcctggtaactgaccctcgaagccagcacaccgtgcgccttccccataagctcccgggaatgcattacagtgctaatgagcagtgtcagatactgttcggtatgaatgccaccttttgccggaacatggaacaccttatgtgcgccgggctctggtgtctggtggagggtgatacctcttgtaagacaaaacttgaccctcctctggacggaacggagtgcggagcagacaaatggtgccgggcgggtgaatgtgtgtctaagaccccgattcccgaacacgtagacggagactggagtccgtggggcgcctggagcatgtgctccagaacgtgcggaaccggtgcgcgctttcgacagaggaaatgcgataatcctccgccaggccccggtggtactcactgccctggcgccagtgttgaacatgccgtgtgtgaaaatctgccatgcccaaaaggattgccctcctttagagaccagcagtgtcaggctcacgatcgcttatcaccgaaaaagaaggggctccttaccgccgttgtcgtggacgacaaaccatgcgagctctactgttccccacttggaaaggagagtcccctcctagtggctgatagagtcctcgacgggacgccttgtggcccatatgaaaccgatctttgcgtgcatggcaagtgtcagaaaattggatgcgatgggatcataggctccgccgccaaagaggacaggtgtggtgtatgtagcggcgatgggaagacttgtcacttggtgaagggagatttcagccacgccagaggcactgcacttaaggacagtggcaagggatctatcaactctgactggaagatagagctacccggagagttccagattgcagggaccactgtcaggtacgtcaggcgcggactgtgggagaagatcagtgcgaaggggcctacaaaactgcctctccatcttatggtgctgcttttccacgaccaggattacggaatacactacgaatatacggtgcccgtaaacagaactgctgaaaaccagtctgaaccggaaaaaccacaggattctctatttatttggactcactcgggatgggaaggatgttccgttcaatgcggaggtggggaaaggcgcaccatcgtgagctgtacaagaattgttaacaagacaacaactctggtcaatgatagtgactgcccacaggcctcaaggcccgagccacaggtaagacgctgcaatctgcatccatgccagagcagatgggtggccggcccctggtcaccttgctccgctacctgcgaaaagggttttcagcaccgcgaggtaacgtgtgtttatcagctgcaaaacgggacacacgttgcaacaagacctctgtactgccctgggccacgccctgccgccgtgcaatcctgcgaaggtcaggactgcttgtctatttgggaagcgtcagagtggagccagtgctctgccagctgtggaaagggggtctggaagcggacagtggcttgtaccaattcgcagggcaaatgcgatgcttctactcgccctcgggcagaggaggcctgtgaggactactctgggtgctatgaatggaaaactggtgactggtctacatgctctagcacctgtggtaaggggttacagagtagggtggtacaatgcatgcataaggtcactggcaggcatggctccgaatgtcccgccctcagtaagccagctccataccggcagtgttaccaggaagtttgcaatgacaggataaacgccaacacaataacttctccccgcttagctgcactgacttacaagtgcaccagagatcagtggaccgtttactgtcgggtaatccgcgaaaagaacttgtgccaggacatgcggtggtatcaacgatgctgtcagacatgcagggatttctatgcgaataagatgcgccagcctccaccaaattcgtag

SEQ ID NO: 238038 - DNA, 3288 bp, Artificial Sequence
  derived and/or modified sequence
atgtgtgatggagccctgctgccccccctggtgctgcctgtgctgctgctgctggtgtggggcctggaccccggcacagctgtgggagatgctgctgctgatgtggaggtggtgctgccctggagggtgcggccagatgatgtgcacctgccccccctgcctgctgcccctggccccaggagaagaagaagacccaggaccccacctgctgccccccgggcccggcctggagagcgggccctgctgctgcacctgcctgccttcggccgggacctgtacctgcagctgcggcgggacctgcgcttcctgagccggggctttgaggtggaggaggccggggccgccaggagaagaggccggcctgctgagctgtgcttctacagcggccgggtgctgggccaccctggcagcctggtgtccctgagcgcctgtggggctgctgggggcctggtgggcctcatccagctgggccaggagcaggtgctgatccagcccctgaacaacagccagggccccttcagcggccgggagcacctgatccggaggaagtggagcctgacccccagccccagcgctgaggcccagaggcctgagcagctgtgcaaggtgctgacagagaagaagaagcccacctggggccggcccagccgggactggagggagaggagaaatgccatccggctgaccagcgagcacacagtggagaccctggtggtggctgatgctgacatggtgcagtaccacggggctgaggccgcccagcgcttcatcctgactgtgatgaacatggtgtacaacatgttccagcaccagagcctgggcatcaagatcaacatccaggtgaccaagctggtgctgctgcggcagaggcctgccaagctgagcatcggccaccacggggagaggagcctggagagcttctgccactggcagaatgaggagtatggaggagcccgctacctgggcaacaaccaggtgcctgggggcaaggatgatcctcccctggtggatgctgctgtgtttgtgaccaggacagacttctgtgtgcacaaggatgagccctgtgacacagtgggcatcgcctacctgggcggcgtgtgcagcgccaagaggaaatgtgtgctggctgaagataatggcctgaacctggccttcaccatcgcccacgagctgggccacaacctgggcatgaaccatgatgatgaccacagcagctgtgccggccgcagccacatcatgtctggagagtgggtgaagggcaggaaccccagcgacctgtcctggagcagctgcagcagagatgacctggagaacttcctgaagagcaaggtgtccacctgcctgctggtgacagaccccaggagccagcacacagtgcggctgccccacaagctgcccggcatgcactacagcgccaatgagcagtgccagatcctgtttggcatgaatgccaccttctgcaggaacatggagcacctgatgtgtgccggcctgtggtgcctggtggagggggacaccagctgcaagaccaagctggacccccccctggatggaacagaatgtggggctgacaagtggtgcagagctggagaatgtgtgtccaagacccccatccctgagcacgtggatggagactggagcccctggggcgcctggagcatgtgcagcaggacctgtggcactggagcccgcttccggcagaggaaatgtgacaaccccccacctggccctgggggcacccactgccctggggcctctgtggagcacgctgtgtgtgagaacctgccctgccccaagggcctgcccagcttccgggaccagcagtgccaggcccatgaccggctgagccccaagaagaagggcctgctgacagctgtggtggtggatgacaagccctgtgagctgtactgcagccccctgggcaaggagagccccctgctggtggccgacagagtgctggatggcaccccctgtggcccctatgaaacagacctgtgtgtgcacggcaagtgccagaagattggctgtgatggcatcatcggcagcgctgccaaggaggacagatgtggggtgtgcagcggagatggcaagacctgccacctggtgaagggggacttcagccacgcccggggcacagccctgaaggacagcggcaagggcagcatcaacagcgactggaagattgagctgcctggagagttccagattgctggcaccaccgtgcgctacgtgagaagaggcctgtgggagaagatcagcgccaagggccccaccaagctgcccctgcacctgatggtgctgctcttccatgaccaggactatggcatccactatgagtacacagtgcctgtgaacagaacagctgagaaccagagcgagcctgagaagccccaggacagcctcttcatctggacccacagcggctgggagggctgcagcgtgcagtgtggcggcggggagaggaggaccatcgtgtcctgcacccgcatcgtgaacaagaccaccaccctggtgaatgacagcgactgcccccaggccagcaggcctgagccccaggtgcggcgctgcaacctgcacccctgccagagccgctgggtggccggcccctggagcccctgcagcgccacctgtgagaagggcttccagcaccgggaggtgacctgtgtgtaccagctgcagaatggcacccacgtggccacccggcccctgtactgccccggccccaggcctgctgctgtgcagagctgtgagggccaggactgcctgagcatctgggaggccagcgagtggagccagtgcagcgccagctgtgggaaaggagtgtggaagaggacagtggcctgcaccaacagccagggcaaatgtgatgccagcacccggcccagggctgaggaggcctgtgaggactacagcggctgctatgagtggaagacaggagactggagcacctgcagcagcacctgtgggaagggcctgcagagccgggtggtgcagtgcatgcacaaggtgactggaagacatggcagcgagtgcccagccctgagcaagccagccccctaccggcagtgctaccaggaggtgtgcaatgaccgcatcaatgccaacaccatcaccagcccccggctggccgccctgacctacaagtgcacccgggaccagtggacagtgtactgcagggtcatccgggagaagaacctgtgccaggacatgcgctggtaccagcgctgctgccagacctgccgggacttctacgccaacaagatgaggcagcccccacccaacagctag

SEQ ID NO: 238039 - DNA, 3288 bp, Artificial Sequence
  derived and/or modified sequence
atgtgcgacggcgccctgctgccccccctggtgctgcccgtgctgctgttgctggtctgggggctagacccaggtaccgcagtgggagacgccgccgctgacgtggaagtggtgcttccctggcgggtccgaccagacgacgtgcacttgcctccgctgcctgccgcccccggaccacgccggagaaggagaccgaggaccccgcccgcagcacccagagctagacctggagagcgagctctgctgcttcacctgcctgccttcggacgcgacctctacttgcagctgcggcgggacttaagattcttgtcccggggcttcgaggttgaggaagctggtgccgctagacgccgagggcggccagcagagttatgtttctacagtggaagagtgcttggacaccccggaagtctggtaagcctatccgcctgcggagctgccggaggtttagtaggactgattcagctgggccaggagcaagtattaatacagccacttaataacagccaaggcccgttttcaggaagggaacaccttatccgacggaaatggtcactaacccccagtccatcagctgaggcccagcgccctgagcagctgtgtaaggtgcttacagagaagaagaagcctacctggggaagaccgagccgcgactggcgggagagacgaaatgcaataaggttaacaagcgagcacacagtggagactctggtcgtcgcagacgcggatatggtccaatatcacggggcagaagcggcccagcggttcattctaactgtgatgaacatggtttataatatgttccagcaccaatcgctgggcattaagatcaacattcaggttacgaaactggttcttctgagacagcgccctgcaaagctgtcaatcgggcaccatggggagcgcagtttagagagcttctgtcattggcaaaacgaggaatacgggggggccaggtacctcggtaacaaccaggtgccgggagggaaagacgacccacctctggtcgatgccgctgttttcgtcacacgcaccgacttctgtgtgcacaaggacgagccctgcgataccgtcgggatagcttaccttggcggtgtctgttctgcaaaaagaaaatgtgtcttggccgaggataacggcctcaatcttgcttttaccatcgcccatgaactgggacacaatctgggcatgaatcatgacgatgatcattccagttgcgctggacgatctcacatcatgtcaggtgaatgggtaaaaggccgcaacccgtccgatctgagctggagctcgtgctcccgtgatgatctcgaaaattttctgaagagtaaggtgtctacctgcctcctcgtgactgacccccgaagccagcatactgtgaggctgcctcataagttgccagggatgcactatagcgctaacgagcagtgtcagattttattcggcatgaacgccacattttgcaggaacatggagcacctgatgtgtgctgggctctggtgcttggtcgagggcgacacatcttgcaaaacgaagttagatccccctctggatgggacagagtgcggagctgacaagtggtgcagagcaggggaatgtgtgtcaaagacaccgattccagagcacgtagacggagattggtcaccctggggtgcttggagtatgtgttcacgaacatgcggtaccggagcccggttccgtcagagaaagtgcgacaatccccctcccggccccggcggtacccattgtcccggcgcgagcgtcgaacatgccgtctgcgagaacctcccctgtccaaaagggctcccatctttcagggaccagcagtgtcaggcccacgacaggctcagccccaaaaagaaaggcctgttgaccgctgtagtggtggacgataaaccctgcgagctgtattgcagccctctaggcaaagagagcccattgttagtagcagatcgggtcctggacggcacaccctgtggcccttatgagactgacctgtgcgtgcacggaaaatgccaaaagatcggttgcgatgggattatcggttccgctgccaaggaggatagatgcggggtatgcagtggcgacgggaaaacatgccatctggtcaagggagatttctctcacgcgagaggaactgcacttaaagactctggaaagggaagtatcaacagcgactggaagattgagctgccgggagagttccaaatcgccggaactacggtaagatacgtgcgcagggggctgtgggagaagatatccgccaagggtcctactaaactgcctctccatctcatggtgcttcttttccacgatcaggattatggaatccattacgagtatacggtgccggtgaacaggacagcagaaaaccaaagcgaacctgagaagccccaggatagtctgtttatttggactcactccggttgggaaggctgttccgttcagtgtggcgggggcgagcgtcggacaatcgtgtcttgcacacggatcgtcaacaagacaaccaccctggtcaatgacagcgactgccctcaggcctcccgccccgagccgcaggtgcggcgctgtaacctccacccttgtcagagtcggtgggttgccggcccttggagcccttgctcagctacttgtgagaagggatttcaacatcgtgaggtgacctgtgtctatcaactccagaatggaacgcatgtagccaccagaccactgtactgtcccgggcctagaccagctgcagtccagagctgcgaaggccaagactgcctctccatctgggaggccagcgagtggtcccaatgttcggcctcctgtgggaagggcgtatggaagcgtaccgtggcctgcactaattcccaaggcaaatgtgacgcatccacaagaccgcgcgctgaagaggcgtgtgaggactatagcggatgttatgaatggaagactggagattggagcacctgttccagcacctgtggtaaggggctgcagtccagagtggtccagtgcatgcataaggtcaccggacgtcacgggtcggaatgtcctgccttgagcaagcccgccccataccgccagtgttaccaggaggtgtgcaatgatcgaatcaatgccaacaccattacttccccacgactggctgcactgacttacaaatgtacccgcgatcaatggactgtatattgtcgtgtgatccgcgaaaaaaatctgtgccaggacatgagatggtatcaacggtgttgccagacttgtcgcgatttttatgccaataagatgcgccagcctccccctaatagctag

SEQ ID NO: 238040 - DNA, 3288 bp, Artificial Sequence
  derived and/or modified sequence
atgtgtgatggcgctctgctgccacccttggtcctgcctgtactgctccttctggtgtggggactggatccaggcaccgcagttggagacgccgcagctgacgtggaagttgtgttaccttggagggtgaggccagatgatgtgcacctaccccctctgcccgctgcgccaggtcccaggcgcagacgcaggcctcgcacccctccagcagccccaagagcacgtcccggagaaagagcgctgctgctccacctcccagcctttggacgagacctgtacctgcagctccgccgagatcttcgttttttaagccgtggtttcgaggtggaggaggccggtgctgccaggaggcgtgggaggcccgcagagctgtgcttttactcaggtagggttctcgggcatccagggtcactcgtgagtctcagtgcttgtggagcagccggtggattggtaggactgatccagcttgggcaggagcaggttctgatccagcccctgaataattcccagggcccattcagcggcagagagcacctgatccgacggaagtggtctctgacaccgtcaccctccgctgaggctcagaggcccgagcagctctgcaaagtattgacagagaaaaaaaagcccacctgggggaggccctctcgggattggcgggagaggaggaacgccattcgattgacatccgagcacaccgttgagacactggtggtcgccgatgccgatatggtccaataccacggagcggaggccgcacaacggttcatcctgaccgtgatgaacatggtatacaacatgtttcagcatcagtccttggggatcaagataaacatccaagtcactaaattggtgctcctcagacagcggccagctaagctctctattgggcaccatggtgagagatctctcgagtccttttgccactggcagaacgaagaatatggcggagctcggtatctcggtaataatcaggtcccgggaggaaaggatgaccccccattggtcgacgcggctgtgtttgtgaccaggacggacttctgtgtgcacaaagatgagccctgcgatacagtgggcatagcatatctcggcggagtgtgctcagccaaaagaaagtgcgtgctagctgaggataacggcctgaatcttgcttttaccatcgcccatgagctgggccataatctcggaatgaatcacgatgacgatcactcctcctgtgcgggtagaagccatatcatgagtggagaatgggttaaggggagaaatccatccgacctgagctggagttcgtgttctagagatgatctcgaaaactttctgaaatccaaggtgtcaacctgcctgctagtgactgatccacgctcccagcacacagttagactgcctcataaactgcctggtatgcattattccgccaatgaacagtgccagatactgtttggcatgaacgcaacattctgcagaaacatggagcatctgatgtgcgcaggtttgtggtgtctggtggaaggggacacgtcatgtaaaaccaagttggacccaccgctcgacggcaccgaatgtggtgccgacaaatggtgccgggctggtgagtgcgtatcaaagaccccaatcccggagcacgtggacggcgactggtcaccctggggagcttggtctatgtgcagccggacctgtgggactggggcacgcttcaggcagaggaaatgtgataatccccctccagggcctggcggaacacattgtccgggagccagtgtcgagcacgcggtctgtgaaaacctgccctgcccaaagggtctgccatcatttagagaccagcagtgtcaggcccatgaccgactttcaccaaagaagaaaggccttctgacagctgtggttgtggacgataagccttgtgagctctattgcagccccttaggtaaggaaagccctctgctcgttgcggatcgcgtgcttgatgggacgccctgtgggccttatgaaacagatctgtgcgtccacggaaagtgccagaagatcggttgtgacggcattatcggttctgctgcaaaggaggacaggtgtggagtctgttctggggacggaaagacctgccatctggtaaagggcgactttagccatgccagaggcactgcgctcaaggattcaggaaagggtagcataaactctgactggaagatcgagttaccaggggagttccagatagccggaaccacagtacgctatgtcaggcgaggactatgggaaaaaatttctgctaaaggccctaccaaactgcccctccatctcatggtgctgctgtttcatgaccaagattatgggatccattatgaatacactgtgcccgttaacaggaccgctgagaaccagagtgaaccagaaaaaccacaggactccctgtttatctggactcactctggctgggagggatgctccgtacagtgcggtgggggagagagacgtactatagtgtcatgtactaggattgtgaataagaccactaccctcgtcaatgattcagactgccctcaggcctcacgccctgaaccgcaggtgcgaaggtgtaatctccacccttgtcagagtcgatgggtcgccggaccatggtcaccatgctccgcgacgtgcgagaagggatttcaacaccgggaggtcacttgtgtgtatcagctgcagaacggtacacatgtggccactcgccctctgtactgtcccggtccacgtcctgcggctgtgcagtcatgtgagggccaggactgtctctccatatgggaggctagcgaatggagccagtgttctgcaagttgcgggaagggcgtgtggaagcgcaccgtggcatgcacaaacagtcaaggcaagtgtgacgcaagcacacgcccaagggcagaggaggcttgtgaagactactctggctgctatgagtggaagacaggagattggtcaacttgttcaagtacctgtggcaagggtcttcagtctcgagtggtccaatgcatgcataaggtgactggcagacacggatctgaatgtcccgctttatctaagcctgctccatacaggcagtgttaccaggaggtatgtaatgaccgcatcaatgcgaacaccatcacatctcccagactcgctgctctaacctacaagtgtacccgtgaccagtggacagtttactgtcgcgtgattcgagagaaaaatctgtgccaggacatgcggtggtaccaacgctgctgccagacctgtcgagatttttatgctaacaaaatgcgccagccccctcccaacagttag

SEQ ID NO: 238041 - DNA, 498 bp, Artificial Sequence
  derived and/or modified sequence
atggggcgtcggtctagcgataccgaggaggaatcacggtccaagagaaagaagaaacaccggagacgatcaagtagctcatcaagctctgattcgcggacttattccagaaagaagggcggacgtaagagccgcagcaagagtcgtagttggtcccgcgatctgcagccacgttcccacagttatgaccggagacgtcggcataggtcatcgtcaagttcaagttatggcagtcggcgtaagcggtcacgcagccgctcaaggggtcgtggcaagagttaccgggtccaaaggtcgagatcaaagagccgaacacggaggtctaggagccgcccaagacttcgcagtcactcacggtcttctgaaagaagctcgcataggcgaactcgttccagatcccgagaccgggaaagacggaagggaagggacaaagaaaaaagggaaaaggagaaggataaggggaaggacaaagagctacacaacataaaaagggggtag

SEQ ID NO: 238042 - DNA, 3288 bp, Artificial Sequence
  derived and/or modified sequence
atgtgcgacggcgccctgctgccccccctggtgctgcccgtgctgctgctgctggtgtggggcctggaccccggcaccgccgtgggcgacgccgccgccgacgtggaggtggtgctgccctggagagtgagacccgacgacgtgcacctgccccccctgcccgccgcccccggccccagaagaagaagaagacccagaaccccccccgccgcccccagagccagacccggcgagagagccctgctgctgcacctgcccgccttcggcagagacctgtacctgcagctgagaagagacctgagattcctgagcagaggcttcgaggtggaggaggccggcgccgccagaagaagaggcagacccgccgagctgtgcttctacagcggcagagtgctgggccaccccggcagcctggtgagcctgagcgcctgcggcgccgccggcggcctggtgggcctgatccagctgggccaggagcaggtgctgatccagcccctgaacaacagccagggccccttcagcggcagagagcacctgatcagaagaaagtggagcctgacccccagccccagcgccgaggcccagagacccgagcagctgtgcaaggtgctgaccgagaagaagaagcccacctggggcagacccagcagagactggagagagagaagaaacgccatcagactgaccagcgagcacaccgtggagaccctggtggtggccgacgccgacatggtgcagtaccacggcgccgaggccgcccagagattcatcctgaccgtgatgaacatggtgtacaacatgttccagcaccagagcctgggcatcaagatcaacatccaggtgaccaagctggtgctgctgagacagagacccgccaagctgagcatcggccaccacggcgagagaagcctggagagcttctgccactggcagaacgaggagtacggcggcgccagatacctgggcaacaaccaggtgcccggcggcaaggacgacccccccctggtggacgccgccgtgttcgtgaccagaaccgacttctgcgtgcacaaggacgagccctgcgacaccgtgggcatcgcctacctgggcggcgtgtgcagcgccaagagaaagtgcgtgctggccgaggacaacggcctgaacctggccttcaccatcgcccacgagctgggccacaacctgggcatgaaccacgacgacgaccacagcagctgcgccggcagaagccacatcatgagcggcgagtgggtgaagggcagaaaccccagcgacctgagctggagcagctgcagcagagacgacctggagaacttcctgaagagcaaggtgagcacctgcctgctggtgaccgaccccagaagccagcacaccgtgagactgccccacaagctgcccggcatgcactacagcgccaacgagcagtgccagatcctgttcggcatgaacgccaccttctgcagaaacatggagcacctgatgtgcgccggcctgtggtgcctggtggagggcgacaccagctgcaagaccaagctggacccccccctggacggcaccgagtgcggcgccgacaagtggtgcagagccggcgagtgcgtgagcaagacccccatccccgagcacgtggacggcgactggagcccctggggcgcctggagcatgtgcagcagaacctgcggcaccggcgccagattcagacagagaaagtgcgacaaccccccccccggccccggcggcacccactgccccggcgccagcgtggagcacgccgtgtgcgagaacctgccctgccccaagggcctgcccagcttcagagaccagcagtgccaggcccacgacagactgagccccaagaagaagggcctgctgaccgccgtggtggtggacgacaagccctgcgagctgtactgcagccccctgggcaaggagagccccctgctggtggccgacagagtgctggacggcaccccctgcggcccctacgagaccgacctgtgcgtgcacggcaagtgccagaagatcggctgcgacggcatcatcggcagcgccgccaaggaggacagatgcggcgtgtgcagcggcgacggcaagacctgccacctggtgaagggcgacttcagccacgccagaggcaccgccctgaaggacagcggcaagggcagcatcaacagcgactggaagatcgagctgcccggcgagttccagatcgccggcaccaccgtgagatacgtgagaagaggcctgtgggagaagatcagcgccaagggccccaccaagctgcccctgcacctgatggtgctgctgttccacgaccaggactacggcatccactacgagtacaccgtgcccgtgaacagaaccgccgagaaccagagcgagcccgagaagccccaggacagcctgttcatctggacccacagcggctgggagggctgcagcgtgcagtgcggcggcggcgagagaagaaccatcgtgagctgcaccagaatcgtgaacaagaccaccaccctggtgaacgacagcgactgcccccaggccagcagacccgagccccaggtgagaagatgcaacctgcacccctgccagagcagatgggtggccggcccctggagcccctgcagcgccacctgcgagaagggcttccagcacagagaggtgacctgcgtgtaccagctgcagaacggcacccacgtggccaccagacccctgtactgccccggccccagacccgccgccgtgcagagctgcgagggccaggactgcctgagcatctgggaggccagcgagtggagccagtgcagcgccagctgcggcaagggcgtgtggaagagaaccgtggcctgcaccaacagccagggcaagtgcgacgccagcaccagacccagagccgaggaggcctgcgaggactacagcggctgctacgagtggaagaccggcgactggagcacctgcagcagcacctgcggcaagggcctgcagagcagagtggtgcagtgcatgcacaaggtgaccggcagacacggcagcgagtgccccgccctgagcaagcccgccccctacagacagtgctaccaggaggtgtgcaacgacagaatcaacgccaacaccatcaccagccccagactggccgccctgacctacaagtgcaccagagaccagtggaccgtgtactgcagagtgatcagagagaagaacctgtgccaggacatgagatggtaccagagatgctgccagacctgcagagacttctacgccaacaagatgagacagcccccccccaacagctag

SEQ ID NO: 238043 - DNA, 6207 bp, Artificial Sequence
  derived and/or modified sequence
aattactttttccaaaggctggagggcttcactccggctggcgccgccgcctagcgcgctcctgcttcgccgccacggtccgggggggctgccggtcccgggtaccatgtgtgacggcgccctgctgcctccgctcgtcctgcccgtgctgctgctgctggtttggggactggacccgggcacagctgtcggcgacgcggcggccgacgtggaggtggtgctcccgtggcgggtgcgccccgacgacgtgcacctgccgccgctgcccgcagcccccgggccccgacggcggcgacgcccccgcacgcccccagccgccccgcgcgcccggcccggagagcgcgccctgctgctgcacctgccggccttcgggcgcgacctgtaccttcagctgcgccgcgacctgcgcttcctgtcccgaggcttcgaggtggaggaggcgggcgcggcccggcgccgcggccgccccgccgagctgtgcttctactcgggccgtgtgctcggccaccccggctccctcgtctcgctcagcgcctgcggcgccgccggcggcctggttggcctcattcagcttgggcaggagcaggtgctaatccagcccctcaacaactcccagggcccattcagtggacgagaacatctgatcaggcgcaaatggtccttgacccccagcccttctgctgaggcccagagacctgagcagctctgcaaggttctaacagaaaagaagaagccgacgtggggcaggccttcgcgggactggcgggagcggaggaacgctatccggctcaccagcgagcacacggtggagaccctggtggtggccgacgccgacatggtgcagtaccacggggccgaggccgcccagaggttcatcctgaccgtcatgaacatggtatacaatatgtttcagcaccagagcctggggattaaaattaacattcaagtgaccaagcttgtcctgctacgacaacgtcccgctaagttgtccattgggcaccatggtgagcggtccctggagagcttctgtcactggcagaacgaggagtatggaggagcgcgatacctcggcaataaccaggttcccggcgggaaggacgacccgcccctggtggatgctgccgtgtttgtgaccaggacagatttctgtgtacacaaggatgaaccgtgtgacactgttggaattgcttacttaggaggtgtgtgcagtgctaagaggaagtgtgtgcttgccgaagacaatggtctcaatttggcctttaccatcgcccatgagctgggccacaacttgggcatgaaccacgacgatgaccactcatcttgcgctggcaggtcccacatcatgtcaggagagtgggtgaaaggccggaacccaagtgacctctcttggtcctcctgcagccgagatgaccttgaaaacttcctcaagtcaaaagtcagcacctgcttgctagtcacggaccccagaagccagcacacagtacgcctcccgcacaagctgccgggcatgcactacagtgccaacgagcagtgccagatcctgtttggcatgaatgccaccttctgcagaaacatggagcatctaatgtgtgctggactgtggtgcctggtagaaggagacacatcctgcaagaccaagctggaccctcccctggatggcaccgagtgtggggcagacaagtggtgccgcgcgggggagtgcgtgagcaagacgcccatcccggagcatgtggacggagactggagcccgtggggcgcctggagcatgtgcagccgaacatgtgggacgggagcccgcttcaggcagaggaaatgtgacaaccccccccctgggcctggaggcacacactgcccgggtgccagtgtagaacatgcggtctgcgagaacctgccctgccccaagggtctgcccagcttccgggaccagcagtgccaggcacacgaccggctgagccccaagaagaaaggcctgctgacagccgtggtggttgacgataagccatgtgaactctactgctcgcccctcgggaaggagtccccactgctggtggccgacagggtcctggacggtacaccctgcgggccctacgagactgatctctgcgtgcacggcaagtgccagaaaatcggctgtgacggcatcatcgggtctgcagccaaagaggacagatgcggggtctgcagcggggacggcaagacctgccacttggtgaagggcgacttcagccacgcccgggggacagctctcaaagactcgggtaaggggtccatcaacagtgactggaagatagagctccccggagagttccagattgcaggcacaactgttcgctatgtgagaagggggctgtgggagaagatctctgccaagggaccaaccaaactaccgctgcacttgatggtgttgttatttcacgaccaagattatggaattcattatgaatacactgttcctgtaaaccgcactgcggaaaatcaaagcgaaccagaaaaaccgcaggactctttgttcatctggacccacagcggctgggaagggtgcagtgtgcagtgcggcggaggggagcgcagaaccatcgtctcgtgtacacggattgtcaacaagaccacaactctggtgaacgacagtgactgccctcaagcaagccgcccagagccccaggtccgaaggtgcaacttgcacccctgccagtcacggtgggtggcaggcccgtggagcccctgctcggcgacctgtgagaaaggcttccagcaccgggaggtgacctgcgtgtaccagctgcagaacggcacacacgtcgctacgcggcccctctactgcccgggcccccggccggcggcagtgcagagctgtgaaggccaggactgcctgtccatctgggaggcgtctgagtggtcacagtgctctgccagctgtggtaaaggggtgtggaaacggaccgtggcgtgcaccaactcacaagggaaatgcgacgcatccacgaggccgagagccgaggaggcctgcgaggactactcaggctgctacgagtggaaaactggggactggtctacgtgctcgtcgacctgcgggaagggcctgcagtcccgggtggtgcagtgcatgcacaaggtcacagggcgccacggcagcgagtgccccgccctctcgaagcctgccccctacagacagtgctaccaggaggtctgcaacgacaggatcaacgccaacaccatcacctccccccgccttgctgctctgacctacaaatgcacacgagaccagtggacggtatattgccgggtcatccgagaaaagaacctctgccaggacatgcggtggtaccagcgctgctgccagacctgcagggacttctatgcaaacaagatgcgccagccaccgccgaactcgtgacacgcagtcccaagggtcgctcaaagctcagactcaggtctgaaacccacccacccgcaagcctaccagccttgtggccacgcccccacccggctgccacaagaatccaactacatagaacatgagcgtggacttggcgtttgccattagtgcttccgtacttaatatattgttaacagccactggctggctttctacagtgaggagaaagtaggcatgagtcacaaagtaacttcaatttctaggatttcaggtacctcgaagggaagcacctctggcagacaaccgtcaagagagagacatcatttagtgttcttgtcttgactcgcttttgacatttgaatttccagtgcttggtatatcatggaggaaacatccccaaaacgagacatgctagaaaaggctttattctgaaagccggcgacaccatggagggaggggcaggtgttggtgagcctctgcccgtggcttctctggggagggccgggctgcttagcacacgtttctctccatctaccttcttgaccacatgagaaccaggacgttgcctccatgcccgtctctgagaacatagtctctaaatcctaggtgttgccttggaagtctcgtgcgtggagtgtaaatctatatatgccagcgaggacagcagtgccacgcagttcataccacccgcatgggaagaatgttccaagagagtctgggtttggggaagcatctaattttcagagctctgctgtccaccgtgtagggaaacagaagggcctctcttcaaggtgctgtgacataagaaacggtaattgcggtgatggggttgcttcctaaggcaaaggtaagcttgggccagcttcactggggcggatgggcacctgccccgccttccgggaacatccactctggcctgcacttcctaaagctttgtaccttagagatgctgtaccacatcccagtggctttctaccgaccgtggccatttatctgaaggtaagacgacatttgggacctctgaggacacaagcccaggcctaggatctgtagagcaaggcctgactgctctatcctggcacggagcagcctgatgtgccaggaccaggggaggaacgccatctggctggcactgctgcacacccgccgagccttcctgtagccccagactttgtggtacccattatcatcacgcctgtcatcattgacccatcttcttggtggggcaaggatgatgcatgatgaaggaaggtccttcccccctgcagcccccttacgcctggcagcagacaagcagagtggcctctttgagagcacagaggatggtagcaccctacctgcaaggaggccgggcagggaccctagatgccaggaggcctgttttgctcaccaacttggtgggcatttcatgggtgcttatgttctaggactttaccgtaaataacacctcctccctgatttcagacggaaggtctcacttggacttccatgggatcatctccctgtgcttcttgatttattggtgctgtgtttctgtgttttgttttgttacatgtcacaaccgtagagttagcttaaatcagaaagaagcctctctgccttctccaccctgtcttacgagctgtgtttttgtttttactaccctagaggcagagaagcggtagggatgtcagggaatttactcacttccacttgaatcaacgagaagtgttgagaaacttccgtgggtgctctgtggaaagaaccgagggtgtcaggatggagcggcccaccctcgccccgcggcctgcgcagactgctgtcctccccttcaggcctggccaccagcagactcccatgaattcccattttcacaaagccctcaaaattttgggggcgctgaggttcaattttcttcatccccaaatgaactgttaattcactgaaagacatttagacttttgcagccaaggagcagagccgggcaagctcactaaggaagccttagcttggtctcctgcatgggccccggggcctccagatatgcccactgtcaccctggcaagggccccacaccctcagaatgaaaaggattgattgggttattgtcagatacccccattagttcccctaaagtctgcatctgcagagctcttttagctcatctttttgttgtcggtgttgttttttgagacagagtctccctctgttgcccaggctggagtgcagtggcgcgatctcagctcattgaaagctccgcctcccgggttcaggccattcttctgcctcaccctccccagtagctgggactacaggcgcccaccaccacgcccacctacttttttgtatttttactagagacggggtttcaccatgttagccaggatggtctcgatctcctgacctcatgatccacccgcctcagccttccaaagtgctgggattacaggagtgagccaccgcgcccggccttttagcttatcttgaaatccaccagcctaccttctgttcatggcacgagcagtgatttcagtgaaaccatcataaacattcttgttccactagatgctgatcacagcagtgatgtttctgtgttaataccctgtactgtccctcgagtactgtacctttgtgcttgcacacgtgtcactaacgcacgtgttaccagagtctcacgaccctacggtgctatttttattggtgcaaaattaaaccctctcagctgaccgttgctggataggatcagaatgcaggaaaagagcctctatggcaatacgattgtccttttttcgtttcagagtcaaatgtatctattttccattcgttaacttgcattacatactgtacccatg

SEQ ID NO: 238044 - protein, 562 aa, Artificial Sequence
  derived and/or modified sequence
MSNQYQEEGCSERPECKSKSPTLLSSYCIDSILGRRSPCKMRLLGAAQSLPAPLTSRADPEKAVQGSPKSSSAPFEAELHLPPKLRRLYGPGGGRLLQGAAAAAAAAAAAAAAAATATAGPRGEAPPPPPPTARPGERPDGAGAAAAAAAAAAAAWDTLKISQAPQVSISRSKSYRENGAPFVPPPPALDELGGPGGVTHPEERLGVAGGPGSAPAAGGGTGTEDDEEELLEDEEDEDEEEELLEDDEEELLEDDARALLKEPRRCPVAATGAVAAAAAAAVATEGGELSPKEELLLHPEDAEGKDGEDSVCLSAGSDSEEGLLKRKQRRYRTTFTSYQLEELERAFQKTHYPDVFTREELAMRLDLTEARVQVWFQNRRAKWRKREKAGAQTHPPGLPFPGPLSATHPLSPYLDASPFPPHHPALDSAWTAAAAAAAAAFPSLPPPPGSASLPPSGAPLGLSTFLGAAVFRHPAFISPAFGRLFSTMAPLTSASTAAALLRQPTPAVEGAVASGALADPATAAADRRASSIAALRLKAKEHAAQLTQLNILPGTSTGKEVC

SEQ ID NO: 238045 - DNA, 2885 bp, Artificial Sequence
  derived and/or modified sequence
ttgtcctgagcgcggagagggcgagctcgggccgcgggcagggcgggagccggcagccggcaaccaagggaggcagaaaggcacaaagatcgcaataatatccgttataacccgctatctaaccccacccccaacacacacccatccatcccaccctccgggagaggcagccggcgatccgctctctgcgccctgggaaaaagccccagccatgagcaatcagtaccaggaggagggctgctccgagaggcccgagtgcaaaagtaaatctccaactttgctctcctcctactgcatcgacagcatcctgggccggaggagcccgtgcaaaatgcggttgctgggagccgcgcagagcttgcctgctccgctgaccagccgcgccgacccggaaaaggccgtgcaaggctcccctaagagcagcagcgccccgttcgaggccgagctgcacctgccgcccaagctgcggcgcctgtacggcccgggcgggggccgcctccttcagggtgcggcagcggcggcggcggcggcggcggcggcggcggcagcggccgccacggccacggcgggtccacgcggggaggcccctccgccgccaccgccaaccgcgcggcccggggaacggccggacggcgcaggggccgccgcggcagccgcggccgcggccgccgcggcctgggacacgctcaagatcagccaggcgccgcaggtgagcatcagccgcagcaagtcgtaccgcgagaacggggcgcccttcgtgccgccgccgcccgcgctggacgagctgggcggcccggggggcgtcacgcacccggaggagcgcctcggcgtggccggcggcccgggcagcgccccggctgcgggtggtggcaccggcaccgaggacgacgaggaggagctgctggaggacgaagaagatgaggacgaggaagaggaactgctggaggacgacgaggaggagctgctggaggacgacgcccgcgcgctgctcaaggagccccggcgctgtcctgtggccgccactggcgccgtggccgcagcagctgccgctgcagtggccacagagggcggggagctgtcacccaaggaggagctgctgctgcacccggaagacgctgagggcaaggacggcgaggacagcgtgtgcctctctgcgggcagcgactcggaggaggggctgctgaaacgcaaacagaggcgctaccgcaccacgttcaccagctaccagctggaggaactggagcgggccttccagaagacgcactacccggacgtcttcaccagggaggaactggccatgaggctggacttgaccgaggcccgagtccaggtctggttccagaaccgtcgggccaagtggcgcaagcgggagaaggcaggcgcgcagacccacccccctgggctgcccttcccggggccgctctccgccacccacccgctcagcccctacctggacgccagccccttccctccgcaccacccggcgctcgactccgcttggactgccgctgccgccgccgccgccgccgccttcccgagcctacctccgcctccgggctcggccagcctgccgcccagcggggcgccgctgggcctgagcactttcctcggagcggcagtgttccgacacccagctttcatcagcccggcattcggcaggctcttttccacaatggcccccctgaccagcgcgtcgaccgcggccgcgctcctgagacagcccacacccgccgtggagggcgcagtggcatcgggcgccctggccgacccggccacggcggccgcagacagacgcgcctctagcatagccgcgctgaggctcaaggccaaggagcacgcggcgcagctcacgcagctcaacatcctgccgggcaccagcacgggcaaggaggtgtgctaaaggctgccctccacacccgcgccccgcgcgcgccccgaaaggtcacctcactcagcaccactcaagaccaaatggaaacagaggaccagcacactcccgagacggcactgagagagcgcagccgccttcacagcagtctggatgcgggcatggcagccctcggcgctccgggacgtggcacctcctcggctggctgtccacccgcccctgcccctgcccctgctactgccaacctcgctccaactccaacatccactctctcttgttcttactttcctgaaaatatcggggaggttttctcccccagacgcctgatattgaagtaaaaaatttaaaaagcccaacctcttcctcctgacaccccacttagcctttcttttctttctttctttctttcttttttttttttaaatagcattttggcgctcgaagttgatctccccagcgagggccccagcgtgaagccagggcccgggaagcaaatgcgagcctgtaagatagctaacagtgcacttaaaggaaaggggcgtcttgttcttgttctcttctttatcatacaccaaccaaggtttttatatcaaaccaaagggaaataatactctgctagaatatggactgttgaagtcaccaaactgtgattattgattctgtacataccattgttattaaaaaaaaaaaaaaaagaacagagctttgtatatttgaaatgttataacgcaattgcactcagcgtggtatggtaaaagtttgtcctcccgtagattcttactgtgttgtagatacggtagggttcctagacaaatatttatgtactcaagccctttatttaacttattaactgtagaggcttccgaaaccttcaagataaaggcaatggtacagtacttttgtgtaatgtgtaattgttaccacttttccttgctatctagtggagaagtgtcacgctcaaaataaaaaaattatatgtttaacaaaaaaaaaaaaa

SEQ ID NO: 238046 - DNA, 1689 bp, Artificial Sequence
  derived and/or modified sequence
atgtcaaaccagtaccaggaggagggatgttccgagcgccccgagtgcaagagcaagagccctacactgcttagctcatactgtattgacagcatcctggggagacggtctccttgcaagatgcggctcctgggagctgcacagtcccttcccgccccacttacatctagggctgacccggagaaagcagtacaggggagccccaagagttcatctgcccctttcgaagctgaactccaccttcccccgaaattgcggaggctctatggtccaggaggaggcaggctcttgcagggagcagctgcggccgcggccgctgctgctgcagcagctgctgctgcggctaccgcaacagctggcccgagaggagaagccccccctccaccaccccctaccgcccgccctggcgagcggcctgatggcgcaggcgctgctgcagccgcggcggcggctgctgccgcagcatgggacacacttaagatctctcaggccccacaggtctctattagccggtccaagtcataccgagagaacggcgcaccattcgttcctccaccaccggccctggacgaactcgggggaccaggaggcgtgactcatccagaggagcggctgggcgttgccggcggacctggatctgccccagctgctggtgggggaaccggaacagaggatgacgaagaggagctcctggaggacgaggaagacgaggatgaagaggaagagttgctggaagacgatgaagaggagctattggaagatgacgcccgcgccctactcaaagagccgcgtcgctgtcctgtggctgcaaccggcgccgttgccgctgctgcagccgcggctgtggctacggaggggggggagctcagccccaaggaagagctgctgctgcatcccgaagatgctgaaggtaaggatggggaggatagtgtgtgtttatctgcggggtcagactcagaagagggattgctcaagagaaagcagaggcgctaccggaccacctttacctcctatcagttggaggagttagagcgagccttccagaagacccactatccagacgtcttcacacgcgaggagctggccatgcggcttgatctaacagaagcgagagtgcaggtgtggtttcaaaatcggagagcaaagtggaggaaacgcgagaaggctggagcccagacccaccctcccggtctgccctttccagggcccctctcagccacacacccccttagtccctatctagacgcctcaccttttcctccccaccatccagctctcgatagtgcgtggacggcggccgctgcagctgccgccgctgcatttccgtccctaccaccacccccgggatccgcttccctgcccccctcgggtgcacccctgggattaagtactttcctgggagccgctgtctttagacaccccgcatttatttcgcctgccttcggaaggctctttagtaccatggcccccttgacgtctgcttctactgccgcggctctactgcgacaacctacccctgccgtcgagggcgccgtagcctccggagccttggccgacccagctacagccgccgccgaccgtagggcttcttccattgcggcgttgagactcaaagctaaggaacacgctgcgcagctcactcagctaaacattttaccggggaccagcacaggcaaggaggtctgctag

SEQ ID NO: 238047 - DNA, 1689 bp, Artificial Sequence
  derived and/or modified sequence
atgagcaaccagtaccaggaggagggctgcagcgagaggcctgagtgcaagagcaagagccccaccctgctgagcagctactgcatcgacagcatcctgggcagaagaagcccctgcaagatgaggctgctgggcgccgcccagagcctgcctgcccccctgaccagcagagctgaccctgagaaggctgtgcagggcagccccaagagcagcagcgccccctttgaagctgagctgcacctgccccccaagctgcggcggctgtatggccctgggggcggccgcctgctgcagggcgctgctgctgctgctgctgctgctgctgctgctgctgctgctgctgccacagccacagctggccccagaggagaggcccctcctcctcctccacccacagcccggcctggagagaggccagatggagctggagctgctgctgctgctgctgctgctgctgctgctgcctgggacaccctgaagatcagccaggccccccaggtgtccatcagccgcagcaagagctacagagaaaatggagccccctttgtgcccccacctccagccctggatgagctgggcggccctggaggagtgacccaccctgaggagcggctgggcgtggccggcggccctggcagcgccccagctgctgggggcggcactggaacagaagatgatgaggaggagctgctggaggatgaagaagatgaagatgaggaggaggagctgctggaggatgatgaggaggagctgctggaggatgatgcccgggccctgctgaaggagccccggcgctgccctgtggccgccactggagctgtggccgctgctgctgctgctgctgtggccacagagggcggggagctgagccccaaggaggagctgctgctgcacccagaagatgctgagggcaaggatggagaggacagcgtgtgcctgtctgctggcagtgacagcgaggagggcctgctgaagaggaagcagaggcgctaccgcaccaccttcaccagctaccagctggaggagctggagcgggccttccagaagacccactacccagatgtgttcacccgggaggagctggccatgaggctggacctgacagaggcccgggtgcaggtgtggttccagaacagaagagccaagtggaggaagcgggagaaggccggggcccagacccaccccccaggcctgcccttccctggccccctgagcgccacccaccccctgagcccctacctggatgccagccccttccccccccaccacccagccctggacagcgcctggacagctgctgctgctgctgctgctgctgccttccccagcctgcccccacctcctggcagcgccagcctgccccccagcggggcccccctgggcctgagcaccttcctgggcgctgctgtgttccgccacccagccttcatcagccctgccttcggccgcctcttcagcaccatggcccccctgaccagcgccagcacagctgctgccctgctgcggcagcccaccccagctgtggagggcgctgtggccagcggggccctggccgaccctgccacagctgctgctgacagaagagccagcagcattgctgccctgcggctgaaggccaaggagcacgccgcccagctgacccagctgaacatcctgcccggcaccagcacaggcaaggaggtgtgctag

SEQ ID NO: 238048 - DNA, 1689 bp, Artificial Sequence
  derived and/or modified sequence
atgagcaaccagtaccaggaggagggctgcagcgagcggcccgagtgcaagagtaaaagcccaaccttgctgagctcatactgcatagactccatactgggaagaaggtccccgtgcaaaatgcgactgctcggagcggcccagtccctgccagcgccgctgacttctcgtgctgatccagaaaaggctgtccagggttccccgaagtccagttccgccccctttgaagcagagctccacttgcctcctaagctgcgacggctttatggccctggagggggcagacttttacagggtgctgcagctgctgcagccgctgccgctgccgctgcagctgccgccgcaaccgccactgcaggtcccagaggcgaagctccccctccccctcccccaaccgctcgccccggcgagcgaccggacggagccggggccgccgcggctgctgctgccgctgcagccgccgcctgggatacgctgaaaatctcccaggctccccaagtctccatctcacggtccaagtcatatcgcgagaacggggccccattcgtgcctccacccccagcgctggatgagcttggcggccccggtggggtgacacatccagaagaaaggctgggtgtggccggtggaccgggctcagcccctgccgcaggcggcggtacaggaaccgaagatgacgaagaggagctgcttgaggatgaagaagacgaggatgaagaggaggaactgctggaggacgatgaagaggagctgcttgaggatgacgctcgagccttattgaaagagccccggcgctgccctgttgctgccaccggtgccgtcgcagcagccgcagcggcagccgtggccacggaggggggtgaattgtcccccaaggaggagttgcttttacatccagaagacgcggagggaaaggatggcgaggattccgtctgcctcagcgcgggctctgatagtgaagaaggtctgctaaaacgcaagcaaagacgctacagaacaacattcacatcataccaattggaagagttggaaagggcgttccaaaagacacattatcccgatgtcttcactcgcgaagaattggccatgcgtctggatttgactgaggccagagtgcaagtgtggtttcagaaccgacgtgcaaaatggaggaagagagaaaaggctggcgcccagactcaccccccaggcctgcccttccccggtcctctctccgcaacacaccctctttccccatacttggatgcctcccccttcccgccccaccatcccgcattagattctgcgtggactgctgctgccgccgctgccgctgctgcattcccttcccttcccccacccccaggcagcgcaagccttcctccttcgggggccccactgggactgagtacgttcctgggcgccgcagtgttccgtcaccccgcatttatatcgccagcattcgggcggctgttttcaactatggccccactaacctcagcttcaactgcagcagcgctcttaaggcaaccgacaccagccgtcgagggggctgtggcgtccggtgcactggcagatccagcgacagcggcagcagacagacgcgcctcctccatcgctgctctccggctgaaggccaaagaacacgcagctcagctgactcaactcaacattctgccagggaccagtactggcaaggaggtgtgttag

SEQ ID NO: 238049 - DNA, 1689 bp, Artificial Sequence
  derived and/or modified sequence
atgagcaatcagtatcaagaggagggctgtagcgaaagaccggaatgcaagtccaaaagccctactctgctgtcctcatattgcattgactccatactcggcaggagatccccttgcaagatgagacttctgggcgctgcccaatcgctgccggctcctcttacatctcgcgcagatccagagaaggcagttcagggcagtcccaaatcaagttctgccccttttgaggcagagctgcacttgcctccgaagctcaggaggctctatggacccggaggtggcaggttattacaaggggctgctgcagctgccgctgctgccgcagcagcagcagccgctgccgctacagccactgccggtccgcgtggtgaagctccaccccctccccctcctacggcacggccaggagaacggccagacggagccggtgcggctgcagctgccgcagccgctgcagcggctgcctgggacactctgaagattagtcaggcaccacaggttagcatatccaggagcaaatcatatcgcgagaatggggcaccattcgtaccaccacccccagcccttgatgagcttggcggtcccggaggggtgacccacccagaagagagactcggggtcgccggaggtcccggatccgcacccgctgccggaggcggtaccggcactgaggacgacgaggaagagctactggaggatgaggaggatgaagacgaggaagaggaactgctcgaggacgacgaggaagagctcctggaagatgacgccagagcgctcttaaaggaaccccgacggtgtccagtggccgctactggggcagtagcagcggcagcagctgcagccgttgctacagaaggcggtgagttatcgccaaaagaagagttgttattacaccctgaggacgccgaaggcaaggatggcgaagatagcgtgtgtctttccgcaggcagtgattcagaagagggccttctgaaaagaaagcagcgaaggtaccgcactacgttcacttcttaccaattggaagagttggagcgggcattccagaaaacccactaccccgacgtgttcacccgcgaagaactggctatgaggctcgacctcactgaggccagggtgcaggtgtggtttcaaaacaggagagctaagtggcgcaagagagaaaaggccggtgcgcaaactcatccacctgggctgccttttccaggacccctttccgccacgcatccactgtctccctatctcgacgcgtcgccctttcctccacaccatcccgcacttgactccgcttggaccgctgcggctgctgctgctgctgccgcttttcccagcctacctccgccaccagggtccgctagcctccctccatctggcgctccactgggtcttagtacgttccttggggcagccgttttcaggcatccggcatttatttctcccgcttttggcaggctgtttagtactatggctcctctaaccagtgcaagtactgcggcagcgcttctgcggcagccgacacccgcagtcgagggggcagtcgctagtggcgctctagccgaccccgctaccgctgcggcagacaggcgtgcatcctctatagctgctctaaggctcaaggccaaggagcacgccgctcagctcactcagcttaatatcttgcccggaacctctactgggaaggaggtctgctag

SEQ ID NO: 238050 - DNA, 2876 bp, Artificial Sequence
  derived and/or modified sequence
ttgtcctgagcgcggagagggcgagctcgggccgcgggcagggcgggagccggcagccggcaaccaagggaggcagaaaggcacaaagatcgcaataatatccgttataacccgctatctaaccccacccccaacacacacccatccatcccaccctccgggagaggcagccggcgatccgctctctgcgccctgggaaaaagccccagccatgagcaatcagtaccaggaggagggctgctccgagaggcccgagtgcaaaagtaaatctccaactttgctctcctcctactgcatcgacagcatcctgggccggaggagcccgtgcaaaatgcggttgctgggagccgcgcagagcttgcctgctccgctgaccagccgcgccgacccggaaaaggccgtgcaaggctcccctaagagcagcagcgccccgttcgaggccgagctgcacctgccgcccaagctgcggcgcctgtacggcccgggcgggggccgcctccttcagggtgcggcagcggcggcggcggcggcggcggcggcggcggcagcggccgccacggccacggcgggtccacgcggggaggcccctccgccgccaccgccaaccgcgcggcccggggaacggccggacggcgcaggggccgccgcggcagccgcggccgcggccgccgcggcctgggacacgctcaagatcagccaggcgccgcaggtgagcatcagccgcagcaagtcgtaccgcgagaacggggcgcccttcgtgccgccgccgcccgcgctggacgagctgggcggcccggggggcgtcacgcacccggaggagcgcctcggcgtggccggcggcccgggcagcgccccggctgcgggtggtggcaccggcaccgaggacgacgaggaggagctgctggaggacgaagaagatgaggacgaggaagaggaactgctggaggacgacgaggaggagctgctggaggacgacgcccgcgcgctgctcaaggagccccggcgctgtcctgtggccgccactggcgccgtggccgcagcagctgccgctgcagtggccacagagggcggggagctgtcacccaaggaggagctgctgctgcacccggaagacgctgagggcaaggacggcgaggacagcgtgtgcctctctgcgggcagcgactcggaggaggggctgctgaaacgcaaacagaggcgctaccgcaccacgttcaccagctaccagctggaggaactggagcgggccttccagaagacgcactacccggacgtcttcaccagggaggaactggccatgaggctggacttgaccgaggcccgagtccaggtctggttccagaaccgtcgggccaagtggcgcaagcgggagaaggcaggcgcgcagacccacccccctgggctgcccttcccggggccgctctccgccacccacccgctcagcccctacctggacgccagccccttccctccgcaccacccggcgctcgactccgcttggactgccgctgccgccgccgccgccgccgccttcccgagcctacctccgcctccgggctcggccagcctgccgcccagcggggcgccgctgggcctgagcactttcctcggagcggcagtgttccgacacccagctttcatcagcccggcattcggcaggctcttttccacaatggcccccctgaccagcgcgtcgaccgcggccgcgctcctgagacagcccacacccgccgtggagggcgcagtggcatcgggcgccctggccgacccggccacggcggccgcagacagacgcgcctctagcatagccgcgctgaggctcaaggccaaggagcacgcggcgcagctcacgcagctcaacatcctgccgggcaccagcacgggcaaggaggtgtgctaaaggctgccctccacacccgcgccccgcgcgcgccccgaaaggtcacctcactcagcaccactcaagaccaaatggaaacagaggaccagcacactcccgagacggcactgagagagcgcagccgccttcacagcagtctggatgcgggcatggcagccctcggcgctccgggacgtggcacctcctcggctggctgtccacccgcccctgcccctgcccctgctactgccaacctcgctccaactccaacatccactctctcttgttcttactttcctgaaaatatcggggaggttttctcccccagacgcctgatattgaagtaaaaaatttaaaaagcccaacctcttcctcctgacaccccacttagcctttcttttctttctttctttctttcttttttttttttaaatagcattttggcgctcgaagttgatctccccagcgagggccccagcgtgaagccagggcccgggaagcaaatgcgagcctgtaagatagctaacagtgcacttaaaggaaaggggcgtcttgttcttgttctcttctttatcatacaccaaccaaggtttttatatcaaaccaaagggaaataatactctgctagaatatggactgttgaagtcaccaaactgtgattattgattctgtacataccattgttattaaaaaaaaaaaaaaaagaacagagctttgtatatttgaaatgttataacgcaattgcactcagcgtggtatggtaaaagtttgtcctcccgtagattcttactgtgttgtagatacggtagggttcctagacaaatatttatgtactcaagccctttatttaacttattaactgtagaggcttccgaaaccttcaagataaaggcaatggtacagtacttttgtgtaatgtgtaattgttaccacttttccttgctatctagtggagaagtgtcacgctcaaaataaaaaaattatatgtttaacaaaa

SEQ ID NO: 238051 - DNA, 1689 bp, Artificial Sequence
  derived and/or modified sequence
atgagcaaccagtaccaggaggagggctgcagcgagagacccgagtgcaagagcaagagccccaccctgctgagcagctactgcatcgacagcatcctgggcagaagaagcccctgcaagatgagactgctgggcgccgcccagagcctgcccgcccccctgaccagcagagccgaccccgagaaggccgtgcagggcagccccaagagcagcagcgcccccttcgaggccgagctgcacctgccccccaagctgagaagactgtacggccccggcggcggcagactgctgcagggcgccgccgccgccgccgccgccgccgccgccgccgccgccgccgccgccaccgccaccgccggccccagaggcgaggccccccccccccccccccccaccgccagacccggcgagagacccgacggcgccggcgccgccgccgccgccgccgccgccgccgccgccgcctgggacaccctgaagatcagccaggccccccaggtgagcatcagcagaagcaagagctacagagagaacggcgcccccttcgtgccccccccccccgccctggacgagctgggcggccccggcggcgtgacccaccccgaggagagactgggcgtggccggcggccccggcagcgcccccgccgccggcggcggcaccggcaccgaggacgacgaggaggagctgctggaggacgaggaggacgaggacgaggaggaggagctgctggaggacgacgaggaggagctgctggaggacgacgccagagccctgctgaaggagcccagaagatgccccgtggccgccaccggcgccgtggccgccgccgccgccgccgccgtggccaccgagggcggcgagctgagccccaaggaggagctgctgctgcaccccgaggacgccgagggcaaggacggcgaggacagcgtgtgcctgagcgccggcagcgacagcgaggagggcctgctgaagagaaagcagagaagatacagaaccaccttcaccagctaccagctggaggagctggagagagccttccagaagacccactaccccgacgtgttcaccagagaggagctggccatgagactggacctgaccgaggccagagtgcaggtgtggttccagaacagaagagccaagtggagaaagagagagaaggccggcgcccagacccacccccccggcctgcccttccccggccccctgagcgccacccaccccctgagcccctacctggacgccagccccttccccccccaccaccccgccctggacagcgcctggaccgccgccgccgccgccgccgccgccgccttccccagcctgccccccccccccggcagcgccagcctgccccccagcggcgcccccctgggcctgagcaccttcctgggcgccgccgtgttcagacaccccgccttcatcagccccgccttcggcagactgttcagcaccatggcccccctgaccagcgccagcaccgccgccgccctgctgagacagcccacccccgccgtggagggcgccgtggccagcggcgccctggccgaccccgccaccgccgccgccgacagaagagccagcagcatcgccgccctgagactgaaggccaaggagcacgccgcccagctgacccagctgaacatcctgcccggcaccagcaccggcaaggaggtgtgctag

SEQ ID NO: 238052 - protein, 409 aa, Artificial Sequence
  derived and/or modified sequence
MELRVGNRYRLGRKIGSGSFGDIYLGTDIAAGEEVAIKLECVKTKHPQLHIESKIYKMMQGGVGIPTIRWCGAEGDYNVMVMELLGPSLEDLFNFCSRKFSLKTVLLLADQMISRIEYIHSKNFIHRDVKPDNFLMGLGKKGNLVYIIDFGLAKKYRDARTHQHIPYRENKNLTGTARYASINTHLGIEQSRRDDLESLGYVLMYFNLGSLPWQGLKAATKRQKYERISEKKMSTPIEVLCKGYPSEFATYLNFCRSLRFDDKPDYSYLRQLFRNLFHRQGFSYDYVFDWNMLKFGASRAADDAERERRDREERLRHSRNPATRGLPSTASGRLRGTQEVAPPTPLTPTSHTANTSPRPVSGMERERKVSMRLHRGAPVNISSSDLTGRQDTSRMSTSQNSIPFEHHGK

SEQ ID NO: 238053 - DNA, 1230 bp, Artificial Sequence
  derived and/or modified sequence
atggaactgagggtgggcaaccggtatcgtcttggccggaaaatcgggagtggctcattcggtgatatttacttaggcaccgacatcgccgctggagaggaagttgctatcaagctcgagtgtgtaaaaactaagcacccacaactgcacattgagtctaaaatatacaagatgatgcaagggggcgtgggcatccctacaataaggtggtgcggggcagagggggattacaacgtgatggtgatggagttgctgggaccaagcttggaagatctgttcaatttctgttctaggaagttctctctgaagacagttctgctgctggcagaccagatgatcagtagaattgaatatatccattctaagaactttattcaccgcgacgtgaagcccgacaactttttgatgggcctggggaaaaaagggaatttagtgtatatcattgactttggcctcgctaaaaagtatagggacgcgcgcacacaccaacacattccctatagagaaaacaaaaacctgacagggacggcccggtatgcttccattaacactcacctcggcatcgagcagtctagacgtgacgacttggaatccctaggttatgtgctaatgtacttcaacttgggcagtctgccttggcaaggtctgaaggctgccaccaaacggcagaagtatgagcggatctctgaaaaaaagatgtcaacccctatcgaagtgctttgcaagggataccccagtgaatttgcaacgtatctgaacttctgccgcagtctccgcttcgacgacaaacccgactatagttacctccggcagcttttccggaatctgttccatcggcaggggttctcctacgattatgtgttcgactggaacatgttgaaatttggggccagtagagcagcagatgacgccgagcgcgagagacgtgaccgggaagagcgccttagacactcacgcaacccggccacccgggggttgcctagcacagctagtggacgcctgcgaggaactcaagaagttgcaccccctactcctctgacgcctacgtcccacacagctaatacatccccaaggcccgtgtccgggatggaaagagagagaaaagtgtccatgagattgcaccggggggccccagttaatatctcatcgtcggatttgactggtcgtcaggataccagtcgaatgagcacttctcagaactctatccccttcgagcaccatggtaaatag

SEQ ID NO: 238054 - DNA, 381 bp, Artificial Sequence
  derived and/or modified sequence
atggagctacgcgtaggaaatcgctatcgactgggcaggaagattgggagcggcagttttggtgacatctatttaggaaccgacatcgctgccggcgaagaagtcgccattaagctcgagtgcgtgaaaacaaaacacccccaactgcacatagagtcgaaaatttataagatgatgcagggtggggtcggtattcccacaataaggtggtgtggggccgagggggattacaatgtcatggttatggagctcttaggaccttcacttgaggacctctttaacttctgttcacgcaagttctctctgaaaaccgtgctgctgttagcagatcaaatgaacaacccggaggaaatgacatggtcattgtgggcaacgtgttag

SEQ ID NO: 238055 - DNA, 1230 bp, Artificial Sequence
  derived and/or modified sequence
atggagctgcgggtgggcaaccgctaccgcctgggcaggaagattggcagcggcagctttggagacatctacctgggcacagacattgctgctggggaggaggtggccatcaagctggagtgtgtgaagaccaagcacccccagctgcacatcgagagcaagatctacaagatgatgcagggcggcgtgggcatccccaccatccgctggtgtggggctgagggggactacaacgtgatggtgatggagctgctgggccccagcctggaggacctcttcaacttctgcagcaggaagttcagcctgaagacagtgctgctgctggccgaccagatgatcagccgcatcgagtacatccacagcaagaacttcatccacagagatgtgaagccagacaacttcctgatgggcctgggcaagaagggcaacctggtgtacatcatcgactttggcctggccaagaagtacagagatgcccggacccaccagcacatcccctaccgggagaacaagaacctgaccggcacagcccgctatgccagcatcaacacccacctgggcatcgagcagagcagaagagatgacctggagagcctgggctacgtgctgatgtacttcaacctgggcagcctgccctggcagggcctgaaggccgccaccaagaggcagaagtatgagcgcatcagcgagaagaagatgagcacccccatcgaggtgctgtgcaagggctaccccagcgagtttgccacctacctgaacttctgccgcagcctgcgctttgatgacaagccagactacagctacctgcggcagctgttcaggaacctcttccaccggcagggcttctcctatgactatgtgtttgactggaacatgctgaagtttggagccagcagagctgctgatgatgctgagcgggagcggcgggaccgggaggagcggctgcggcacagcagaaatcctgccacccggggcctgcccagcacagccagcggccgcctgcggggcacccaggaggtggccccacccacccccctgacccccaccagccacacagccaacaccagccccaggcctgtgtctggcatggagcgggagaggaaggtgtccatgaggctgcacagaggagcccctgtgaacatcagcagcagtgacctgaccggccggcaggacaccagcaggatgagcaccagccagaacagcatcccctttgagcaccacggcaagtag

SEQ ID NO: 238056 - DNA, 381 bp, Artificial Sequence
  derived and/or modified sequence
atggagctgcgggtgggcaaccgctaccgcctgggcaggaagattggcagcggcagctttggagacatctacctgggcacagacattgctgctggggaggaggtggccatcaagctggagtgtgtgaagaccaagcacccccagctgcacatcgagagcaagatctacaagatgatgcagggcggcgtgggcatccccaccatccgctggtgtggggctgagggggactacaacgtgatggtgatggagctgctgggccccagcctggaggacctcttcaacttctgcagcaggaagttcagcctgaagacagtgctgctgctggccgaccagatgaacaaccctgaggagatgacctggagcctgtgggccacctgctag

SEQ ID NO: 238057 - DNA, 1230 bp, Artificial Sequence
  derived and/or modified sequence
atggagctgcgggtgggcaaccggtaccggctgggccggaagatcggttccggcagttttggggatatatacctgggaaccgacatagcagccggcgaggaagtggctatcaagctagagtgcgtcaagactaagcatccacagctacacatagagtcaaaaatctataagatgatgcagggcggcgtcggaattccaaccatcagatggtgtggggccgagggagattataatgtgatggtgatggaactgttgggtcccagcctggaagacctgttcaacttctgttcccggaagttctctctcaagactgtcctgctgctggctgatcagatgatctctcgtatagaatacattcacagcaagaactttattcacagggatgtgaaacccgataacttcctgatgggactcggcaagaaaggaaacctggtctacatcatcgatttcggtttagccaaaaaatatcgggacgcgaggacccaccagcacattccataccgagagaataaaaacctcacgggcactgccaggtatgcgtccattaatacccatctgggaatcgaacaatcacgacgcgatgatctcgagagcctcggatacgtgttgatgtattttaatctgggatctctgccatggcaagggttgaaggcagccacaaagcggcagaagtatgaacggatcagtgaaaaaaaaatgtctaccccaatcgaggtgctttgcaaggggtacccttctgaattcgccacttacctgaatttctgccgctctctgcgctttgatgataaaccagactacagctacctgagacaactctttcggaacttgtttcacagacagggcttctcatacgactacgtattcgactggaacatgctcaaattcggggcaagtcgtgcggccgacgacgccgagcgcgagaggagagaccgggaggagcggctgagacatagcaggaaccccgctacccgcggcctgccatccaccgcctccgggcggctgagaggcacgcaagaggtggcacctcccacaccactcacgccaaccagtcataccgcaaacaccagtccaaggccagtctcaggtatggagagagaacgcaaggtgtctatgcgcctgcataggggagcacccgtcaatatatcctcgtcggatttgacaggcagacaggataccagccgcatgtccactagccagaactctattccattcgagcatcatggcaaatag

SEQ ID NO: 238058 - DNA, 381 bp, Artificial Sequence
  derived and/or modified sequence
atggagctgcgggtgggcaaccggtaccggctgggccggaagatcggatctggctcatttggggacatctacctcggcaccgatatcgctgccggagaggaagtagccatcaaactggaatgtgtgaagacaaagcacccccagcttcacatcgaatcaaaaatctacaagatgatgcagggcggcgtgggcattcctacaatcagatggtgcggggctgaaggagactataatgtgatggtgatggagctcctgggcccctctcttgaggatcttttcaacttttgtagccgcaagttctccctgaaaacagtgctgcttctcgcggatcagatgaacaacccggaggaaatgacatggagcttgtgggccacgtgttag

SEQ ID NO: 238059 - DNA, 1230 bp, Artificial Sequence
  derived and/or modified sequence
atggagttgcgtgtcggcaatcgctaccggcttggcaggaaaattgggtcagggtctttcggcgatatttatcttggcaccgacattgctgcaggcgaagaggtggccattaaattagagtgcgtaaagacaaaacaccctcagctgcacattgagagtaaaatatacaagatgatgcagggcggagtgggcatccccaccatccggtggtgcggtgccgagggtgactataatgtgatggtcatggagctgctgggaccctcccttgaagatctcttcaacttctgttcaagaaaattcagcctcaaaacagtgcttcttttggctgatcagatgatttcccgtatagagtatatccactccaagaactttattcatagagatgtaaagccagacaatttcctgatgggcctgggtaagaaaggcaacctcgtttacataatcgatttcgggctggccaaaaaatatagagatgctagaacccatcagcatatcccttaccgggaaaacaaaaacctgacaggaacagcccgatatgcctcgatcaacactcatctgggcatagaacagagtcgccgtgacgacctggagagccttggctacgttcttatgtactttaatctcggtagcctgccgtggcagggccttaaagcggcaaccaagagacaaaagtatgaaagaatctctgagaaaaaaatgagcaccccaatagaggtgctgtgtaagggatatcctagcgaatttgccacttatcttaatttttgcagaagcctgaggtttgatgacaaacccgattactcctacctgagacagctattccgcaacctgttccatcggcagggcttctcttatgactacgtctttgactggaatatgctgaagtttggcgcaagtcgggctgcagacgacgccgaacgggaaagaagagaccgagaggaacgtctgcgccattcacgtaacccagcaactcggggtcttccttcaaccgctagtggcagactgagaggtacccaagaggtggccccaccaacccccctgacaccgacgtcccatactgccaacacctcaccgagacccgtgtcaggtatggagagggaacgaaaagtcagtatgcgattacaccggggagctcccgttaacatctcatctagcgatctgacaggtcgtcaggatacgagcagaatgtcgacatcccagaattccattccctttgagcaccacggcaaatag

SEQ ID NO: 238060 - DNA, 381 bp, Artificial Sequence
  derived and/or modified sequence
atggagctgagggtaggcaacaggtaccgcttgggccgaaaaatcgggtccggttcctttggggatatatacctcggtaccgatattgcagccggtgaagaagtggccattaaactcgaatgcgtcaaaactaaacatccccagctccatattgagtccaaaatatacaagatgatgcaaggcggtgtgggaataccaactatccgttggtgcggcgctgaaggagattacaatgtcatggtcatggaactcctaggcccttccctcgaagatctatttaatttttgcagcaggaaattcagcctgaagactgtgcttcttctcgctgatcagatgaataatcccgaggaaatgacgtggtccctgtgggcgacatgctag

SEQ ID NO: 238061 - DNA, 2039 bp, Artificial Sequence
  derived and/or modified sequence
gcgcgatggcggcggctcctttaggcagctgaaaggggatttaggcccggaagatccgagtccatccgcggcggggagagggcaagcgggaccggtaggggccggagcagcggcggcggcgctcggactgtcccatccgccccgtattgaggcgctgggagcggcggggcgacaggaaagcgatggtgaaagcggggccgtgaggggggcggagccgggagccggacccgcagtagcggcagcagcggcgccgcctcccagagttcagacccaggaagcggccgggagggcaggagcgaatcgggccgccgccgccatggagctgagagtcgggaacaggtaccggctgggccggaagatcggcagcggctccttcggagacatctatctcggtacggacattgctgcaggagaagaggttgccatcaagcttgaatgtgtcaaaaccaaacaccctcagctccacattgagagcaaaatctacaagatgatgcagggaggagtgggcatccccaccatcagatggtgcggggcagagggggactacaacgtcatggtgatggagctgctggggccaagcctggaggacctcttcaacttctgctccaggaaattcagcctcaaaaccgtcctgctgcttgctgaccaaatgatcagtcgcatcgaatacattcattcaaagaacttcatccaccgggatgtgaagccagacaacttcctcatgggcctggggaagaagggcaacctggtgtacatcatcgacttcgggctggccaagaagtaccgggatgcacgcacccaccagcacatcccctatcgtgagaacaagaacctcacggggacggcgcggtacgcctccatcaacacgcaccttggaattgaacaatcccgaagagatgacttggagtctctgggctacgtgctaatgtacttcaacctgggctctctcccctggcaggggctgaaggctgccaccaagagacagaaatacgaaaggattagcgagaagaaaatgtccacccccatcgaagtgttgtgtaaaggctacccttccgaatttgccacatacctgaatttctgccgttccttgcgttttgacgacaagcctgactactcgtacctgcggcagcttttccggaatctgttccatcgccagggcttctcctatgactacgtgttcgactggaacatgctcaaatttggtgccagccgggccgccgatgacgccgagcgggagcgcagggaccgagaggagcggctgagacactcgcggaacccggctacccgcggcctcccttccacagcctccggccgcctgcgggggacgcaggaagtggctccccccacacccctcacccctacctcacacacggctaacacctccccccggcccgtctccggcatggagagagagcggaaagtgagtatgcggctgcaccgcggggcccccgtcaacatctcctcgtccgacctcacaggccgacaagatacctctcgcatgtccacctcacagaatagcattcctttcgaacaccacggcaagtagctgctcgtctcccatcggaaggcagcactggattcctggtcgggtggcttccagtggtcttcagtctgtcgtgcaccgatgagaactctccttattgctgtgaagggcagacaatgcatggctgatctactctgttaccaatggctttactagtgacacgtcccccggtctaggatcgaaatgttaacaccgggagctctccaggccactcacccagcgacgctcgtgggggaaacatactaaacggacagactccaagagctgccaccgctggggctgcactgcggccccccacgtgaactcggttgtaacggggctgggaagaaaagcagagagagaattgcagagaatcagactccttttccagggcctcagctccctccagtggtggccgccctgtactccctgacgattccactgtaactaccaatcttctacttggttaagacagttttgtatcattttgctaaaaattattggcttaaatctgtgt

SEQ ID NO: 238062 - DNA, 1040 bp, Artificial Sequence
  derived and/or modified sequence
agacccaggaagcggccgggagggcaggagcgaatcgggccgccgccgccatggagctgagagtcgggaacaggtaccggctgggccggaagatcggcagcggctccttcggagacatctatctcggtacggacattgctgcaggagaagaggttgccatcaagcttgaatgtgtcaaaaccaaacaccctcagctccacattgagagcaaaatctacaagatgatgcagggaggagtgggcatccccaccatcagatggtgcggggcagagggggactacaacgtcatggtgatggagctgctggggccaagcctggaggacctcttcaacttctgctccaggaaattcagcctcaaaaccgtcctgctgcttgctgaccaaatgaacaatcccgaagagatgacttggagtctctgggctacgtgctaatgtacttcaacctgggctctctcccctggcaggggctgaaggctgccaccaagagacagaaatacgaaaggattagcgagaagaaaatgtccacccccatcgaagtgttgtgtaaaggctacccttccgaatttgccacatacctgaatttctgccgttccttgcgttttgacgacaagcctgactactcgtacctgcggcagcttttccggaatctgttccatcgccagggcttctcctatgactacgtgttcgactggaacatgctcaaatttggtgccagccgggccgccgatgacgccgagcgggagcgcagggaccgagaggagcggctgagacactcgcggaacccggctacccgcggcctcccttccacagcctccggccgcctgcgggggacgcaggaagtggctccccccacacccctcacccctacctcacacacggctaacacctccccccggcccgtctccggcatggagagagagcggaaagtgagtatgcggctgcaccgcggggcccccgtcaacatctcctcgtccgacctcacaggccgacaagatacctctcgcatgtccacctcacagaatagcattcctttcgaacacc

SEQ ID NO: 238063 - DNA, 1230 bp, Artificial Sequence
  derived and/or modified sequence
atggagctgagagtgggcaacagatacagactgggcagaaagatcggcagcggcagcttcggcgacatctacctgggcaccgacatcgccgccggcgaggaggtggccatcaagctggagtgcgtgaagaccaagcacccccagctgcacatcgagagcaagatctacaagatgatgcagggcggcgtgggcatccccaccatcagatggtgcggcgccgagggcgactacaacgtgatggtgatggagctgctgggccccagcctggaggacctgttcaacttctgcagcagaaagttcagcctgaagaccgtgctgctgctggccgaccagatgatcagcagaatcgagtacatccacagcaagaacttcatccacagagacgtgaagcccgacaacttcctgatgggcctgggcaagaagggcaacctggtgtacatcatcgacttcggcctggccaagaagtacagagacgccagaacccaccagcacatcccctacagagagaacaagaacctgaccggcaccgccagatacgccagcatcaacacccacctgggcatcgagcagagcagaagagacgacctggagagcctgggctacgtgctgatgtacttcaacctgggcagcctgccctggcagggcctgaaggccgccaccaagagacagaagtacgagagaatcagcgagaagaagatgagcacccccatcgaggtgctgtgcaagggctaccccagcgagttcgccacctacctgaacttctgcagaagcctgagattcgacgacaagcccgactacagctacctgagacagctgttcagaaacctgttccacagacagggcttcagctacgactacgtgttcgactggaacatgctgaagttcggcgccagcagagccgccgacgacgccgagagagagagaagagacagagaggagagactgagacacagcagaaaccccgccaccagaggcctgcccagcaccgccagcggcagactgagaggcacccaggaggtggccccccccacccccctgacccccaccagccacaccgccaacaccagccccagacccgtgagcggcatggagagagagagaaaggtgagcatgagactgcacagaggcgcccccgtgaacatcagcagcagcgacctgaccggcagacaggacaccagcagaatgagcaccagccagaacagcatccccttcgagcaccacggcaagtag

SEQ ID NO: 238064 - DNA, 381 bp, Artificial Sequence
  derived and/or modified sequence
atggagctgagagtgggcaacagatacagactgggcagaaagatcggcagcggcagcttcggcgacatctacctgggcaccgacatcgccgccggcgaggaggtggccatcaagctggagtgcgtgaagaccaagcacccccagctgcacatcgagagcaagatctacaagatgatgcagggcggcgtgggcatccccaccatcagatggtgcggcgccgagggcgactacaacgtgatggtgatggagctgctgggccccagcctggaggacctgttcaacttctgcagcagaaagttcagcctgaagaccgtgctgctgctggccgaccagatgaacaaccccgaggagatgacctggagcctgtgggccacctgctag

SEQ ID NO: 238065 - protein, 1130 aa, Artificial Sequence
  derived and/or modified sequence
MAVRKKDGGPNVKYYEAADTVTQFDNVRLWLGKNYKKYIQAEPPTNKSLSSLVVQLLQFQEEVFGKHVSNAPLTKLPIKCFLDFKAGGSLCHILAAAYKFKSDQGWRRYDFQNPSRMDRNVEMFMTIEKSLVQNNCLSRPNIFLCPEIEPKLLGKLKDIIKRHQGTVTEDKNNASHVVYPVPGNLEEEEWVRPVMKRDKQVLLHWGYYPDSYDTWIPASEIEASVEDAPTPEKPRKVHAKWILDTDTFNEWMNEEDYEVNDDKNPVSRRKKISAKTLTDEVNSPDSDRRDKKGGNYKKRKRSPSPSPTPEAKKKNAKKGPSTPYTKSKRGHREEEQEDLTKDMDEPSPVPNVEEVTLPKTVNTKKDSESAPVKGGTMTDLDEQEDESMETTGKDEDENSTGNKGEQTKNPDLHEDNVTEQTHHIIIPSYAAWFDYNSVHAIERRALPEFFNGKNKSKTPEIYLAYRNFMIDTYRLNPQEYLTSTACRRNLAGDVCAIMRVHAFLEQWGLINYQVDAESRPTPMGPPPTSHFHVLADTPSGLVPLQPKTPQGRQVDADTKAGRKGKELDDLVPETAKGKPELQTSASQQMLNFPDKGKEKPTDMQNFGLRTDMYTKKNVPSKSKAAASATREWTEQETLLLLEALEMYKDDWNKVSEHVGSRTQDECILHFLRLPIEDPYLEDSEASLGPLAYQPIPFSQSGNPVMSTVAFLASVVDPRVASAAAKSALEEFSKMKEEVPTALVEAHVRKVEEAAKVTGKADPAFGLESSGIAGTTSDEPERIEESGNDEARVEGQATDEKKEPKEPREGGGAIEEEAKEKTSEAPKKDEEKGKEGDSEKESEKSDGDPIVDPEKEKEPKEGQEEVLKEVVESEGERKTKVERDIGEGNLSTAAAAALAAAAVKAKHLAAVEERKIKSLVALLVETQMKKLEIKLRHFEELETIMDREREALEYQRQQLLADRQAFHMEQLKYAEMRARQQHFQQMHQQQQQPPPALPPGSQPIPPTGAAGPPAVHGLAVAPASVVPAPAGSGAPPGSLGPSEQIGQAGSTAGPQQQQPAGAPQPGAVPPGVPPPGPHGPSPFPNQQTPPSMMPGAVPGSGHPGVADPGTPLPPDPTAPSPGTVTPVPPPQ

SEQ ID NO: 238066 - protein, 382 aa, Artificial Sequence
  derived and/or modified sequence
MSDSKCDSQFYSVQVADSTFTVLKRYQQLKPIGSGAQGIVCAAFDTVLGINVAVKKLSRPFQNQTHAKRAYRELVLLKCVNHKNIISLLNVFTPQKTLEEFQDVYLVMELMDANLCQVIHMELDHERMSYLLYQMLCGIKHLHSAGIIHRDLKPSNIVVKSDCTLKILDFGLARTACTNFMMTPYVVTRYYRAPEVILGMGYKENVDIWSVGCIMGELVKGCVIFQGTDHIDQWNKVIEQLGTPSAEFMKKLQPTVRNYVENRPKYPGIKFEELFPDWIFPSESERDKIKTSQARDLLSKMLVIDPDKRISVDEALRHPYITVWYDPAEAEAPPPQIYDAQLEEREHAIEEWKELIYKEVMDWEERSKNGVVKDQPSAQMQQ

SEQ ID NO: 238067 - DNA, 1149 bp, Artificial Sequence
  derived and/or modified sequence
atgtccgactctaaatgtgatagccagttctacagcgtacaggtggcagacagcacctttacggttttgaagcgttatcagcagctcaaaccgatcgggtccggtgctcagggcattgtgtgcgcagcatttgatactgtgctcggcattaacgtagccgtgaagaagctttccagaccattccagaatcaaacacacgccaagagggcatatagagagctggtcctccttaagtgtgtgaaccacaaaaatataatttcccttctgaacgttttcaccccacaaaagacccttgaagaattccaggatgtgtacctcgtgatggagctgatggatgctaacctatgtcaggttattcacatggagctggaccacgagaggatgtcctacctgctgtaccagatgctctgtggaatcaaacatctacattccgcgggaattattcatcgcgatctgaaacctagcaatatagttgtgaaatctgattgcaccctgaaaattctggactttgggctcgccaggactgcctgcacaaattttatgatgacaccttacgtcgtgacgcgttactaccgcgcacccgaggtgatattgggcatgggatacaaggaaaatgtggatatctggtccgtgggatgtatcatgggggaattggtaaaaggatgcgtgatcttccaagggaccgaccatatagaccagtggaacaaggtgatcgaacagctagggacccctagcgccgaatttatgaagaaattacagccgacagtgagaaattacgtggagaaccgacccaagtatcctgggattaagttcgaggaactttttcccgactggattttcccttctgaatctgaacgggacaaaattaagaccagccaagcccgggacctgctatctaaaatgctcgttatcgatcctgacaagcgaatttcagtggatgaggccttgagacacccctatataacggtgtggtacgatcctgctgaagcagaagctcccccaccacagatttacgatgcgcagctggaggaaagggagcacgctatcgaagaatggaaggagttaatctacaaggaggtcatggactgggaggaacggtctaagaatggggtggttaaagatcagccaagcgcacagatgcagcagtag

SEQ ID NO: 238068 - DNA, 1149 bp, Artificial Sequence
  derived and/or modified sequence
atgtctgacagcaaatgtgacagccagttctacagcgtgcaggtggccgacagcaccttcaccgtgctgaagcgctaccagcagctgaagcccatcggcagcggggcccagggcatcgtgtgtgccgcctttgacacagtgctgggcatcaacgtggccgtgaagaagctgagccggcccttccagaaccagacccacgccaagagggcctaccgggagctggtgctgctgaagtgtgtgaaccacaagaacatcatcagcctgctgaatgtgttcaccccccagaagaccctggaggagttccaggatgtgtacctggtgatggagctgatggatgccaacctgtgccaggtgatccacatggagctggaccacgagaggatgagctacctgctgtaccagatgctgtgtggcatcaagcacctgcacagcgctggcatcatccaccgggacctgaagcccagcaacatcgtggtgaagagtgactgcaccctgaagatcctggactttggcctggccaggacagcctgcaccaacttcatgatgaccccctacgtggtgacccgctactaccgggcccctgaggtgatcctgggcatgggctacaaggaaaatgtggacatctggagcgtgggctgcatcatgggagagctggtgaagggctgcgtcatcttccagggcacagaccacatcgaccagtggaacaaggtgattgagcagctgggcaccccatctgctgagttcatgaagaagctgcagcccaccgtgagaaattatgtggagaaccggcccaagtacccaggcatcaagtttgaggagctgttcccagactggatcttccccagcgagagcgagcgggacaagatcaagaccagccaggcccgggacctgctgagcaagatgctggtgattgatcctgacaagaggatctctgtggatgaggccctgcggcacccctacatcaccgtgtggtatgaccctgctgaggccgaggcccccccaccccagatctatgatgcccagctggaggagcgggagcacgccatcgaggagtggaaggagctgatctacaaggaggtgatggactgggaggagaggagcaagaatggagtggtgaaggaccagcccagcgcccagatgcagcagtag

SEQ ID NO: 238069 - DNA, 4326 bp, Artificial Sequence
  derived and/or modified sequence
gcggagaagggagcgggaccggaagggtcgcagcgccccggcgcccctcacacccactgcggcggcggcggcggcggcggcggcggggcggagcggagcggggcgggccggcggcggagccggggccgcggagccaggagtgactagcacgcagcgccgccagtccgcccgcccgccctctccccgtggcgcggcggcggggaggcgagggatctgaaacttgcccacccttcgggatattgcaggacgctgcatcatgagcgacagtaaatgtgacagtcagttttatagtgtgcaagtggcagactcaaccttcactgtcctaaaacgttaccagcagctgaaaccaattggctctggggcccaagggattgtttgtgctgcatttgatacagttcttgggataaatgttgcagtcaagaaactaagccgtccttttcagaaccaaactcatgcaaagagagcttatcgtgaacttgtcctcttaaaatgtgtcaatcataaaaatataattagtttgttaaatgtgtttacaccacaaaaaactctagaagaatttcaagatgtgtatttggttatggaattaatggatgctaacttatgtcaggttattcacatggagctggatcatgaaagaatgtcctaccttctttaccagatgctttgtggtattaaacatctgcattcagctggtataattcatagagatttgaagcctagcaacattgttgtgaaatcagactgcaccctgaagatccttgactttggcctggcccggacagcgtgcactaacttcatgatgaccccttacgtggtgacacggtactaccgggcgcccgaagtcatcctgggtatgggctacaaagagaacgttgatatctggtcagtgggttgcatcatgggagagctggtgaaaggttgtgtgatattccaaggcactgaccatattgatcagtggaataaagttattgagcagctgggaacaccatcagcagagttcatgaagaaacttcagccaactgtgaggaattatgtcgaaaacagaccaaagtatcctggaatcaaatttgaagaactctttccagattggatattcccatcagaatctgagcgagacaaaataaaaacaagtcaagccagagatctgttatcaaaaatgttagtgattgatcctgacaagcggatctctgtagacgaagctctgcgtcacccatacatcactgtttggtatgaccccgccgaagcagaagccccaccacctcaaatttatgatgcccagttggaagaaagagaacatgcaattgaagaatggaaagagctaatttacaaagaagtcatggattgggaagaaagaagcaagaatggtgttgtaaaagatcagccttcagcacagatgcagcagtaagtagcaacgccactccttctcagtcttcatcgatcaatgacatttcatccatgtccactgagcagacgctggcctcagacacagacagcagtcttgatgcctcgacgggaccccttgaaggctgtcgatgataggttagaaatagcaaacctgtcagcattgaaggaactctcacctccgtgggcctgaaatgcttgggagttgatggaaccaaatagaaaaactccatgttctgcatgtaagaaacacaatgccttgccctactcagacctgataggattgcctgcttagatgataaaatgaggcagaatatgtctgaagaaaaaaattgcaagccacacttctagagattttgttcaagatcatttcaggtgagcagttagagtaggtgaatttgtttcaaattgtactagtgacagtttctcatcatctgtaactgttgagatgtatgtgcatgtgaccacaaatgcttgcttggacttgcccatctagcactttggaaatcagtatttaaatgccaaataatcttccaggtagtgctgcttctgaagttatctcttaatcctcttaagtaatttggtgtctgtccagaaaaagtcgatttatgtgtattaattggccatcatgatgttatcatatcttattcccttttatgctatgatttattctatcttttgtatttcagaagacatataattaaatctatttaataaataaaaatatatagcttttcttagatttgtgatgtttggggctgagaattatcacggctaaaaccaagacacttatgtggacatcttgttttctttaaactgtcttgtctgggatgattgtacattcagctttactgcacgatacaattttaagttttgcttagtgctgcttgaaatcctagctaccttatctcttttcttcttggtcttctagacttcttatgaatttaaaatgctacctagaacttcaccttctttattaggtgcgtaacactccatcttaattaaatatgatggcagataggttcctgcatccatggcctaacgttggagtggaattttacaaaatgctcactagagatcactgcagtcatttcctaagtgcttcctttgccacagactggcctgggtcctttatttaccttccctcattcactttccctcggccaataccacgttcttgattttctttcttcactggaagaaagcagataaactcctctttggtctgttttcagaggccaggctgattcagatgcctgttgctattgttgctctccattgttgggaggcattccttttcacaagaatgttctgggaaactcttcagaggacgtgaaggaaataccctgaagagtcatgattaactattgactattttctgatttaaaactgctcacctgaaattgatacttttagactttacgatcagtaaattattcagaattcatgaagatgctgagtatgttaagtgtcactgcaggaacggagctgtggtgatcacgttttgcctgcctgtgcccatgtctcttcccttgagcttattctgttgctgattcatatcttgtgttcaattattttggaagcttttcagtcgacattctgtagagtgtgttctgaggaggaactgtgataagaaagtttattataaatattatgtaaaatatatggctctctctgcaccagttatatcttattggttggtcatatcactggaaactggaacctttgattagcaaaattaatattgaaataagaaatagttcttttatattgtgtcatttggacactttcaagtacaaaatggtaataataacttggattgaggcggaaacacctattttatggctatctatctaaacatcttaaaatggccttctctgtaatacactttcttttaaaagacttcactaaatctatctttaaaaggaaaaacaaaagggagaggttgaaaatgcgcgagctgccctgcactgtgtgatgctccctccccgggagacgtggacgggggacgaggcacccgcagacgcccttctgctcactcgctcctctgtgcattcagcgagccacttgccacagatggagcccgtgacggtgtggagggtttcctggaaaggccatcttccaccaggtagaggcgagcgtgcctaggacaggccacagggctccacagaaatacctcaccccagcttcagggttctctctcctgagcctagatttgccagggtcttggtgccacgcaaatggtttcaaactgatctctatggataaatgctgatgttggttaaagaactgaaaaatgtgctcaactgtttcatcttttctattttatttttgtaatttatattgtacacaacccaggaagtaactattttggacatgtatttttataaaccaggtaatttactattatcctggaatttagactaggtttgtttcatttgttgacttagtttccagccaagaaggaaacgactgtctcccccatgtccaggtctcagtttcaagggcagagtccagagagcagacagagttctgtgagagcaggagagcagtctggaaaccctggctgtgcataccgtgtcagccgtgggcctggagatgggagcaggtgagacgcagagccccagtactgagaggaggaagccctcttacagggccccttgcccaccccaagtccgtgtctgaaacacggagcgggtgctgcttcaacccgcatttaatgctgtgtaagtagcgataaccacgtacgagtctgtctggttgatttctaatgtgactcctctggtatttcctcctggtaataaatacaagtgtgacctttcagattgcatatctcaaaagtaacattgctaatgttttataataaaatatattatgtgtgttttggttggtgaaaataatacagactacattttaaaagataaa

SEQ ID NO: 238070 - DNA, 1416 bp, Artificial Sequence
  derived and/or modified sequence
atattgcaggacgctgcatcatgagcgacagtaaatgtgacagtcagttttatagtgtgcaagtggcagactcaaccttcactgtcctaaaacgttaccagcagctgaaaccaattggctctggggcccaagggattgtttggcgccatcattgcagtgccttgccattcattggcaggatgaggccagtcagtgtcattgtcactccatggattaaccaggaagggatgctgtgtgaggggttgggctggccatctcttccttggtgtctcacttcaactgtgtgtccagcccagaacgtcagaatcgttagtctgaccctgaacgttagtctcttgcatggtaagacggtcagccgccgcagcatcacgggccagctcaagtgctgcatttgatacagttcttgggataaatgttgcagtcaagaaactaagccgtccttttcagaaccaaactcatgcaaagagagcttatcgtgaacttgtcctcttaaaatgtgtcaatcataaaaatataattagtttgttaaatgtgtttacaccacaaaaaactctagaagaatttcaagatgtgtatttggttatggaattaatggatgctaacttatgtcaggttattcacatggagctggatcatgaaagaatgtcctaccttctttaccagatgctttgtggtattaaacatctgcattcagctggtataattcatagagatttgaagcctagcaacattgttgtgaaatcagactgcaccctgaagatccttgactttggcctggcccggacagcgtgcactaacttcatgatgaccccttacgtggtgacacggtactaccgggcgcccgaagtcatcctgggtatgggctacaaagagaacgttgatatctggtcagtgggttgcatcatgggagagctggtgaaaggttgtgtgatattccaaggcactgaccatattgatcagtggaataaagttattgagcagctgggaacaccatcagcagagttcatgaagaaacttcagccaactgtgaggaattatgtcgaaaacagaccaaagtatcctggaatcaaatttgaagaactctttccagattggatattcccatcagaatctgagcgagacaaaataaaaacaagtcaagccagagatctgttatcaaaaatgttagtgattgatcctgacaagcggatctctgtagacgaagctctgcgtcacccatacatcactgtttggtatgaccccgccgaagcagaagccccaccacctcaaatttatgatgcccagttggaagaaagagaacatgcaattgaagaatggaaagagctaatttacaaagaagtcatggattgggaagaaagaagcaagaatggtgttgtaaaagatcagccttcaggttagtgattgctttaattgatt

SEQ ID NO: 238071 - DNA, 1149 bp, Artificial Sequence
  derived and/or modified sequence
atgagcgacagcaagtgcgacagccagttctacagcgtgcaggtggccgacagcacattcactgttctgaagaggtaccagcaactgaagcctattggcagtggcgcacagggcatcgtctgtgctgcgtttgacactgtgctgggcataaatgtggcggttaaaaagctgtctcgccccttccagaaccagacccatgcgaaacgggcttaccgcgaattggtcctccttaaatgcgtaaaccataagaatataatatcactgctgaatgtgtttaccccccaaaaaactctcgaagaatttcaagacgtatatcttgtcatggagttgatggatgcaaacctctgccaggtgatccatatggagttagatcatgagcgcatgagctatttactgtaccagatgctctgcgggataaagcacctgcattcagccggtattatccacagagacctgaagccctcaaacatcgtggttaaatctgactgcacactgaaaatcctggacttcgggctggctagaaccgcttgcactaatttcatgatgaccccgtatgtggtgacacgctattacagggctcccgaagtgattcttggcatgggctacaaagaaaacgtagacatctggagtgtggggtgtataatgggggagctggtcaagggctgcgtaatattccagggaacagaccacattgaccagtggaacaaggtaatcgagcaattagggacccccagcgccgagttcatgaagaagctgcagcccaccgtccggaattacgtcgaaaataggcccaagtacccagggataaagttcgaagagctgtttcctgactggattttccctagtgaatccgagagggataaaatcaaaactagtcaggctcgcgacctgctcagtaagatgctcgtgatagaccccgataaaagaattagtgtggatgaagcactgcgccacccatacataaccgtctggtatgatcccgccgaagctgaagcccctcccccacaaatttatgatgcacaactggaagagagagaacacgccattgaggagtggaaagaactcatctacaaagaggtgatggactgggaggagagatccaagaacggagtggttaaggaccagcctagcgctcagatgcagcagtag

SEQ ID NO: 238072 - DNA, 1149 bp, Artificial Sequence
  derived and/or modified sequence
atgtcggactccaaatgcgatagtcagttttactctgtccaagtggcagatagtaccttcaccgtgctcaagcgttatcagcagcttaagccaatcggatctggcgcacagggtatcgtgtgcgcagcatttgacactgtgcttgggataaacgttgctgtcaagaagctgagccggccatttcaaaatcaaacacatgcaaaaagggcctaccgagagctcgtccttctcaaatgcgtaaatcataaaaatatcattagcttgttgaacgttttcactccgcaaaaaactctggaggagtttcaagacgtgtacttggttatggagctgatggacgccaatttgtgtcaggtcatacacatggagctggatcacgaacgcatgtcataccttctataccagatgctttgcgggatcaaacacttgcacagtgcgggtatcatccatcgcgatctcaagccatccaacatagttgtcaagtccgactgtaccctcaaaatcctagactttgggctggctaggacggcctgtacaaattttatgatgaccccctatgttgtcacgcgatactaccgcgcaccggaggtgattctaggcatgggatacaaagagaacgtggatatttggtccgtcgggtgcatcatgggagaacttgtcaaggggtgcgtgattttccagggcaccgaccatatcgaccaatggaacaaagttatcgagcagctcgggacacccagtgcggaattcatgaaaaaattgcaacctaccgtcaggaactacgtggagaaccggccaaaatatcccggaatcaaatttgaggaactcttccctgattggatcttcccaagtgaatccgagcgagacaagatcaagacgagccaagcccgtgacctattatcaaagatgctcgttattgaccccgataagcgcatctcggttgatgaggcactgcgtcatccttacataaccgtatggtacgatcctgccgaggcggaggcacccccaccacagatttacgacgcccagcttgaagagcgggagcatgccatcgaggaatggaaggagctaatttataaagaagtaatggactgggaggagcgcagcaagaatggtgtggtgaaagatcagccctcagctcaaatgcagcaatag

SEQ ID NO: 238073 - DNA, 1149 bp, Artificial Sequence
  derived and/or modified sequence
atgagcgacagcaagtgcgacagccagttctacagcgtgcaggtggccgacagcaccttcaccgtgctgaagagataccagcagctgaagcccatcggcagcggcgcccagggcatcgtgtgcgccgccttcgacaccgtgctgggcatcaacgtggccgtgaagaagctgagcagacccttccagaaccagacccacgccaagagagcctacagagagctggtgctgctgaagtgcgtgaaccacaagaacatcatcagcctgctgaacgtgttcaccccccagaagaccctggaggagttccaggacgtgtacctggtgatggagctgatggacgccaacctgtgccaggtgatccacatggagctggaccacgagagaatgagctacctgctgtaccagatgctgtgcggcatcaagcacctgcacagcgccggcatcatccacagagacctgaagcccagcaacatcgtggtgaagagcgactgcaccctgaagatcctggacttcggcctggccagaaccgcctgcaccaacttcatgatgaccccctacgtggtgaccagatactacagagcccccgaggtgatcctgggcatgggctacaaggagaacgtggacatctggagcgtgggctgcatcatgggcgagctggtgaagggctgcgtgatcttccagggcaccgaccacatcgaccagtggaacaaggtgatcgagcagctgggcacccccagcgccgagttcatgaagaagctgcagcccaccgtgagaaactacgtggagaacagacccaagtaccccggcatcaagttcgaggagctgttccccgactggatcttccccagcgagagcgagagagacaagatcaagaccagccaggccagagacctgctgagcaagatgctggtgatcgaccccgacaagagaatcagcgtggacgaggccctgagacacccctacatcaccgtgtggtacgaccccgccgaggccgaggccccccccccccagatctacgacgcccagctggaggagagagagcacgccatcgaggagtggaaggagctgatctacaaggaggtgatggactgggaggagagaagcaagaacggcgtggtgaaggaccagcccagcgcccagatgcagcagtag

SEQ ID NO: 238074 - protein, 382 aa, Artificial Sequence
  derived and/or modified sequence
MSDSKCDSQFYSVQVADSTFTVLKRYQQLKPIGSGAQGIVCAAFDTVLGINVAVKKLSRPFQNQTHAKRAYRELVLLKCVNHKNIISLLNVFTPQKTLEEFQDVYLVMELMDANLCQVIHMELDHERMSYLLYQMLCGIKHLHSAGIIHRDLKPSNIVVKSDCTLKILDFGLARTACTNFMMTPYVVTRYYRAPEVILGMGYKENVDIWSVGCIMAEMVLHKVLFPGRDYIDQWNKVIEQLGTPSAEFMKKLQPTVRNYVENRPKYPGIKFEELFPDWIFPSESERDKIKTSQARDLLSKMLVIDPDKRISVDEALRHPYITVWYDPAEAEAPPPQIYDAQLEEREHAIEEWKELIYKEVMDWEERSKNGVVKDQPSAQMQQ

SEQ ID NO: 238075 - protein, 124 aa, Artificial Sequence
  derived and/or modified sequence
MSDSKCDSQFYSVQVADSTFTVLKRYQQLKPIGSGAQGIVWRHHCSALPFIGRMRPVSVIVTPWINQEGMLCEGLGWPSLPWCLTSTVCPAQNVRIVSLTLNVSLLHGKTVSRRSITGQLKCCI

SEQ ID NO: 238076 - DNA, 1149 bp, Artificial Sequence
  derived and/or modified sequence
atgtctgatagtaagtgcgatagtcagttctattccgtccaggttgccgactccacctttacagtcttgaagcgctatcagcaactcaagccaatcggcagtggcgctcaaggaatagtatgtgccgcatttgataccgttctggggataaacgttgcggtcaagaagcttagcaggccattccaaaatcagacccatgcaaagcgcgcttacagagagttggtgttgttaaagtgcgtgaatcacaaaaacatcatctctctattgaacgtattcaccccgcagaaaacgctggaagaattccaagacgtgtaccttgtgatggagctcatggacgctaacctatgccaggtcattcatatggagctggatcatgagaggatgtcgtacctgctgtaccagatgctttgcgggatcaaacatctccactccgccggaattattcaccgggatctgaaaccttcgaacattgtggtcaagagcgactgtacgcttaagatactggactttggactggcaaggacagcctgcaccaattttatgatgaccccctacgtggtgacaaggtattatcgggcccccgaggtgatactgggcatggggtacaaggagaacgttgacatctggagcgtcggatgtatcatggctgagatggttcttcacaaagtcctctttcccggacgggactatatcgaccagtggaataaggtgatcgagcagctgggaactccatctgcagaattcatgaagaaattgcagccaacagtgagaaactacgttgaaaaccgcccaaagtaccctggtatcaagtttgaggaactgttcccagactggattttcccgagtgagagcgaacgggataaaattaaaactagtcaggctcgggacctcctctcgaaaatgctggtcatcgacccggataagcgcatttcggtggatgaggccctgaggcatccatatatcacagtgtggtacgatcccgctgaagcggaagcccccccaccacagatctatgacgcacaacttgaggaacgggaacacgccattgaagagtggaaggagctaatctataaagaagttatggattgggaagagagatctaaaaatggggtcgtgaaagaccagccaagcgcccaaatgcagcagtag

SEQ ID NO: 238077 - DNA, 1149 bp, Artificial Sequence
  derived and/or modified sequence
atgtctgacagcaaatgtgacagccagttctacagcgtgcaggtggccgacagcaccttcaccgtgctgaagcgctaccagcagctgaagcccatcggcagcggggcccagggcatcgtgtgtgccgcctttgacacagtgctgggcatcaacgtggccgtgaagaagctgagccggcccttccagaaccagacccacgccaagagggcctaccgggagctggtgctgctgaagtgtgtgaaccacaagaacatcatcagcctgctgaatgtgttcaccccccagaagaccctggaggagttccaggatgtgtacctggtgatggagctgatggatgccaacctgtgccaggtgatccacatggagctggaccacgagaggatgagctacctgctgtaccagatgctgtgtggcatcaagcacctgcacagcgctggcatcatccaccgggacctgaagcccagcaacatcgtggtgaagagtgactgcaccctgaagatcctggactttggcctggccaggacagcctgcaccaacttcatgatgaccccctacgtggtgacccgctactaccgggcccctgaggtgatcctgggcatgggctacaaggaaaatgtggacatctggagcgtgggctgcatcatggccgagatggtgctgcacaaggtgctcttccctggccgggactacatcgaccagtggaacaaggtgattgagcagctgggcaccccatctgctgagttcatgaagaagctgcagcccaccgtgagaaattatgtggagaaccggcccaagtacccaggcatcaagtttgaggagctgttcccagactggatcttccccagcgagagcgagcgggacaagatcaagaccagccaggcccgggacctgctgagcaagatgctggtgattgatcctgacaagaggatctctgtggatgaggccctgcggcacccctacatcaccgtgtggtatgaccctgctgaggccgaggcccccccaccccagatctatgatgcccagctggaggagcgggagcacgccatcgaggagtggaaggagctgatctacaaggaggtgatggactgggaggagaggagcaagaatggagtggtgaaggaccagcccagcgcccagatgcagcagtag

SEQ ID NO: 238078 - DNA, 4369 bp, Artificial Sequence
  derived and/or modified sequence
ggcgcgagggtctgtcagaccgggcgccgcggcggcggcagcggcggagaagggagcgggaccggaagggtcgcagcgccccggcgcccctcacacccactgcggcggcggcggcggcggcggcggcggggcggagcggagcggggcgggccggcggcggagccggggccgcggagccaggagtgactagcacgcagcgccgccagtccgcccgcccgccctctccccgtggcgcggcggcggggaggcgagggatctgaaacttgcccacccttcgggatattgcaggacgctgcatcatgagcgacagtaaatgtgacagtcagttttatagtgtgcaagtggcagactcaaccttcactgtcctaaaacgttaccagcagctgaaaccaattggctctggggcccaagggattgtttgtgctgcatttgatacagttcttgggataaatgttgcagtcaagaaactaagccgtccttttcagaaccaaactcatgcaaagagagcttatcgtgaacttgtcctcttaaaatgtgtcaatcataaaaatataattagtttgttaaatgtgtttacaccacaaaaaactctagaagaatttcaagatgtgtatttggttatggaattaatggatgctaacttatgtcaggttattcacatggagctggatcatgaaagaatgtcctaccttctttaccagatgctttgtggtattaaacatctgcattcagctggtataattcatagagatttgaagcctagcaacattgttgtgaaatcagactgcaccctgaagatccttgactttggcctggcccggacagcgtgcactaacttcatgatgaccccttacgtggtgacacggtactaccgggcgcccgaagtcatcctgggtatgggctacaaagagaacgtggacatctggtctgtcgggtgcatcatggcagaaatggtcctccataaagtcctgttcccgggaagagactatattgatcagtggaataaagttattgagcagctgggaacaccatcagcagagttcatgaagaaacttcagccaactgtgaggaattatgtcgaaaacagaccaaagtatcctggaatcaaatttgaagaactctttccagattggatattcccatcagaatctgagcgagacaaaataaaaacaagtcaagccagagatctgttatcaaaaatgttagtgattgatcctgacaagcggatctctgtagacgaagctctgcgtcacccatacatcactgtttggtatgaccccgccgaagcagaagccccaccacctcaaatttatgatgcccagttggaagaaagagaacatgcaattgaagaatggaaagagctaatttacaaagaagtcatggattgggaagaaagaagcaagaatggtgttgtaaaagatcagccttcagcacagatgcagcagtaagtagcaacgccactccttctcagtcttcatcgatcaatgacatttcatccatgtccactgagcagacgctggcctcagacacagacagcagtcttgatgcctcgacgggaccccttgaaggctgtcgatgataggttagaaatagcaaacctgtcagcattgaaggaactctcacctccgtgggcctgaaatgcttgggagttgatggaaccaaatagaaaaactccatgttctgcatgtaagaaacacaatgccttgccctactcagacctgataggattgcctgcttagatgataaaatgaggcagaatatgtctgaagaaaaaaattgcaagccacacttctagagattttgttcaagatcatttcaggtgagcagttagagtaggtgaatttgtttcaaattgtactagtgacagtttctcatcatctgtaactgttgagatgtatgtgcatgtgaccacaaatgcttgcttggacttgcccatctagcactttggaaatcagtatttaaatgccaaataatcttccaggtagtgctgcttctgaagttatctcttaatcctcttaagtaatttggtgtctgtccagaaaaagtcgatttatgtgtattaattggccatcatgatgttatcatatcttattcccttttatgctatgatttattctatcttttgtatttcagaagacatataattaaatctatttaataaataaaaatatatagcttttcttagatttgtgatgtttggggctgagaattatcacggctaaaaccaagacacttatgtggacatcttgttttctttaaactgtcttgtctgggatgattgtacattcagctttactgcacgatacaattttaagttttgcttagtgctgcttgaaatcctagctaccttatctcttttcttcttggtcttctagacttcttatgaatttaaaatgctacctagaacttcaccttctttattaggtgcgtaacactccatcttaattaaatatgatggcagataggttcctgcatccatggcctaacgttggagtggaattttacaaaatgctcactagagatcactgcagtcatttcctaagtgcttcctttgccacagactggcctgggtcctttatttaccttccctcattcactttccctcggccaataccacgttcttgattttctttcttcactggaagaaagcagataaactcctctttggtctgttttcagaggccaggctgattcagatgcctgttgctattgttgctctccattgttgggaggcattccttttcacaagaatgttctgggaaactcttcagaggacgtgaaggaaataccctgaagagtcatgattaactattgactattttctgatttaaaactgctcacctgaaattgatacttttagactttacgatcagtaaattattcagaattcatgaagatgctgagtatgttaagtgtcactgcaggaacggagctgtggtgatcacgttttgcctgcctgtgcccatgtctcttcccttgagcttattctgttgctgattcatatcttgtgttcaattattttggaagcttttcagtcgacattctgtagagtgtgttctgaggaggaactgtgataagaaagtttattataaatattatgtaaaatatatggctctctctgcaccagttatatcttattggttggtcatatcactggaaactggaacctttgattagcaaaattaatattgaaataagaaatagttcttttatattgtgtcatttggacactttcaagtacaaaatggtaataataacttggattgaggcggaaacacctattttatggctatctatctaaacatcttaaaatggccttctctgtaatacactttcttttaaaagacttcactaaatctatctttaaaaggaaaaacaaaagggagaggttgaaaatgcgcgagctgccctgcactgtgtgatgctccctccccgggagacgtggacgggggacgaggcacccgcagacgcccttctgctcactcgctcctctgtgcattcagcgagccacttgccacagatggagcccgtgacggtgtggagggtttcctggaaaggccatcttccaccaggtagaggcgagcgtgcctaggacaggccacagggctccacagaaatacctcaccccagcttcagggttctctctcctgagcctagatttgccagggtcttggtgccacgcaaatggtttcaaactgatctctatggataaatgctgatgttggttaaagaactgaaaaatgtgctcaactgtttcatcttttctattttatttttgtaatttatattgtacacaacccaggaagtaactattttggacatgtatttttataaaccaggtaatttactattatcctggaatttagactaggtttgtttcatttgttgacttagtttccagccaagaaggaaacgactgtctcccccatgtccaggtctcagtttcaagggcagagtccagagagcagacagagttctgtgagagcaggagagcagtctggaaaccctggctgtgcataccgtgtcagccgtgggcctggagatgggagcaggtgagacgcagagccccagtactgagaggaggaagccctcttacagggccccttgcccaccccaagtccgtgtctgaaacacggagcgggtgctgcttcaacccgcatttaatgctgtgtaagtagcgataaccacgtacgagtctgtctggttgatttctaatgtgactcctctggtatttcctcctggtaataaatacaagtgtgacctttcagattgcatatctcaaaagtaacattgctaatgttttataataaaatatattatgtgtgttttggttggtgaaaataatacagactacattttaaaagataaa

SEQ ID NO: 238079 - DNA, 1149 bp, Artificial Sequence
  derived and/or modified sequence
atgagcgacagcaagtgcgacagccagttctacagcgtgcaggtggccgactcaacctttaccgtgctaaagcgttaccagcagctcaagccgatcggatccggggctcagggtatagtttgtgccgcattcgacacagtgctaggtattaacgtcgccgtgaagaaactctcacgcccattccagaatcagacacatgcaaaacgtgcatatcgtgagctggtactcctgaagtgcgtcaatcataagaatatcatcagcctgcttaatgtgttcactccccagaagaccctagaagagtttcaggacgtataccttgtgatggagctgatggatgccaacctgtgtcaagtcatacatatggaattggatcacgaacgcatgtcctacctactgtaccaaatgttatgcggcattaaacatctgcatagtgcaggaatcattcaccgggatctgaaaccttccaatattgtggttaaatccgactgcacccttaagattttggattttggactggcacggactgcgtgtacgaacttcatgatgactccctacgtggtcacgcgatactatagagctcctgaggtgatactgggaatgggttacaaggaaaacgtcgatatctggtcggtgggctgcattatggccgaaatggtgctacacaaagttttgtttcctggccgggattacattgatcagtggaacaaggtaatcgaacagctgggaactccgagcgccgagtttatgaagaaattacagcctactgttagaaactatgtggagaaccggccaaaatatccaggcatcaagttcgaggaactcttcccagattggattttcccatcagaatccgaaagagataaaattaaaacttctcaggcacgggacctgcttagcaaaatgctcgttatcgaccctgataagaggatttccgtggatgaagccctgcggcatccctatatcacagtgtggtatgatcctgccgaagctgaagcccctccgccgcagatctacgacgcccagcttgaggaaagagaacatgcgattgaggaatggaaggagctgatctacaaggaggtcatggactgggaagagagaagcaagaacggcgtcgttaaggaccagccatctgcgcagatgcaacagtag

SEQ ID NO: 238080 - DNA, 1149 bp, Artificial Sequence
  derived and/or modified sequence
atgtcagactccaaatgcgattctcagttttattctgtccaggtggccgactccacttttaccgtattaaagcggtaccagcaattaaagcctattggttctggggctcaggggattgtctgtgctgccttcgacactgtacttgggataaatgtggctgttaagaaactgtctcggccattccagaaccaaacccatgctaagcgggcataccgggaactcgtcctgctgaagtgtgtcaatcataaaaatattataagcctactgaatgtgttcactccacagaaaacccttgaagaattccaggacgtctatctggtcatggaactgatggacgcaaacctttgccaagtcattcacatggagcttgaccacgaacggatgtcctatctgctttatcagatgctatgtggcataaaacacttacactcagccggaattatacacagggacctaaaaccctccaacattgtcgtcaaatcggactgcaccctgaaaattctcgactttgggctcgccagaactgcatgtactaacttcatgatgacaccttacgtcgtaacccgctactaccgggctcctgaggtcatactcggaatgggctacaaagagaatgtcgatatatggtctgtgggatgtattatggctgaaatggtgctgcacaaagttctgttccctgggagggactatatagatcaatggaataaagtgatagagcaacttgggacaccaagcgcggaatttatgaagaagcttcaacccaccgtacggaattacgtagagaacagacccaaatatccgggtattaagtttgaggagttattccctgattggatcttcccatcagagagcgagcgagacaagattaagacttcccaggctagggacttgctgagcaaaatgttggttatcgacccggataaacggatctccgttgatgaagctctgaggcacccatacattaccgtgtggtacgatcccgcagaagctgaggccccaccgccacaaatctacgacgcccagctggaggagcgggaacatgctatcgaggaatggaaagaactgatttacaaggaggtgatggactgggaagaaaggtccaagaatggtgtcgtcaaggatcagcctagtgctcaaatgcagcagtag

SEQ ID NO: 238081 - DNA, 1149 bp, Artificial Sequence
  derived and/or modified sequence
atgagcgacagcaagtgcgacagccagttctacagcgtgcaggtggccgacagcaccttcaccgtgctgaagagataccagcagctgaagcccatcggcagcggcgcccagggcatcgtgtgcgccgccttcgacaccgtgctgggcatcaacgtggccgtgaagaagctgagcagacccttccagaaccagacccacgccaagagagcctacagagagctggtgctgctgaagtgcgtgaaccacaagaacatcatcagcctgctgaacgtgttcaccccccagaagaccctggaggagttccaggacgtgtacctggtgatggagctgatggacgccaacctgtgccaggtgatccacatggagctggaccacgagagaatgagctacctgctgtaccagatgctgtgcggcatcaagcacctgcacagcgccggcatcatccacagagacctgaagcccagcaacatcgtggtgaagagcgactgcaccctgaagatcctggacttcggcctggccagaaccgcctgcaccaacttcatgatgaccccctacgtggtgaccagatactacagagcccccgaggtgatcctgggcatgggctacaaggagaacgtggacatctggagcgtgggctgcatcatggccgagatggtgctgcacaaggtgctgttccccggcagagactacatcgaccagtggaacaaggtgatcgagcagctgggcacccccagcgccgagttcatgaagaagctgcagcccaccgtgagaaactacgtggagaacagacccaagtaccccggcatcaagttcgaggagctgttccccgactggatcttccccagcgagagcgagagagacaagatcaagaccagccaggccagagacctgctgagcaagatgctggtgatcgaccccgacaagagaatcagcgtggacgaggccctgagacacccctacatcaccgtgtggtacgaccccgccgaggccgaggccccccccccccagatctacgacgcccagctggaggagagagagcacgccatcgaggagtggaaggagctgatctacaaggaggtgatggactgggaggagagaagcaagaacggcgtggtgaaggaccagcccagcgcccagatgcagcagtag

SEQ ID NO: 238082 - protein, 424 aa, Artificial Sequence
  derived and/or modified sequence
MSDSKCDSQFYSVQVADSTFTVLKRYQQLKPIGSGAQGIVCAAFDTVLGINVAVKKLSRPFQNQTHAKRAYRELVLLKCVNHKNIISLLNVFTPQKTLEEFQDVYLVMELMDANLCQVIHMELDHERMSYLLYQMLCGIKHLHSAGIIHRDLKPSNIVVKSDCTLKILDFGLARTACTNFMMTPYVVTRYYRAPEVILGMGYKENVDIWSVGCIMAEMVLHKVLFPGRDYIDQWNKVIEQLGTPSAEFMKKLQPTVRNYVENRPKYPGIKFEELFPDWIFPSESERDKIKTSQARDLLSKMLVIDPDKRISVDEALRHPYITVWYDPAEAEAPPPQIYDAQLEEREHAIEEWKELIYKEVMDWEERSKNGVVKDQPSDAAVSSNATPSQSSSINDISSMSTEQTLASDTDSSLDASTGPLEGCR

SEQ ID NO: 238083 - protein, 104 aa, Artificial Sequence
  derived and/or modified sequence
MSDSKCDSQFYSVQVADSTFTVLKRYQQLKPIGSGAQGIVCAAFDTVLGINVAVKKLSRPFQNQTHAKRAYRELVLLKCVNHKNIISLLNVFTPQKTLEEFQDV

SEQ ID NO: 238084 - DNA, 1275 bp, Artificial Sequence
  derived and/or modified sequence
atgtccgattcaaagtgcgacagccagttttattccgtccaagtggccgatagcacatttaccgtcctgaaacgttaccagcagttgaaacccattggttctggcgcccagggcattgtgtgcgccgcctttgacaccgtcctggggatcaacgtcgccgtgaaaaaactgtcaaggcctttccaaaaccaaacgcatgccaagagggcgtaccgggagctcgtccttcttaaatgcgtgaaccataaaaacatcatttctctgttaaacgtgtttacaccgcagaaaacactagaagaattccaagatgtgtatctggtcatggaattgatggacgcaaacctctgccaggtgattcatatggaactcgaccatgaaagaatgtcgtacctactatatcaaatgctgtgcggcataaaacacttgcactcggccggaatcattcaccgcgacctgaagccttccaacatcgtggtaaaatctgactgcaccttaaagatactcgacttcggactggcacgcacggcctgtaccaacttcatgatgaccccgtatgtcgtgacacggtattaccgtgctcctgaagtgattctcgggatgggatataaagaaaatgtagacatctggagtgttgggtgtattatggcagagatggtcctgcacaaggtgttgtttccgggcagagactacatcgaccagtggaataaagtaatcgagcagttgggaaccccatcggcagagttcatgaaaaaacttcagccaactgtgaggaactatgtggagaacagaccaaaatatccaggtattaaattcgaggagttgttccccgattggatctttccctccgaaagcgagagagataagattaaaacttcacaagccagggacctcctgtcgaagatgctcgtaatcgaccctgacaagcgtatttcagtcgatgaggctttaagacatccgtacattacggtttggtacgatcctgcagaagccgaggctccaccaccacagatatatgacgcgcagcttgaggaacgcgaacatgcaatcgaggaatggaaggaactaatctataaggaagtgatggactgggaagagagatcaaagaacggagttgtgaaggaccagcctagtgatgccgctgtttcgtccaacgctactccctctcaatctagttcaatcaacgacatttccagcatgtctactgagcagactttggcgtcagataccgactcttccctggatgcttctacaggtccgttggagggttgccggtag

SEQ ID NO: 238085 - DNA, 1275 bp, Artificial Sequence
  derived and/or modified sequence
atgtctgacagcaaatgtgacagccagttctacagcgtgcaggtggccgacagcaccttcaccgtgctgaagcgctaccagcagctgaagcccatcggcagcggggcccagggcatcgtgtgtgccgcctttgacacagtgctgggcatcaacgtggccgtgaagaagctgagccggcccttccagaaccagacccacgccaagagggcctaccgggagctggtgctgctgaagtgtgtgaaccacaagaacatcatcagcctgctgaatgtgttcaccccccagaagaccctggaggagttccaggatgtgtacctggtgatggagctgatggatgccaacctgtgccaggtgatccacatggagctggaccacgagaggatgagctacctgctgtaccagatgctgtgtggcatcaagcacctgcacagcgctggcatcatccaccgggacctgaagcccagcaacatcgtggtgaagagtgactgcaccctgaagatcctggactttggcctggccaggacagcctgcaccaacttcatgatgaccccctacgtggtgacccgctactaccgggcccctgaggtgatcctgggcatgggctacaaggaaaatgtggacatctggagcgtgggctgcatcatggccgagatggtgctgcacaaggtgctcttccctggccgggactacatcgaccagtggaacaaggtgattgagcagctgggcaccccatctgctgagttcatgaagaagctgcagcccaccgtgagaaattatgtggagaaccggcccaagtacccaggcatcaagtttgaggagctgttcccagactggatcttccccagcgagagcgagcgggacaagatcaagaccagccaggcccgggacctgctgagcaagatgctggtgattgatcctgacaagaggatctctgtggatgaggccctgcggcacccctacatcaccgtgtggtatgaccctgctgaggccgaggcccccccaccccagatctatgatgcccagctggaggagcgggagcacgccatcgaggagtggaaggagctgatctacaaggaggtgatggactgggaggagaggagcaagaatggagtggtgaaggaccagcccagtgatgctgctgtgagcagcaatgccacccccagccagagcagcagcatcaatgacatcagctccatgagcacagagcagaccctggccagtgacacagacagcagcctggatgccagcacaggccccctggagggctgcaggtag

SEQ ID NO: 238086 - DNA, 4336 bp, Artificial Sequence
  derived and/or modified sequence
gcggcggcggcagcggcggagaagggagcgggaccggaagggtcgcagcgccccggcgcccctcacacccactgcggcggcggcggcggcggcggcggcggggcggagcggagcggggcgggccggcggcggagccggggccgcggagccaggagtgactagcacgcagcgccgccagtccgcccgcccgccctctccccgtggcgcggcggcggggaggcgagggatctgaaacttgcccacccttcgggatattgcaggacgctgcatcatgagcgacagtaaatgtgacagtcagttttatagtgtgcaagtggcagactcaaccttcactgtcctaaaacgttaccagcagctgaaaccaattggctctggggcccaagggattgtttgtgctgcatttgatacagttcttgggataaatgttgcagtcaagaaactaagccgtccttttcagaaccaaactcatgcaaagagagcttatcgtgaacttgtcctcttaaaatgtgtcaatcataaaaatataattagtttgttaaatgtgtttacaccacaaaaaactctagaagaatttcaagatgtgtatttggttatggaattaatggatgctaacttatgtcaggttattcacatggagctggatcatgaaagaatgtcctaccttctttaccagatgctttgtggtattaaacatctgcattcagctggtataattcatagagatttgaagcctagcaacattgttgtgaaatcagactgcaccctgaagatccttgactttggcctggcccggacagcgtgcactaacttcatgatgaccccttacgtggtgacacggtactaccgggcgcccgaagtcatcctgggtatgggctacaaagagaacgtggacatctggtctgtcgggtgcatcatggcagaaatggtcctccataaagtcctgttcccgggaagagactatattgatcagtggaataaagttattgagcagctgggaacaccatcagcagagttcatgaagaaacttcagccaactgtgaggaattatgtcgaaaacagaccaaagtatcctggaatcaaatttgaagaactctttccagattggatattcccatcagaatctgagcgagacaaaataaaaacaagtcaagccagagatctgttatcaaaaatgttagtgattgatcctgacaagcggatctctgtagacgaagctctgcgtcacccatacatcactgtttggtatgaccccgccgaagcagaagccccaccacctcaaatttatgatgcccagttggaagaaagagaacatgcaattgaagaatggaaagagctaatttacaaagaagtcatggattgggaagaaagaagcaagaatggtgttgtaaaagatcagccttcagatgcagcagtaagtagcaacgccactccttctcagtcttcatcgatcaatgacatttcatccatgtccactgagcagacgctggcctcagacacagacagcagtcttgatgcctcgacgggaccccttgaaggctgtcgatgataggttagaaatagcaaacctgtcagcattgaaggaactctcacctccgtgggcctgaaatgcttgggagttgatggaaccaaatagaaaaactccatgttctgcatgtaagaaacacaatgccttgccctactcagacctgataggattgcctgcttagatgataaaatgaggcagaatatgtctgaagaaaaaaattgcaagccacacttctagagattttgttcaagatcatttcaggtgagcagttagagtaggtgaatttgtttcaaattgtactagtgacagtttctcatcatctgtaactgttgagatgtatgtgcatgtgaccacaaatgcttgcttggacttgcccatctagcactttggaaatcagtatttaaatgccaaataatcttccaggtagtgctgcttctgaagttatctcttaatcctcttaagtaatttggtgtctgtccagaaaaagtcgatttatgtgtattaattggccatcatgatgttatcatatcttattcccttttatgctatgatttattctatcttttgtatttcagaagacatataattaaatctatttaataaataaaaatatatagcttttcttagatttgtgatgtttggggctgagaattatcacggctaaaaccaagacacttatgtggacatcttgttttctttaaactgtcttgtctgggatgattgtacattcagctttactgcacgatacaattttaagttttgcttagtgctgcttgaaatcctagctaccttatctcttttcttcttggtcttctagacttcttatgaatttaaaatgctacctagaacttcaccttctttattaggtgcgtaacactccatcttaattaaatatgatggcagataggttcctgcatccatggcctaacgttggagtggaattttacaaaatgctcactagagatcactgcagtcatttcctaagtgcttcctttgccacagactggcctgggtcctttatttaccttccctcattcactttccctcggccaataccacgttcttgattttctttcttcactggaagaaagcagataaactcctctttggtctgttttcagaggccaggctgattcagatgcctgttgctattgttgctctccattgttgggaggcattccttttcacaagaatgttctgggaaactcttcagaggacgtgaaggaaataccctgaagagtcatgattaactattgactattttctgatttaaaactgctcacctgaaattgatacttttagactttacgatcagtaaattattcagaattcatgaagatgctgagtatgttaagtgtcactgcaggaacggagctgtggtgatcacgttttgcctgcctgtgcccatgtctcttcccttgagcttattctgttgctgattcatatcttgtgttcaattattttggaagcttttcagtcgacattctgtagagtgtgttctgaggaggaactgtgataagaaagtttattataaatattatgtaaaatatatggctctctctgcaccagttatatcttattggttggtcatatcactggaaactggaacctttgattagcaaaattaatattgaaataagaaatagttcttttatattgtgtcatttggacactttcaagtacaaaatggtaataataacttggattgaggcggaaacacctattttatggctatctatctaaacatcttaaaatggccttctctgtaatacactttcttttaaaagacttcactaaatctatctttaaaaggaaaaacaaaagggagaggttgaaaatgcgcgagctgccctgcactgtgtgatgctccctccccgggagacgtggacgggggacgaggcacccgcagacgcccttctgctcactcgctcctctgtgcattcagcgagccacttgccacagatggagcccgtgacggtgtggagggtttcctggaaaggccatcttccaccaggtagaggcgagcgtgcctaggacaggccacagggctccacagaaatacctcaccccagcttcagggttctctctcctgagcctagatttgccagggtcttggtgccacgcaaatggtttcaaactgatctctatggataaatgctgatgttggttaaagaactgaaaaatgtgctcaactgtttcatcttttctattttatttttgtaatttatattgtacacaacccaggaagtaactattttggacatgtatttttataaaccaggtaatttactattatcctggaatttagactaggtttgtttcatttgttgacttagtttccagccaagaaggaaacgactgtctcccccatgtccaggtctcagtttcaagggcagagtccagagagcagacagagttctgtgagagcaggagagcagtctggaaaccctggctgtgcataccgtgtcagccgtgggcctggagatgggagcaggtgagacgcagagccccagtactgagaggaggaagccctcttacagggccccttgcccaccccaagtccgtgtctgaaacacggagcgggtgctgcttcaacccgcatttaatgctgtgtaagtagcgataaccacgtacgagtctgtctggttgatttctaatgtgactcctctggtatttcctcctggtaataaatacaagtgtgacctttcagattgcatatctcaaaagtaacattgctaatgttttataataaaatatattatgtgtgttttggttggtgaaaataatacagactacattttaaaagataaa

SEQ ID NO: 238087 - DNA, 1275 bp, Artificial Sequence
  derived and/or modified sequence
atgagcgacagcaagtgcgacagccagttctacagcgtgcaggtggcagatagcaccttcacggtccttaaacggtatcagcagctgaagccaattgggtctggcgcacagggaatcgtatgtgctgcttttgatacagtgttggggatcaatgttgcagtgaaaaagctatcaagacccttccagaaccagacccacgctaaacgagcatacagagagttggtgctgctgaagtgtgtgaatcacaaaaatattatctcacttttgaacgtgtttaccccacaaaagacactcgaggagttccaagacgtctacctcgtcatggaactaatggacgcaaacctgtgccaggtgatccatatggagctggaccacgaaagaatgagctatctgctctaccagatgctttgtggaattaagcatctgcacagtgcaggcattatacatcgcgatctcaagccatcgaatattgtggtgaagagtgactgcacactgaagattcttgattttggacttgctcggaccgcctgtacaaacttcatgatgacgccttacgttgtgacccgttattatagagctcccgaggttattttaggaatgggctacaaggagaacgtggatatctggtcagtggggtgcattatggccgaaatggtcctgcataaggtgctgttccctggtcgggactacatcgatcagtggaacaaagttatcgagcagctgggaactccctcagccgagtttatgaaaaagctgcagcctactgttcgaaattatgtggaaaataggccgaagtatccaggcattaaatttgaagaactatttccagattggatatttccgtccgagtcggaacgcgataagattaagacatcccaggctagagatcttctgagcaagatgctagtgatagatcctgataaaaggatcagcgtggatgaagccttacgccatccctacattaccgtgtggtatgacccagctgaagccgaagccccccccccccagatttacgatgcacaactggaagagagagaacatgcaattgaggaatggaaggagctcatttataaagaggtgatggattgggaagagagatctaagaatggtgtggtgaaggatcaaccatccgatgctgcagtctccagtaacgccaccccatctcagtcaagcagtattaacgatatttcttccatgtccactgagcaaacgcttgcatccgacactgacagctctttggacgccagcacgggccctctcgagggatgtcgatag

SEQ ID NO: 238088 - DNA, 1275 bp, Artificial Sequence
  derived and/or modified sequence
atgagcgacagcaagtgcgactcccagttctattcggtccaagtagccgacagtacctttaccgtgctgaagagataccagcaattgaaacctatcggatcaggagcccaaggaatcgtgtgtgcggcattcgacacagtcctcggaattaacgtggccgttaagaagttaagtcgaccatttcaaaaccaaacacacgctaaacgtgcttaccgggaattggtgctgcttaaatgtgttaaccataaaaacattatatctctgctgaacgtcttcacacctcaaaaaaccctggaagagttccaggatgtgtatttggtgatggagctgatggacgcaaacctgtgtcaggtgatccacatggagcttgatcacgagcggatgtcttacctgctgtatcagatgctatgcggcataaagcatcttcattcagccggaatcatccaccgtgacctgaaacccagcaatatcgtggtgaaaagcgactgcacgttgaagatattagatttcggcctggccagaactgcctgtaccaactttatgatgaccccatacgtagttacccgatattatcgcgctcctgaagttattttaggcatgggttacaaagagaatgtggacatatggagcgttggctgcataatggccgagatggtcctacacaaagtgctgttccctggaagggactatatcgatcaatggaacaaggtgattgaacagctgggcacaccaagtgcagaattcatgaaaaaactccaacctaccgtcagaaactacgtggagaataggcccaagtatcctggaatcaagtttgaggaattattccccgactggatttttccttccgagtcagagcgagataagatcaagacctcccaggcaagagacttgctgtctaagatgctcgtgatcgacccagataagagaatctctgtagacgaggctctgaggcacccgtacattacggtgtggtacgaccccgctgaggcagaggcaccgcctcctcagatctacgacgcccagttagaggaaagagagcatgctattgaagagtggaaagagcttatatataaagaggtcatggattgggaagagcgctctaaaaacggtgttgtgaaggatcagccatctgatgcagctgtaagctctaacgccactccgtcccagtcatcaagcatcaatgacatcagttcgatgtccacagagcagacactcgccagtgacacagatagttccctcgatgcttccactgggccactcgaaggttgccggtag

SEQ ID NO: 238089 - DNA, 1275 bp, Artificial Sequence
  derived and/or modified sequence
atgagcgacagcaagtgcgacagccagttctacagcgtgcaggtggccgacagcaccttcaccgtgctgaagagataccagcagctgaagcccatcggcagcggcgcccagggcatcgtgtgcgccgccttcgacaccgtgctgggcatcaacgtggccgtgaagaagctgagcagacccttccagaaccagacccacgccaagagagcctacagagagctggtgctgctgaagtgcgtgaaccacaagaacatcatcagcctgctgaacgtgttcaccccccagaagaccctggaggagttccaggacgtgtacctggtgatggagctgatggacgccaacctgtgccaggtgatccacatggagctggaccacgagagaatgagctacctgctgtaccagatgctgtgcggcatcaagcacctgcacagcgccggcatcatccacagagacctgaagcccagcaacatcgtggtgaagagcgactgcaccctgaagatcctggacttcggcctggccagaaccgcctgcaccaacttcatgatgaccccctacgtggtgaccagatactacagagcccccgaggtgatcctgggcatgggctacaaggagaacgtggacatctggagcgtgggctgcatcatggccgagatggtgctgcacaaggtgctgttccccggcagagactacatcgaccagtggaacaaggtgatcgagcagctgggcacccccagcgccgagttcatgaagaagctgcagcccaccgtgagaaactacgtggagaacagacccaagtaccccggcatcaagttcgaggagctgttccccgactggatcttccccagcgagagcgagagagacaagatcaagaccagccaggccagagacctgctgagcaagatgctggtgatcgaccccgacaagagaatcagcgtggacgaggccctgagacacccctacatcaccgtgtggtacgaccccgccgaggccgaggccccccccccccagatctacgacgcccagctggaggagagagagcacgccatcgaggagtggaaggagctgatctacaaggaggtgatggactgggaggagagaagcaagaacggcgtggtgaaggaccagcccagcgacgccgccgtgagcagcaacgccacccccagccagagcagcagcatcaacgacatcagcagcatgagcaccgagcagaccctggccagcgacaccgacagcagcctggacgccagcaccggccccctggagggctgcagatag

SEQ ID NO: 238090 - protein, 474 aa, Artificial Sequence
  derived and/or modified sequence
MAARAGFQSVAPSGGAGASGGAGAAAALGPGGTPGPPVRMGPAPGQGLYRSPMPGAAYPRPGMLPGSRMTPQGPSMGPPGYGGNPSVRPGLAQSGMDQSRKRPAPQQIQQVQQQAVQNRNHNAKKKKMADKILPQRIRELVPESQAYMDLLAFERKLDQTIMRKRLDIQEALKRPIKQKRKLRIFISNTFNPAKSDAEDGEGTVASWELRVEGRLLEDSALSKYDATKQKRKFSSFFKSLVIELDKDLYGPDNHLVEWHRTATTQETDGFQVKRPGDVNVRCTVLLMLDYQPPQFKLDPRLARLLGIHTQTRPVIIQALWQYIKTHKLQDPHEREFVICDKYLQQIFESQRMKFSEIPQRLHALLMPPEPIIINHVISVDPNDQKKTACYDIDVEVDDTLKTQMNSFLLSTASQQEIATLDNKTMTDVVGNPEEERRAEFYFQPWAQEAVCRYFYSKVQQRRQELEQALGIRNT

SEQ ID NO: 238091 - DNA, 1425 bp, Artificial Sequence
  derived and/or modified sequence
atggccgccagagccggcttccagagcgtggcccccagcggcggcgccggcgccagcggcggcgccggcgccgccgccgccctgggccccggcggcacccccggcccccccgtgagaatgggccccgcccccggccagggcctgtacagaagccccatgcccggcgccgcctaccccagacccggcatgctgcccggcagcagaatgaccccccagggccccagcatgggcccccccggctacggcggcaaccccagcgtgagacccggcctggcccagagcggcatggaccagagcagaaagagacccgccccccagcagatccagcaggtgcagcagcaggccgtgcagaacagaaaccacaacgccaagaagaagaagatggccgacaagatcctgccccagagaatcagagagctggtgcccgagagccaggcctacatggacctgctggccttcgagagaaagctggaccagaccatcatgagaaagagactggacatccaggaggccctgaagagacccatcaagcagaagagaaagctgagaatcttcatcagcaacaccttcaaccccgccaagagcgacgccgaggacggcgagggcaccgtggccagctgggagctgagagtggagggcagactgctggaggacagcgccctgagcaagtacgacgccaccaagcagaagagaaagttcagcagcttcttcaagagcctggtgatcgagctggacaaggacctgtacggccccgacaaccacctggtggagtggcacagaaccgccaccacccaggagaccgacggcttccaggtgaagagacccggcgacgtgaacgtgagatgcaccgtgctgctgatgctggactaccagcccccccagttcaagctggaccccagactggccagactgctgggcatccacacccagaccagacccgtgatcatccaggccctgtggcagtacatcaagacccacaagctgcaggacccccacgagagagagttcgtgatctgcgacaagtacctgcagcagatcttcgagagccagagaatgaagttcagcgagatcccccagagactgcacgccctgctgatgccccccgagcccatcatcatcaaccacgtgatcagcgtggaccccaacgaccagaagaagaccgcctgctacgacatcgacgtggaggtggacgacaccctgaagacccagatgaacagcttcctgctgagcaccgccagccagcaggagatcgccaccctggacaacaagaccatgaccgacgtggtgggcaaccccgaggaggagagaagagccgagttctacttccagccctgggcccaggaggccgtgtgcagatacttctacagcaaggtgcagcagagaagacaggagctggagcaggccctgggcatcagaaacacctag

SEQ ID NO: 238092 - DNA, 1425 bp, Artificial Sequence
  derived and/or modified sequence
atggcagccagagccggctttcagtcggtcgcacccagtggcggcgctggtgcgagcgggggtgccggcgcagctgcagcccttggaccaggtggaacaccagggccccctgttaggatggggcctgcacccggccagggcctgtacaggtccccaatgccaggtgccgcttatcctcgtcccggcatgctgcctggcagccgcatgacgccccaaggcccatctatgggcccccccggatatggtggaaaccccagtgtgaggcccggcctggctcagagcggcatggatcaatctaggaagcgcccagctccccagcagattcaacaagttcagcagcaggctgtgcagaaccgcaatcacaacgccaagaaaaagaagatggccgacaaaatcctacctcagcgcatacgcgagctggtgccggagtcacaggcctatatggacctgctggcttttgagagaaagttagaccaaactatcatgaggaagcggctcgatattcaagaggcattgaagagacctatcaaacaaaagagaaagctgcgaattttcatctcaaatactttcaatcccgccaagtctgatgctgaggacggggagggcactgtggccagctgggagctgcgcgtggagggccggctgcttgaagatagtgccctgtctaagtatgatgcaacaaaacagaaacgcaaattctcttcattcttcaaatcactggtgatagagctggataaggatctgtacgggcccgataatcacctggtcgagtggcaccgcaccgcaacgacccaggaaaccgacggattccaggtgaagcgccctggggatgtcaatgttcggtgcaccgtcctgctgatgctggattatcagccaccccagttcaaacttgacccgcgcttagctagactgcttggcattcacacccagacccgtcccgtcattatacaggctctgtggcaatacattaagacacacaagctacaagacccccacgagagggaattcgtgatttgcgataagtacctacagcagatattcgagagccaaagaatgaagttcagtgaaatccctcaacgtctgcacgccctgttgatgccccctgaacctatcataatcaaccacgttattagtgtagacccgaatgatcagaagaaaacagcctgctacgatattgacgtagaggtggacgataccctcaaaacccaaatgaacagctttctgcttagtacagctagtcagcaggagatagctaccctggataataagacaatgacagacgtcgtcggaaatccggaggaggagcgccgagcggaattttacttccagccctgggcccaggaggccgtatgccgttacttctactcgaaagtgcaacagagacgtcaggagctagaacaggcactcggaatcagaaacacgtag

SEQ ID NO: 238093 - DNA, 1425 bp, Artificial Sequence
  derived and/or modified sequence
atggccgcccgggccggcttccagagcgtggcccccagcggcggggccggggccagcggcggggccggggctgctgctgccctgggccctgggggcaccccaggcccccctgtgaggatgggccctgcccctggccagggcctgtaccgcagccccatgcctggggccgcctaccccaggcctggcatgctgcccggcagcaggatgaccccccagggccccagcatgggccccccaggctatggaggcaaccccagcgtgcggcccggcctggcccagagcggcatggaccagagcaggaagaggcctgccccccagcagatccagcaggtgcagcagcaggccgtgcagaacagaaaccacaatgccaagaagaagaagatggctgacaagatcctgccccagaggatccgggagctggtgcctgagagccaggcctacatggacctgctggcctttgagaggaagctggaccagaccatcatgaggaagaggctggacatccaggaggccctgaagaggcccatcaagcagaagaggaagctgcgcatcttcatcagcaacaccttcaacccagccaagagtgatgctgaagatggagagggcaccgtggcctcctgggagctgcgggtggagggccgcctgctggaggacagcgccctgagcaaatatgatgccaccaagcagaagaggaagttcagcagcttcttcaagagcctggtgattgagctggacaaggacctgtatggccctgacaaccacctggtggagtggcacaggacagccaccacccaggagacagatggcttccaggtgaagaggcctggagatgtgaatgtgcgctgcaccgtgctgctgatgctggactaccagcccccccagttcaagctggacccccggctggcccggctgctgggcatccacacccagaccaggcctgtgatcatccaggccctgtggcagtacatcaagacccacaagctgcaggacccccatgagcgggagtttgtgatctgtgacaagtacctgcagcagatctttgagagccagaggatgaagttcagcgagatcccccagaggctgcacgccctgctgatgcctcctgagcccatcatcatcaaccacgtgatctctgtggaccccaatgaccagaagaagacagcctgctatgacattgatgtggaggtggatgacaccctgaagacccagatgaacagcttcctgctgagcacagccagccagcaggagatcgccaccctggacaacaagaccatgacagatgtggtgggcaaccctgaggaggagcggcgggcagagttctacttccagccctgggcccaggaggccgtgtgccgctacttctacagcaaggtgcagcagaggcggcaggagctggagcaggccctgggcatccggaacacctag

SEQ ID NO: 238094 - DNA, 1425 bp, Artificial Sequence
  derived and/or modified sequence
atggccgcccgggccggcttccagagcgtggcccccagcggcggcgcgggcgcaagtggcggggctggagccgctgccgccctcggcccagggggaacacccggcccccctgtacggatggggcctgctcctggacaagggctgtaccggagtcctatgccaggcgccgcttatccgcgacctggtatgttgcctggaagtcgtatgacgccgcaaggcccctccatgggcccccctgggtatggaggcaatcccagcgtacggccgggactggctcagagtggcatggaccagtctcgcaagaggcctgcaccgcaacagatccaacaggtacaacaacaggctgtccagaatcgcaatcataacgcaaagaaaaagaagatggctgacaagatcctcccacagcggattcgtgaactcgtgcccgaatctcaggcctatatggacctgttggcgtttgaaagaaagctcgatcaaacaatcatgcgcaaacggctagacattcaggaagccctgaagaggcctatcaagcagaagcgtaaattaagaatatttataagcaatacctttaatcccgcgaagtcagacgccgaggacggggagggcaccgtcgcctcatgggaactgcgggtcgaggggcgtttactggaggatagtgctttatctaagtacgatgcgacaaaacaaaagcgcaaattttccagctttttcaagtcactcgtcattgaattggacaaggatctatacggaccggacaaccatctggttgaatggcataggaccgcaacaacccaggagacagatggattccaggtgaagagacctggagacgtgaatgtcaggtgcactgtactcctgatgcttgattaccagcccccacagtttaagcttgatcctagattagccaggttgctgggaatacacacccagacccggcctgtcataatccaagctctttggcagtatattaaaacccacaagctgcaagacccccacgagcgcgagtttgtgatctgtgataaatacctgcagcagatttttgaaagccaacggatgaagttctccgagattcctcagcgtctccatgctctgctgatgcctccagagccgatcatcataaatcacgttatttcagtggatcccaacgaccagaagaaaactgcttgctacgacattgatgtagaggttgacgatacgttgaagacccagatgaattccttcctactgtcaacagcctctcagcaggagattgctactttggataacaagaccatgacagacgtcgtggggaaccctgaagaggagagaagagctgagttctattttcagccttgggcgcaggaggctgtctgtagatatttttattcaaaggtgcagcagcgtcgccaggagctcgagcaagctctcggaatccggaatacctag

SEQ ID NO: 238095 - DNA, 1425 bp, Artificial Sequence
  derived and/or modified sequence
atggctgccagggcgggatttcagagtgtggctcccagcggcggagctggcgctagcggcggtgctggggctgctgctgctctcgggcctggcggaacacccggacccccagtgaggatggggccagcacccggtcagggcctttaccggtcccccatgcccggagctgcctaccctcggccaggcatgctgccaggaagtcgcatgactcctcaaggtccttccatgggccctccaggctacggcggtaatccctctgtcagacccggtcttgcccagtctggtatggaccagagccgcaaaaggcctgcccctcagcaaatccagcaggtccagcagcaggccgtgcagaacaggaatcacaatgcaaagaaaaaaaaaatggccgataaaatcctgcctcaacgtataagggagctggtgccagagagtcaggcgtacatggatctgttggcctttgaaaggaaacttgatcagaccattatgcggaaaaggctcgatatccaggaggctcttaagaggcccatcaagcagaagagaaagctcaggatattcatctctaatactttcaatcctgcaaaaagcgatgccgaagacggtgaaggcaccgtggccagttgggaactgagagtcgaagggcgactgctggaggacagcgccttgtctaagtacgacgcaaccaagcagaaacggaagttttcgtccttctttaaaagcttggtgatcgagctcgataaggacctatacgggccagacaatcacttggttgaatggcataggacagctacaacacaagagactgatggttttcaagttaagaggcccggagacgtgaatgtgagatgtactgtcctgcttatgctggattaccaaccaccccaatttaagttggacccgaggctggccagactgctgggcatccatactcagacacggccagtcatcatccaggctctgtggcagtatataaagacacacaagctacaggatccacatgagcgggaattcgttatatgtgacaagtatttacagcaaatcttcgaaagtcaacgtatgaagttttcagagataccacagaggcttcacgccttgctgatgccccctgagcctatcatcatcaaccacgtgatatcggtagatccaaacgaccagaaaaagaccgcgtgttatgacatagacgtggaagtggatgatactctcaagacgcagatgaactctttcctcctgagcactgcatctcaacaagagatagcaaccctcgacaacaagactatgacagacgtggttggaaatccagaagaggaacggagggccgagttctactttcagccctgggcacaggaagctgtgtgcagatacttttactctaaggttcagcaacggaggcaagaattggagcaggcgctgggaataaggaacacttag

SEQ ID NO: 238096 - DNA, 3237 bp, Artificial Sequence
  derived and/or modified sequence
agcacgccttttccgctagtcgccccgctctatcccatagtctcgctgccctgagcctcccgtgccggccggccggccgggggaacaggcgggcgctcggggggcgctcggggggcggggggagttccggttccggttctttgtgcggctgcatcggcggctccgggaagatggcggcccgggcgggtttccagtctgtggctccaagcggcggcgccggagcctcaggaggggcgggcgcggctgctgccttgggcccgggcggaactccggggcctcctgtgcgaatgggcccggctccgggtcaagggctgtaccgctccccgatgcccggagcggcctatccgagaccaggtatgttgccaggcagccgaatgacacctcagggaccttccatgggaccccctggctatggggggaacccttcagtccgacctggcctggcccagtcagggatggatcagtcccgcaagagacctgcccctcagcagatccagcaggtccagcagcaggcggtccaaaatcgaaaccacaatgcaaagaaaaagaagatggctgacaaaattctacctcaaaggattcgtgaactggtaccagaatcccaggcctatatggatctcttggcttttgaaaggaaactggaccagactatcatgaggaaacggctagatatccaagaggccttgaaacgtcccatcaagcaaaaacggaagctgcgaattttcatttctaacactttcaatccggctaagtcagatgccgaggatggggaagggacggtggcttcctgggagcttcgggtagaaggacggctcctggaggattcagccttgtccaaatatgatgccactaaacaaaagaggaagttctcttccttttttaagtccttggtgattgaactggacaaagacctgtatgggccagacaaccatctggtagaatggcacaggaccgccactacccaggagaccgatggctttcaggtgaagcggccgggagacgtgaatgtacggtgtactgtcctactgatgctggattaccagcctccccagtttaaattagacccccgcctagctcgactcctgggcatccatacccagactcgtccagtgatcatccaagcactgtggcaatatattaagacacataagctccaggaccctcacgagcgggagtttgtcatctgtgacaagtacctgcagcagatctttgagtctcaacgtatgaagttttcagagatccctcagcggctccatgccttgcttatgccaccagaacctatcatcattaatcatgtcatcagtgttgacccgaatgatcagaaaaagacagcttgttatgacattgatgttgaagtggatgacaccttgaagacccagatgaattcttttctgctgtccactgccagccaacaggagattgctactctagacaacaagacaatgactgatgtggtgggtaacccagaggaggagcgccgagctgagttctacttccagccctgggctcaggaggctgtgtgccgatacttctactccaaggtgcagcagagacgacaagaattagagcaagccctgggaatccggaatacatagggcctctcccacagccctgattcgactgcaccaattcttgatttgggccctgtgctgcctgcctcatagtatctgccttggtcttgcttggggcgttccaggggatgctgttggttcaaggacaacaccagaatgaagagggtctcacaagacacctgttatcctcttctttcaccctatctcttcccacccccagcttccctttgccccacaaagttcccatgtgcctgtaccctcccctggtctacataggacctctagatagtgttagagagagaacatgtagtggtaatgagtgcttggaatggattgggcctcaggccaggtggtcttcaaggggaccagctaactgatcctgcccttcagagacccaggagttgggagctttcgctccttctccaagactcaggcctgtgggcactctataagctagttgatcttggctctcctgataacagaatccaatttccttccttccctccacaggtttggaacaaactctcccttcacttgttgccctgtagcactacagaaaccctggttcttgggctccactgagccccaggtcagtccccagccctctgggttggcctgctgtcagtgcttctctcactccttagttggggtccacatcagtattggagttttgttctttattgctccctcccagacactccctgtggctgccctttgtgattccctcagatctgccctaatcccgggcatttgggtgggggaatcttgcctttccctttcagagccccagggatctcatctggggaactgtcattgccagcagaggctgttccttcctgctgtttggagatgtgactcattcattcactcactccaccctgcctctgcatcccttaatggagaaacgggcctaaaaccaaacgggtaaaaagccctgggccatccctgtcttcctgtcccttgtctgcccagttgacacctactggtgacttctagggcactgaggagtgaaagcgcctagggctggagaatagcgctgagttgggtttgtgactcttccctctccctgcctcacaggattgtgactccccagcccctgccctcaaagcttcagacccctcaggtagcagcaggaccttgtgatcttggccccttggatctgagatggtttttgcatctttccaggagagcctcacattcttcttccaggttgtatcacccccgagttagcatatcccaggctcgcagactcaacacagcaagggtgggagacagctgggcacaaagggggaattccgttcagcatgggctctaaacccacagaactgacaaagcccctgcttccccaccccctcctcaggctcctgcgagcacacccccacccccaaatccctccctgttctacactggggacagcagaattttctccccgtcttccccttcctgccattttccctcccttgaaaggttgacactggacaaccttggggcagctgagccctggccgcctcctggctggaaccatgagaaggaagctcagtacttcccacagtgtccctgttgataactgtttttattaactgaattgtttttttcatggaccaaacttttttttgtactgtccccttattgatgttacccagttttaataaaagaatcttctgaa

SEQ ID NO: 238097 - protein, 737 aa, Artificial Sequence
  derived and/or modified sequence
MQPRRAQAPGAQLLPALALLLLLLGAGPRGSSLANPVPAAPLSAPGPCAAQPCRNGGVCTSRPEPDPQHPAPAGEPGYSCTCPAGISGANCQLVADPCASNPCHHGNCSSSSSSSSDGYLCICNEGYEGPNCEQALPSLPATGWTESMAPRQLQPVPATQEPDKILPRSQATVTLPTWQPKTGQKVVEMKWDQVEVIPDIACGNASSNSSAGGRLVSFEVPQNTSVKIRQDATASLILLWKVTATGFQQCSLIDGRSVTPLQASGGLVLLEEMLALGNNHFIGFVNDSVTKSIVALRLTLVVKVSTCVPGESHANDLECSGKGKCTTKPSEATFSCTCEEQYVGTFCEEYDACQRKPCQNNASCIDANEKQDGSNFTCVCLPGYTGELCQSKIDYCILDPCRNGATCISSLSGFTCQCPEGYFGSACEEKVDPCASSPCQNNGTCYVDGVHFTCNCSPGFTGPTCAQLIDFCALSPCAHGTCRSVGTSYKCLCDPGYHGLYCEEEYNECLSAPCLNAATCRDLVNGYECVCLAEYKGTHCELYKDPCANVSCLNGATCDSDGLNGTCICAPGFTGEECDIDINECDSNPCHHGGSCLDQPNGYNCHCPHGWVGANCEIHLQWKSGHMAESLTNMPRHSLYIIIGALCVAFILMLIILIVGICRISRIEYQGSSRPAYEEFYNCRSIDSEFSNAIASIRHARFGKKSRPAMYDVSPIAYEDYSPDDKPLVTLIKTKDL

SEQ ID NO: 238098 - protein, 455 aa, Artificial Sequence
  derived and/or modified sequence
MLALGNNHFIGFVNDSVTKSIVALRLTLVVKVSTCVPGESHANDLECSGKGKCTTKPSEATFSCTCEEQYVGTFCEEYDACQRKPCQNNASCIDANEKQDGSNFTCVCLPGYTGELCQSKIDYCILDPCRNGATCISSLSGFTCQCPEGYFGSACEEKVDPCASSPCQNNGTCCSPGFTGPTCAQLIDFCALSPCAHGTCRSVGTSYKCLCDPGYHGLYCEEEYNECLSAPCLNAATCRDLVNGYECVCLAEYKGTHCELYKDPCANVSCLNGATCDSDGLNGTCICAPGFTGEECDIDINECDSNPCHHGGSCLDQPNGYNCHCPHGWVGANCEIHLQWKSGHMAESLTNMPRHSLYIIIGALCVAFILMLIILIVGICRISRIEYQGSSRPAYEEFYNCRSIDSEFSNAIASIRHARFGKKSRPAMYDVSPIAYEDYSPDDKPLVTLIKTKDL

SEQ ID NO: 238099 - DNA, 2214 bp, Artificial Sequence
  derived and/or modified sequence
atgcagccccgcagggcccaggcaccgggagcccaactcctgcccgccctggccttacttctgctgctgctaggtgcgggaccaagggggagctcactcgcgaatccggtgcccgcggcacctctgtccgcgcctggaccgtgcgccgctcagccatgcaggaacggcggagtatgcacatctcgtccggagcctgacccccagcatccagcgccggctggcgagcctggctattcatgtacctgtcccgcggggatttctggagccaattgccaactggtggctgatccatgcgcttctaatccgtgccaccacggaaattgtagttccagctcctcctctagtagcgatggctacttgtgcatctgtaatgaaggctacgagggcccaaattgcgaacaggcacttccctcactgcccgccacaggatggactgaatccatggccccgcgccagcttcagccagttccagcgacccaggagccagataaaatcctgcctcggagccaggccaccgtgactctgcccacctggcagcccaagaccgggcagaaagttgtggaaatgaaatgggatcaggtagaggttattccagacatcgcctgtggcaacgcctcttccaattcttccgcaggagggaggctagtgtcgttcgaggtcccccagaataccagcgtgaagatccggcaggacgccactgcttcactgattctgctgtggaaggtcacagctactggctttcaacagtgttctctgattgacgggcgctccgtcactcccctgcaggcaagtggcgggcttgtgctgttggaggagatgctggccctcgggaacaaccatttcatcggatttgtcaacgactcagtcaccaagagcatcgtagcactgcggctcacactcgtggttaaagtgtcaacatgcgtgccaggcgaatcccatgccaacgacctcgagtgttccggcaaagggaaatgtactacaaaacccagtgaggcaactttcagctgcacttgtgaagaacagtatgttggcacattttgcgaagagtacgacgcatgccagagaaagccatgccaaaataacgctagctgcatcgacgctaacgagaagcaggacgggagtaacttcacatgtgtctgtttaccgggatatactggtgaactctgtcagtcaaagattgattactgtattctggacccttgccgtaacggcgctacctgtatttcttcactgagcggattcacctgtcagtgccctgagggatatttcggtagtgcatgtgaggaaaaagttgacccttgtgccagctccccatgtcagaacaatggaacttgctacgtggacggagtccatttcacctgtaattgttcgcccggctttacaggcccaacgtgtgctcagctcatagatttttgtgccctgagtccatgtgcacacgggacctgcaggagtgtgggcacctcctacaagtgcctgtgtgaccctggctaccatggcctgtattgtgaggaggagtacaacgagtgcctgtccgctccatgcctgaacgccgctacctgtcgagacctggtgaatggatatgaatgcgtgtgtctggcagagtacaaagggacacactgcgagttgtataaggatccctgcgctaacgtgtcgtgcctcaatggcgccacttgtgacagtgatggactaaatggaacgtgcatctgcgcacctggattcacaggggaagagtgcgatatagacatcaacgaatgcgactcaaacccgtgtcaccacggtggtagctgcctcgaccaacccaatgggtataactgccactgccctcatggctgggtgggcgccaattgtgaaatccacctccagtggaagagcgggcatatggcagagtctttaaccaacatgcctcgccattccctctacataattatcggagctctgtgcgtggccttcatacttatgcttatcatcctgatcgtcggcatttgccgcatctcacgaatcgagtaccagggttcaagtaggcctgcttacgaggaattttataattgtcgctcaatcgactccgaatttagcaatgccattgcctctatacggcatgccaggtttggcaagaagagtcgcccagccatgtacgatgtgtctcccattgcgtacgaagactattctcccgacgacaagcccctagtgaccctcatcaagacaaaggatctgtag

SEQ ID NO: 238100 - DNA, 1368 bp, Artificial Sequence
  derived and/or modified sequence
atgttggctctgggtaataatcatttcatcggatttgtgaacgatagtgtgacaaagtccatcgtggccctgaggctgaccctggtcgttaaagtatccacctgtgtcccaggagagtcacacgccaatgatctggaatgctcaggcaagggaaaatgcacaaccaagcctagtgaagctaccttctcatgtacttgcgaggagcagtatgttggcacattctgcgaggagtacgatgcttgtcaaagaaagccatgccagaataacgcatcttgtatcgatgccaatgagaagcaggatgggagtaatttcacttgtgtgtgcttgcctggttatacaggagaactttgtcaatctaagatcgattactgcattttggacccctgtcggaatggtgccacatgcatcagtagtctgagcggatttacctgccagtgtcctgagggatattttggctcagcctgtgaggagaaggtcgatccatgtgcttctagcccctgtcaaaacaatggcacctgctgctcccctggattcacaggccctacttgtgcacagttgatcgacttctgcgccttgtcgccctgtgctcacgggacttgtaggtctgtaggaacatcctataaatgcctgtgcgaccctgggtaccatggcttgtattgcgaggaggaatataacgagtgcctgtccgctccatgtcttaacgctgcgacctgcagagatttggtcaacgggtatgagtgtgtctgcttggctgaatataagggcacccactgtgaattgtacaaggatccatgtgcaaatgtatcctgcctgaatggggctacctgtgattcagatggactgaacggtacctgcatctgtgccccaggctttactggggaggagtgcgatatcgacattaatgaatgtgactcaaacccctgccatcacggaggtagctgtttggatcaacccaacgggtacaattgccactgccctcatggatgggtcggcgccaattgcgagattcatttgcagtggaagtcaggacacatggcggagagcctcaccaacatgcctcgtcactccttgtacatcattatcggggccctctgcgtggctttcatcctaatgctgatcatcttaatcgtagggatttgccggatttctcggattgagtaccagggctcttctaggccagcttatgaggagttctataattgcaggtccattgactcagaattttcaaatgctattgcctcgatccgccatgcacgctttggaaagaaaagccgccccgccatgtacgatgtctctccgatcgcttacgaagactattctcccgatgacaagcccctagtgacacttattaaaacaaaggatctctag

SEQ ID NO: 238101 - DNA, 2214 bp, Artificial Sequence
  derived and/or modified sequence
atgcagccccggcgggcccaggcccctggggcccagctgctgcctgccctggccctgctgctgctgctgctgggcgccggcccccggggcagcagcctggccaaccctgtgcctgctgcccccctgagcgcccctggcccctgtgccgcccagccctgcagaaatggaggagtgtgcaccagcaggcctgagccagacccccagcacccagccccagctggggagcccggctacagctgcacctgcccagctggcatcagcggggccaactgccagctggtggccgacccctgtgccagcaacccctgccaccacggcaactgcagcagcagcagcagcagcagcagtgatggctacctgtgcatctgcaatgaaggctatgagggccccaactgtgagcaggccctgcccagcctgcctgccaccggctggacagagagcatggccccccggcagctgcagcctgtgcctgccacccaggagccagacaagatcctgcccaggagccaggccaccgtgaccctgcccacctggcagcccaagacaggccagaaggtggtggagatgaagtgggaccaggtggaggtgatcccagacatcgcctgtggaaatgccagcagcaacagcagcgctgggggccgcctggtgtcctttgaggtgccccagaacacctctgtgaagatccggcaggatgccacagccagcctcatcctgctgtggaaggtgacagccaccggcttccagcagtgcagcctgattgatggccgctctgtgacccccctgcaggccagcggcggcctggtgctgctggaggagatgctggccctgggcaacaaccacttcatcggctttgtgaatgacagcgtgaccaagagcatcgtggccctgcggctgaccctggtggtgaaggtgtccacctgtgtgcctggagagagccacgccaatgacctggagtgcagcggcaagggcaagtgcaccaccaagcccagcgaggccaccttcagctgcacctgtgaggagcagtatgtgggcaccttctgtgaggagtatgatgcctgccagaggaagccctgccagaacaatgccagctgcattgatgccaatgagaagcaggacggcagcaacttcacctgtgtgtgcctgcccggctacacaggagagctgtgccagagcaagattgactactgcatcctggacccctgcagaaatggagccacctgcatcagcagcctgagcggcttcacctgccagtgcccagagggctactttggaagtgcctgtgaggagaaggtggacccctgtgccagcagcccctgccagaacaacggcacctgctacgtggatggagtgcacttcacctgcaactgcagccctggcttcaccggccccacctgtgcccagctgattgacttctgtgccctgagcccctgtgcccacggcacctgccgctctgtgggcaccagctacaagtgcctgtgtgaccccggctaccacggcctgtactgtgaggaggagtacaatgaatgtctgagcgccccctgcctgaatgctgccacctgccgggacctggtgaatggctatgaatgtgtgtgcctggccgagtacaagggcacccactgtgagctgtacaaggacccctgtgccaacgtgtcctgcctgaatggagccacctgtgacagtgatggcctgaatggcacctgcatctgtgcccctggcttcaccggggaggagtgtgacatcgacatcaatgaatgtgacagcaacccctgccaccacggcggcagctgcctggaccagcccaacggctacaactgccactgcccccacggctgggtgggcgccaactgtgagatccacctgcagtggaagagcggccacatggccgagagcctgaccaacatgcccaggcacagcctgtacatcatcattggagccctgtgtgtggccttcatcctgatgctgatcatcctgattgtgggcatctgccgcatcagcagaattgagtaccagggcagcagcaggcctgcctatgaggagttctacaactgccgcagcattgacagcgagttcagcaatgccatcgccagcatcagacatgccaggtttgggaagaagagcaggcctgccatgtatgatgtgagccccatcgcctatgaggactacagcccagatgacaagcccctggtgaccctcatcaagaccaaggacctgtag

SEQ ID NO: 238102 - DNA, 1368 bp, Artificial Sequence
  derived and/or modified sequence
atgctggccctgggcaacaaccacttcatcggctttgtgaatgacagcgtgaccaagagcatcgtggccctgcggctgaccctggtggtgaaggtgtccacctgtgtgcctggagagagccacgccaatgacctggagtgcagcggcaagggcaagtgcaccaccaagcccagcgaggccaccttcagctgcacctgtgaggagcagtatgtgggcaccttctgtgaggagtatgatgcctgccagaggaagccctgccagaacaatgccagctgcattgatgccaatgagaagcaggacggcagcaacttcacctgtgtgtgcctgcccggctacacaggagagctgtgccagagcaagattgactactgcatcctggacccctgcagaaatggagccacctgcatcagcagcctgagcggcttcacctgccagtgcccagagggctactttggaagtgcctgtgaggagaaggtggacccctgtgccagcagcccctgccagaacaacggcacctgctgcagccctggcttcaccggccccacctgtgcccagctgattgacttctgtgccctgagcccctgtgcccacggcacctgccgctctgtgggcaccagctacaagtgcctgtgtgaccccggctaccacggcctgtactgtgaggaggagtacaatgaatgtctgagcgccccctgcctgaatgctgccacctgccgggacctggtgaatggctatgaatgtgtgtgcctggccgagtacaagggcacccactgtgagctgtacaaggacccctgtgccaacgtgtcctgcctgaatggagccacctgtgacagtgatggcctgaatggcacctgcatctgtgcccctggcttcaccggggaggagtgtgacatcgacatcaatgaatgtgacagcaacccctgccaccacggcggcagctgcctggaccagcccaacggctacaactgccactgcccccacggctgggtgggcgccaactgtgagatccacctgcagtggaagagcggccacatggccgagagcctgaccaacatgcccaggcacagcctgtacatcatcattggagccctgtgtgtggccttcatcctgatgctgatcatcctgattgtgggcatctgccgcatcagcagaattgagtaccagggcagcagcaggcctgcctatgaggagttctacaactgccgcagcattgacagcgagttcagcaatgccatcgccagcatcagacatgccaggtttgggaagaagagcaggcctgccatgtatgatgtgagccccatcgcctatgaggactacagcccagatgacaagcccctggtgaccctcatcaagaccaaggacctgtag

SEQ ID NO: 238103 - DNA, 2214 bp, Artificial Sequence
  derived and/or modified sequence
atgcagccccggcgggcccaggcccccggcgcccagctgctgcccgccttggctctgctcctcctgcttttgggcgcaggacccaggggcagttctctggcaaacccagttccagccgcgcctctgtcagcacctggaccctgtgccgctcagccctgtcgaaacggcggcgtgtgcaccagcaggcctgagcccgacccccaacaccctgcccctgccggtgagcctgggtactcctgtacctgccctgctggcatcagcggggcgaattgccagctggtggctgatccctgtgcttcaaatccttgtcatcacggcaactgttccagttcttcctcctcgtcatccgacggctatctatgtatctgcaacgagggctatgagggccccaattgcgaacaggccttgccatccctgcctgcgaccggctggaccgagtctatggcccctcgtcagctccagcccgtcccagccacccaggagcccgataaaattctcccacgcagccaggctaccgtgacactccccacttggcagcccaaaacgggacagaaggtcgtcgaaatgaagtgggatcaagtggaggtgatcccagatattgcatgcggaaatgcgagttcaaattcatccgctggtggccgattagtgagctttgaagtgccacagaataccagtgtgaagatcaggcaggatgccactgctagtttaattctgctctggaaagtgacagccacaggcttccagcagtgctcgttaattgatggtagatccgttacacctcttcaggcctccggcgggttagtccttctggaagaaatgctagcccttggcaacaatcattttatcgggtttgtgaatgatagtgtcaccaagtccattgtggctctccgcctgaccctcgttgtgaaggtgtctacgtgcgtgcctggggagtctcatgcgaacgacttggaatgctctgggaagggaaagtgcacaacgaagccttcggaagccacgttttcgtgcacctgcgaggaacagtatgttggtaccttctgtgaagaatatgatgcatgtcaacgaaaaccctgtcagaataatgccagctgtatcgatgcaaacgagaaacaggatggctccaactttacttgcgtttgcctcccagggtacaccggagaactgtgccaaagtaagatcgactattgtatcctcgacccctgcagaaacggagccacctgcatttcttccctgagcgggtttacctgtcagtgccccgaaggctattttggaagtgcttgcgaggaaaaggtcgacccttgcgccagctccccctgccagaacaatggtacatgctatgttgacggcgtccacttcacctgcaattgctcccccgggtttacaggtcctacatgtgcgcagttgatagatttctgtgccttgagcccttgcgcacacggaacctgccgcagcgtgggtacaagttataagtgtctatgtgacccaggatatcacggcctgtattgcgaggaggagtataacgagtgtcttagcgctccatgtctgaatgccgcaacttgccgtgatttagtgaacggttatgagtgtgtatgtctggccgagtacaaaggaacccattgtgagctttataaagatccttgtgctaatgtgtcttgcctgaacggggccacttgtgacagtgatggactcaacggcacttgcatttgcgcaccaggctttaccggagaagagtgcgatattgacatcaacgaatgcgattccaacccttgccaccatggcggaagctgcctggaccagcccaacgggtacaactgccattgccctcacggttgggtcggcgccaactgcgagattcacctccagtggaagtctggacacatggcagagtctctgaccaatatgccacggcacagtctgtatataatcattggggccctgtgtgtggcttttattctgatgctcatcatactaatcgtcggaatttgtcggatttccaggatcgagtatcagggctcatcacggcccgcatacgaggaattttacaattgtcgctctatcgattccgagttctccaacgccattgccagcatacgccatgcccggttcggcaagaagtcacggcccgccatgtacgacgtcagccccatcgcatatgaggactacagcccagacgacaagccactagtcactctgataaaaaccaaggatttgtag

SEQ ID NO: 238104 - DNA, 1368 bp, Artificial Sequence
  derived and/or modified sequence
atgctggccctgggcaacaaccacttcatcggcttcgtgaacgacagtgtaacaaaatcaattgtagccctgcgcctaacattagtggtgaaagtgtcgacttgcgtacccggggagtctcacgccaatgatttagaatgctcagggaaaggtaaatgcactacgaagcctagcgaagctacattcagctgcacctgtgaggaacaatatgttggcaccttctgtgaagagtacgatgcatgccagaggaagccatgtcagaacaacgcaagctgcatcgatgctaacgagaaacaggacggttctaatttcacctgcgtctgtctcccaggatacaccggggaattgtgtcagtccaaaatagactattgcattctcgacccatgccgaaacggggcaacctgtatttcctcactgtccggcttcacctgccaatgcccagaaggctacttcggctcggcttgtgaggagaaggttgatccttgtgcctcaagcccttgccagaacaacggaacctgttgctctcccggattcactgggcctacttgtgcgcaacttatagatttttgcgccctgtctccttgtgcccacgggacttgcagatcagtcggaacttcctacaagtgtttatgcgacccaggttaccacggcctctattgcgaagaggaatataatgagtgtctaagcgcaccatgcctcaacgcagctacatgcagagacttggtgaatggctatgaatgtgtgtgcctggctgagtacaaaggcacacactgcgaactctacaaggacccctgtgcaaatgtgtcatgtctgaacggggccacctgtgattcagatggactcaacggcacctgcatctgtgccccgggattcaccggggaggaatgtgacattgacataaatgaatgtgactctaacccatgccaccacggcggttcgtgcctcgatcagccaaatgggtacaattgccattgcccccacggatgggttggtgctaactgtgagatccacctacagtggaagagtgggcacatggcagaatccctgacaaatatgcctaggcacagtttatacatcatcatcggagcgctctgcgtggccttcatactgatgctcattatccttattgtgggaatatgcagaatttctagaatcgagtatcagggcagcagtagacccgcctacgaagagttttacaactgtcggagcatcgactctgaattctcaaacgcgatcgccagtatccgccatgccaggttcgggaaaaaaagtcgacccgccatgtacgacgttagccctatagcttacgaggattattcgcccgacgacaagcctctagttaccttgatcaaaactaaagacctttag

SEQ ID NO: 238105 - DNA, 2214 bp, Artificial Sequence
  derived and/or modified sequence
atgcagccgagacgggcacaagctcccggagcccagctgctacccgcactggctctcctgctgctgttactgggggcagggcctagagggtcttcacttgcaaaccctgtgccagcggcaccactgtctgcccctgggccttgcgcagctcagccctgcaggaacggcggtgtgtgcaccagccggccagagcctgatccgcagcaccccgctccggctggggaacctgggtactcatgtacatgtcccgctggaattagcggggctaactgtcaactcgttgccgatccatgcgcctctaacccatgccaccacggtaactgtagctccagcagttcttccagctcagacggatatctttgtatttgtaatgaagggtacgagggccctaactgcgagcaggcgctcccaagtttgccagcaactgggtggacggagagcatggccccaaggcaattgcagcctgtcccagcaacccaagaaccagacaaaatactgcccaggagtcaggccacagtcaccctgcctacatggcagccgaaaaccggtcagaaggttgtagaaatgaaatgggatcaggttgaagtgattcctgatatcgcctgcggaaacgcctccagcaattcctccgcgggagggaggctggtgtcttttgaggtgccccagaatacgtccgtgaaaattaggcaagatgccacggctagtctgattttgctatggaaggtgacagccactgggttccagcagtgctcattaattgacggcagatccgtgacacccctccaagcgagtggagggctggtgctcttggaggaaatgctggccctaggtaataaccacttcatcggattcgtgaacgactccgttaccaagtctatcgtggctctgcgtctgactctcgtggtgaaagtttctacatgcgtgccaggggagagccacgcgaacgatctagaatgtagtggtaaagggaagtgcacgacaaagccctccgaggctaccttttcctgtacatgcgaagagcagtacgtggggacattctgcgaggaatacgatgcatgtcaaaggaaaccctgccagaataatgccagctgtattgacgcgaacgagaagcaagacggctcaaacttcacatgtgtttgtctgcccggttatacaggagaactctgtcagtccaagattgactactgcatcctagatccatgcagaaacggcgcaacctgcattagttcattatccggatttacctgtcaatgccccgagggctattttggctccgcatgcgaggagaaagttgatccgtgcgccagtagcccctgccagaataatggaacttgctacgtggatggggtccatttcacttgtaactgttctcctggattcacagggcctacttgcgcccaactgatcgacttctgcgccctgtccccctgtgcccatggcacctgcagaagcgttggaacttcatacaaatgcctctgcgatccaggataccacggcctgtactgcgaggaagagtacaatgaatgtctttcagccccatgcctgaacgcagcaacctgccgagatctggtgaatggatacgagtgcgtatgcttggcagaatacaagggcacacactgcgagctgtacaaagatccttgcgctaacgtgtcttgcctcaatggtgcaacctgcgactcagacggccttaacggaacctgtatctgcgcccctggctttacgggagaagagtgcgacatcgatatcaatgagtgcgacagcaacccttgtcaccacggagggagctgtctggaccaaccgaatggctataactgccattgcccccacggctgggtgggtgctaattgcgagatacacttgcaatggaaaagcgggcacatggctgagtccctcacaaacatgcctcgccactccctgtatattattatcggcgctttgtgcgtggcattcatcctgatgctgataatcctcatcgtggggatttgcaggatatccaggattgagtaccaaggttccagtcggcctgcctatgaggagttctataactgcaggtcgattgactctgagttttctaatgctatcgcttcaatccgtcatgccagatttggtaagaagtctcgtcctgcaatgtacgatgtgagcccaatcgcctacgaggattactcccctgacgacaagccattggtgacactgattaagactaaagatttatag

SEQ ID NO: 238106 - DNA, 1368 bp, Artificial Sequence
  derived and/or modified sequence
atgcttgctctgggcaacaaccacttcatcgggttcgtgaacgactcagtgactaagtctatagtcgcactgaggctgacgctcgtggtaaaagtcagcacctgcgttccaggagaatcccacgccaatgacttagagtgcagcgggaagggaaagtgcaccacaaagccaagtgaagctactttcagctgcacttgcgaagagcagtacgttggtaccttctgcgaggaatacgatgcgtgccaacgtaagccatgtcagaataacgcctcatgtattgacgccaacgaaaaacaggatgggtccaattttacttgcgtgtgcctacccggatatacaggagaattatgccagagcaaaattgactattgtatcttggacccctgtagaaacggcgcaacttgtatcagctccctgtccggtttcacttgtcagtgtcccgagggctacttcgggtccgcgtgcgaagagaaggtggatccatgcgcaagttcgccgtgccaaaacaatggaacctgttgctcgcctggctttactggtccaacctgcgcacagcttatagatttctgtgccctgagcccatgtgcccacggcacctgcaggtctgtcggcacaagctataaatgcctgtgtgacccaggctatcacgggctttactgcgaggaggaatacaacgaatgcctttctgcaccctgtctcaacgctgcaacttgcagagacctggtcaacggatacgagtgcgtttgtttggccgagtacaagggcacccattgcgaattatataaggatccttgtgccaacgtctcttgcctcaacggggctacatgcgactctgatgggttgaacggaacgtgcatctgtgcacctggtttcaccggggaagagtgcgacattgacattaacgagtgtgatagcaatccttgtcatcacggtggctcgtgtctagaccaaccgaatggatataattgccattgcccgcatggttgggtgggggcaaattgtgaaatccacctgcaatggaagtcagggcacatggcagaaagcttgactaatatgccccgtcactccctgtatattattatcggagctctttgcgtggccttcatcctgatgctgataattctgattgtcggaatatgtagaatctctagaattgagtatcaaggatcctctcggcctgcctacgaagagttctacaattgtcgctcaattgatagcgagtttagcaacgcaatcgcctccattcgccatgcacggttcgggaagaagagcagaccggctatgtacgacgtgtcacctattgcgtatgaggactattctccggacgataagccactcgtgacacttattaagacaaaagacctgtag

SEQ ID NO: 238107 - DNA, 2214 bp, Artificial Sequence
  derived and/or modified sequence
atgcagcccagaagagcccaggcccccggcgcccagctgctgcccgccctggccctgctgctgctgctgctgggcgccggccccagaggcagcagcctggccaaccccgtgcccgccgcccccctgagcgcccccggcccctgcgccgcccagccctgcagaaacggcggcgtgtgcaccagcagacccgagcccgacccccagcaccccgcccccgccggcgagcccggctacagctgcacctgccccgccggcatcagcggcgccaactgccagctggtggccgacccctgcgccagcaacccctgccaccacggcaactgcagcagcagcagcagcagcagcagcgacggctacctgtgcatctgcaacgagggctacgagggccccaactgcgagcaggccctgcccagcctgcccgccaccggctggaccgagagcatggcccccagacagctgcagcccgtgcccgccacccaggagcccgacaagatcctgcccagaagccaggccaccgtgaccctgcccacctggcagcccaagaccggccagaaggtggtggagatgaagtgggaccaggtggaggtgatccccgacatcgcctgcggcaacgccagcagcaacagcagcgccggcggcagactggtgagcttcgaggtgccccagaacaccagcgtgaagatcagacaggacgccaccgccagcctgatcctgctgtggaaggtgaccgccaccggcttccagcagtgcagcctgatcgacggcagaagcgtgacccccctgcaggccagcggcggcctggtgctgctggaggagatgctggccctgggcaacaaccacttcatcggcttcgtgaacgacagcgtgaccaagagcatcgtggccctgagactgaccctggtggtgaaggtgagcacctgcgtgcccggcgagagccacgccaacgacctggagtgcagcggcaagggcaagtgcaccaccaagcccagcgaggccaccttcagctgcacctgcgaggagcagtacgtgggcaccttctgcgaggagtacgacgcctgccagagaaagccctgccagaacaacgccagctgcatcgacgccaacgagaagcaggacggcagcaacttcacctgcgtgtgcctgcccggctacaccggcgagctgtgccagagcaagatcgactactgcatcctggacccctgcagaaacggcgccacctgcatcagcagcctgagcggcttcacctgccagtgccccgagggctacttcggcagcgcctgcgaggagaaggtggacccctgcgccagcagcccctgccagaacaacggcacctgctacgtggacggcgtgcacttcacctgcaactgcagccccggcttcaccggccccacctgcgcccagctgatcgacttctgcgccctgagcccctgcgcccacggcacctgcagaagcgtgggcaccagctacaagtgcctgtgcgaccccggctaccacggcctgtactgcgaggaggagtacaacgagtgcctgagcgccccctgcctgaacgccgccacctgcagagacctggtgaacggctacgagtgcgtgtgcctggccgagtacaagggcacccactgcgagctgtacaaggacccctgcgccaacgtgagctgcctgaacggcgccacctgcgacagcgacggcctgaacggcacctgcatctgcgcccccggcttcaccggcgaggagtgcgacatcgacatcaacgagtgcgacagcaacccctgccaccacggcggcagctgcctggaccagcccaacggctacaactgccactgcccccacggctgggtgggcgccaactgcgagatccacctgcagtggaagagcggccacatggccgagagcctgaccaacatgcccagacacagcctgtacatcatcatcggcgccctgtgcgtggccttcatcctgatgctgatcatcctgatcgtgggcatctgcagaatcagcagaatcgagtaccagggcagcagcagacccgcctacgaggagttctacaactgcagaagcatcgacagcgagttcagcaacgccatcgccagcatcagacacgccagattcggcaagaagagcagacccgccatgtacgacgtgagccccatcgcctacgaggactacagccccgacgacaagcccctggtgaccctgatcaagaccaaggacctgtag

SEQ ID NO: 238108 - DNA, 1368 bp, Artificial Sequence
  derived and/or modified sequence
atgctggccctgggcaacaaccacttcatcggcttcgtgaacgacagcgtgaccaagagcatcgtggccctgagactgaccctggtggtgaaggtgagcacctgcgtgcccggcgagagccacgccaacgacctggagtgcagcggcaagggcaagtgcaccaccaagcccagcgaggccaccttcagctgcacctgcgaggagcagtacgtgggcaccttctgcgaggagtacgacgcctgccagagaaagccctgccagaacaacgccagctgcatcgacgccaacgagaagcaggacggcagcaacttcacctgcgtgtgcctgcccggctacaccggcgagctgtgccagagcaagatcgactactgcatcctggacccctgcagaaacggcgccacctgcatcagcagcctgagcggcttcacctgccagtgccccgagggctacttcggcagcgcctgcgaggagaaggtggacccctgcgccagcagcccctgccagaacaacggcacctgctgcagccccggcttcaccggccccacctgcgcccagctgatcgacttctgcgccctgagcccctgcgcccacggcacctgcagaagcgtgggcaccagctacaagtgcctgtgcgaccccggctaccacggcctgtactgcgaggaggagtacaacgagtgcctgagcgccccctgcctgaacgccgccacctgcagagacctggtgaacggctacgagtgcgtgtgcctggccgagtacaagggcacccactgcgagctgtacaaggacccctgcgccaacgtgagctgcctgaacggcgccacctgcgacagcgacggcctgaacggcacctgcatctgcgcccccggcttcaccggcgaggagtgcgacatcgacatcaacgagtgcgacagcaacccctgccaccacggcggcagctgcctggaccagcccaacggctacaactgccactgcccccacggctgggtgggcgccaactgcgagatccacctgcagtggaagagcggccacatggccgagagcctgaccaacatgcccagacacagcctgtacatcatcatcggcgccctgtgcgtggccttcatcctgatgctgatcatcctgatcgtgggcatctgcagaatcagcagaatcgagtaccagggcagcagcagacccgcctacgaggagttctacaactgcagaagcatcgacagcgagttcagcaacgccatcgccagcatcagacacgccagattcggcaagaagagcagacccgccatgtacgacgtgagccccatcgcctacgaggactacagccccgacgacaagcccctggtgaccctgatcaagaccaaggacctgtag

SEQ ID NO: 238109 - DNA, 3260 bp, Artificial Sequence
  derived and/or modified sequence
cgcagctgcaggaggcgcccggcccggcggagcagccctagccgccaccgtcgctctcgcagctctcgtcgccactgccaccgccgccgccgtcactgcgtcctggctccggctcccgcgccctcccggccggccatgcagccccgccgcgcccaggcgcccggtgcgcagctgctgcccgcgctggccctgctgctgctgctgctcggagcggggccccgaggcagctccctggccaacccggtgcccgccgcgcccctgtctgcgcccgggccgtgcgccgcgcagccctgccggaatgggggtgtgtgcacctcgcgccctgagccggacccgcagcacccggcccccgccggcgagcctggctacagctgcacctgccccgccgggatctccggcgccaactgccagcttgttgcagatccttgtgccagcaacccttgtcaccatggcaactgcagcagcagcagcagcagcagcagcgatggctacctctgcatttgcaatgaaggctatgaaggtcccaactgtgaacaggcacttcccagtctcccagccactggctggaccgaatccatggcaccccgacagcttcagcctgttcctgctactcaggagcctgacaaaatcctgcctcgctctcaggcaacggtgacactgcctacctggcagccgaaaacagggcagaaagttgtagaaatgaaatgggatcaagtggaggtgatcccagatattgcctgtgggaatgccagttctaacagctctgcgggtggccgcctggtatcctttgaagtgccacagaacacctcagtcaagattcggcaagatgccactgcctcactgattttgctctggaaggtcacggccacaggattccaacagtgctccctcatagatggacgaagtgtgaccccccttcaggcttcagggggactggtcctcctggaggagatgctcgccttggggaataatcactttattggttttgtgaatgattctgtgactaagtctattgtggctttgcgcttaactctggtggtgaaggtcagcacctgtgtgccgggggagagtcacgcaaatgacttggagtgttcaggaaaaggaaaatgcaccacgaagccgtcagaggcaactttttcctgtacctgtgaggagcagtacgtgggtactttctgtgaagaatacgatgcttgccagaggaaaccttgccaaaacaacgcgagctgtattgatgcaaatgaaaagcaagatgggagcaatttcacctgtgtttgccttcctggttatactggagagctttgccagtccaagattgattactgcatcctagacccatgcagaaatggagcaacatgcatttccagtctcagtggattcacctgccagtgtccagaaggatacttcggatctgcttgtgaagaaaaggtggacccctgcgcctcgtctccgtgccagaacaacggcacctgctatgtggacggggtacactttacctgcaactgcagcccgggcttcacagggccgacctgtgcccagcttattgacttctgtgccctcagcccctgtgctcatggcacgtgccgcagcgtgggcaccagctacaaatgcctctgtgatccaggttaccatggcctctactgtgaggaggaatataatgagtgcctctccgctccatgcctgaatgcagccacctgcagggacctcgttaatggctatgagtgtgtgtgcctggcagaatacaaaggaacacactgtgaattgtacaaggatccctgcgctaacgtcagctgtctgaacggagccacctgtgacagcgacggcctgaatggcacgtgcatctgtgcacccgggtttacaggtgaagagtgcgacattgacataaatgaatgtgacagtaacccctgccaccatggtgggagctgcctggaccagcccaatggttataactgccactgcccgcatggttgggtgggagcaaactgtgagatccacctccaatggaagtccgggcacatggcggagagcctcaccaacatgccacggcactccctctacatcatcattggagccctctgcgtggccttcatccttatgctgatcatcctgatcgtggggatttgccgcatcagccgcattgaataccagggttcttccaggccagcctatgaggagttctacaactgccgcagcatcgacagcgagttcagcaatgccattgcatccatccggcatgccaggtttggaaagaaatcccggcctgcaatgtatgatgtgagccccatcgcctatgaagattacagtcctgatgacaaacccttggtcacactgattaaaactaaagatttgtaatctttttttggattatttttcaaaaagatgagatactacactcatttaaatatttttaagaaaataaaaagcttaagaaatttaaaatgctagctgctcaagagttttcagtagaatatttaagaactaattttctgcagcttttagtttggaaaaaatattttaaaaacaaaatttgtgaaacctatagacgatgttttaatgtaccttcagctctctaaactgtgtgcttctactagtgtgtgctcttttcactgtagacactatcacgagacccagattaatttctgtggttgttacagaataagtctaatcaaggagaagtttctgtttgacgtttgagtgccggctttctgagtagagttaggaaaaccacgtaacgtagcatatgatgtataatagagtatacccgttacttaaaaagaagtctgaaatgttcgttttgtggaaaagaaactagttaaatttactattcctaacccgaatgaaattagcctttgccttattctgtgcatgggtaagtaacttatttctgcactgttttgttgaactttgtggaaacattctttcgagtttgtttttgtcattttcgtaacagtcgtcgaactaggcctcaaaaacatacgtaacgaaaaggcctagcgaggcaaattctgattgatttgaatctatatttttctttaaaaagtcaagggttctatattgtgagtaaattaaatttacatttgagttgtttgttgctaagaggtagtaaatgtaagagagtactggttccttcagtagtgagtatttctcatagtgcagctttatttatctccaggatgtttttgtggctgtatttgattgatatgtgcttcttctgattcttgctaatttccaaccatattgaataaatgtgatcaagtcaagga

SEQ ID NO: 238110 - DNA, 2128 bp, Artificial Sequence
  derived and/or modified sequence
aaagctttactgagcccctgctgcacgccaggagccctgtgctgggggagcggatctgtgcggagtctactgtgatcttctccaggagcactggggagaatgggcagctgttgggatgttgggaagtggtcaggagtctctgggaagaggtaatatgtgggctaggaacacatttccaaggtggagaaggagacaaagcttgggaggattcggcaagatgccactgcctcactgattttgctctggaaggtcacggccacaggattccaacagtgctccctcatagatggacgaagtgtgaccccccttcaggcttcagggggactggtcctcctggaggagatgctcgccttggggaataatcactttattggttttgtgaatgattctgtgactaagtctattgtggctttgcgcttaactctggtggtgaaggtcagcacctgtgtgccgggggagagtcacgcaaatgacttggagtgttcaggaaaaggaaaatgcaccacgaagccgtcagaggcaactttttcctgtacctgtgaggagcagtacgtgggtactttctgtgaagaatacgatgcttgccagaggaaaccttgccaaaacaacgcgagctgtattgatgcaaatgaaaagcaagatgggagcaatttcacctgtgtttgccttcctggttatactggagagctttgccagtccaagattgattactgcatcctagacccatgcagaaatggagcaacatgcatttccagtctcagtggattcacctgccagtgtccagaaggatacttcggatctgcttgtgaagaaaaggtggacccctgcgcctcgtctccgtgccagaacaacggcacctgctgcagcccgggcttcacagggccgacctgtgcccagcttattgacttctgtgccctcagcccctgtgctcatggcacgtgccgcagcgtgggcaccagctacaaatgcctctgtgatccaggttaccatggcctctactgtgaggaggaatataatgagtgcctctccgctccatgcctgaatgcagccacctgcagggacctcgttaatggctatgagtgtgtgtgcctggcagaatacaaaggaacacactgtgaattgtacaaggatccctgcgctaacgtcagctgtctgaacggagccacctgtgacagcgacggcctgaatggcacgtgcatctgtgcacccgggtttacaggtgaagagtgcgacattgacataaatgaatgtgacagtaacccctgccaccatggtgggagctgcctggaccagcccaatggttataactgccactgcccgcatggttgggtgggagcaaactgtgagatccacctccaatggaagtccgggcacatggcggagagcctcaccaacatgccacggcactccctctacatcatcattggagccctctgcgtggccttcatccttatgctgatcatcctgatcgtggggatttgccgcatcagccgcattgaataccagggttcttccaggccagcctatgaggagttctacaactgccgcagcatcgacagcgagttcagcaatgccattgcatccatccggcatgccaggtttggaaagaaatcccggcctgcaatgtatgatgtgagccccatcgcctatgaagattacagtcctgatgacaaacccttggtcacactgattaaaactaaagatttgtaatctttttttggattatttttcaaaaagatgagatactacactcatttaaatatttttaagaaaataaaaagcttaagaaatttaaaatgctagctgctcaagagttttcagtagaatatttaagaactaattttctgcagcttttagtttggaaaaaatattttaaaaacaaaatttgtgaaacctatagacgatgttttaatgtaccttcagctctctaaactgtgtgcttctactagtgtgtgctcttttcactgtagacactatcacgagacccagattaatttctgtggttgttacagaataagtctaatcaaggagaagtttctgtttgacgtttgagtgccggctttctgagtagagttaggaaaaccacgtaacgtagcatatgatgtataatagagtatacccgttactt

SEQ ID NO: 238111 - protein, 752 aa, Artificial Sequence
  derived and/or modified sequence
MAEPQAESEPLLGGARGGGGDWPAGLTTYRSIQVGPGAAARWDLCIDQAVVFIEDAIQYRSINHRVDASSMWLYRRYYSNVCQRTLSFTIFLILFLAFIETPSSLTSTADVRYRAAPWEPPCGLTESVEVLCLLVFAADLSVKGYLFGWAHFQKNLWLLGYLVVLVVSLVDWTVSLSLVCHEPLRIRRLLRPFFLLQNSSMMKKTLKCIRWSLPEMASVGLLLAIHLCLFTMFGMLLFAGGKQDDGQDRERLTYFQNLPESLTSLLVLLTTANNPDVMIPAYSKNRAYAIFFIVFTVIGSLFLMNLLTAIIYSQFRGYLMKSLQTSLFRRRLGTRAAFEVLSSMVGEGGAFPQAVGVKPQNLLQVLQKVQLDSSHKQAMMEKVRSYGSVLLSAEEFQKLFNELDRSVVKEHPPRPEYQSPFLQSAQFLFGHYYFDYLGNLIALANLVSICVFLVLDADVLPAERDDFILGILNCVFIVYYLLEMLLKVFALGLRGYLSYPSNVFDGLLTVVLLVLEISTLAVYRLPHPGWRPEMVGLLSLWDMTRMLNMLIVFRFLRIIPSMKLMAVVASTVLGLVQNMRAFGGILVVVYYVFAIIGINLFRGVIVALPGNSSLAPANGSAPCGSFEQLEYWANNFDDFAAALVTLWNLMVVNNWQVFLDAYRRYSGPWSKIYFVLWWLVSSVIWVNLFLALILENFLHKWDPRSHLQPLAGTPEATYQMTVELLFRDILEEPGEDELTERLSQHPHLWLCR

SEQ ID NO: 238112 - DNA, 2259 bp, Artificial Sequence
  derived and/or modified sequence
atggccgagccccaggccgagagcgagcccctgctgggcggcgccagaggcggcggcggcgactggcccgccggcctgaccacctacagaagcatccaggtgggccccggcgccgccgccagatgggacctgtgcatcgaccaggccgtggtgttcatcgaggacgccatccagtacagaagcatcaaccacagagtggacgccagcagcatgtggctgtacagaagatactacagcaacgtgtgccagagaaccctgagcttcaccatcttcctgatcctgttcctggccttcatcgagacccccagcagcctgaccagcaccgccgacgtgagatacagagccgccccctgggagcccccctgcggcctgaccgagagcgtggaggtgctgtgcctgctggtgttcgccgccgacctgagcgtgaagggctacctgttcggctgggcccacttccagaagaacctgtggctgctgggctacctggtggtgctggtggtgagcctggtggactggaccgtgagcctgagcctggtgtgccacgagcccctgagaatcagaagactgctgagacccttcttcctgctgcagaacagcagcatgatgaagaagaccctgaagtgcatcagatggagcctgcccgagatggccagcgtgggcctgctgctggccatccacctgtgcctgttcaccatgttcggcatgctgctgttcgccggcggcaagcaggacgacggccaggacagagagagactgacctacttccagaacctgcccgagagcctgaccagcctgctggtgctgctgaccaccgccaacaaccccgacgtgatgatccccgcctacagcaagaacagagcctacgccatcttcttcatcgtgttcaccgtgatcggcagcctgttcctgatgaacctgctgaccgccatcatctacagccagttcagaggctacctgatgaagagcctgcagaccagcctgttcagaagaagactgggcaccagagccgccttcgaggtgctgagcagcatggtgggcgagggcggcgccttcccccaggccgtgggcgtgaagccccagaacctgctgcaggtgctgcagaaggtgcagctggacagcagccacaagcaggccatgatggagaaggtgagaagctacggcagcgtgctgctgagcgccgaggagttccagaagctgttcaacgagctggacagaagcgtggtgaaggagcacccccccagacccgagtaccagagccccttcctgcagagcgcccagttcctgttcggccactactacttcgactacctgggcaacctgatcgccctggccaacctggtgagcatctgcgtgttcctggtgctggacgccgacgtgctgcccgccgagagagacgacttcatcctgggcatcctgaactgcgtgttcatcgtgtactacctgctggagatgctgctgaaggtgttcgccctgggcctgagaggctacctgagctaccccagcaacgtgttcgacggcctgctgaccgtggtgctgctggtgctggagatcagcaccctggccgtgtacagactgccccaccccggctggagacccgagatggtgggcctgctgagcctgtgggacatgaccagaatgctgaacatgctgatcgtgttcagattcctgagaatcatccccagcatgaagctgatggccgtggtggccagcaccgtgctgggcctggtgcagaacatgagagccttcggcggcatcctggtggtggtgtactacgtgttcgccatcatcggcatcaacctgttcagaggcgtgatcgtggccctgcccggcaacagcagcctggcccccgccaacggcagcgccccctgcggcagcttcgagcagctggagtactgggccaacaacttcgacgacttcgccgccgccctggtgaccctgtggaacctgatggtggtgaacaactggcaggtgttcctggacgcctacagaagatacagcggcccctggagcaagatctacttcgtgctgtggtggctggtgagcagcgtgatctgggtgaacctgttcctggccctgatcctggagaacttcctgcacaagtgggaccccagaagccacctgcagcccctggccggcacccccgaggccacctaccagatgaccgtggagctgctgttcagagacatcctggaggagcccggcgaggacgagctgaccgagagactgagccagcacccccacctgtggctgtgcagatag

SEQ ID NO: 238113 - DNA, 2259 bp, Artificial Sequence
  derived and/or modified sequence
atggctgaaccccaggctgaatctgaaccactgctcggcggcgccagggggggcgggggagactggccagccggtctaacaacttatcgatcaatacaggtgggtccaggcgctgcagcacgctgggatctgtgcatagatcaggccgtagtcttcatcgaggatgccattcaatataggtctattaatcacagagtggacgcgtcgtctatgtggttgtacagaaggtactacagtaatgtctgccagagaacactgtccttcactattttcttgatcttgtttttggctttcattgagacaccatcatccctgacaagtaccgcagatgttaggtaccgggccgctccttgggaacctccctgtggcctaactgaatctgtggaagtcttgtgtctactcgtctttgcagccgacttgagcgtcaaagggtatctgttcgggtgggcccattttcagaagaatctgtggctcctgggatacctcgtcgtgcttgtggtgagcctggtggactggaccgtttccctttctcttgtttgtcatgagcccctgcgcatccggcggttactgcgccctttctttctcttacagaactccagcatgatgaaaaagacactgaagtgcatacgatggtccctccccgaaatggcctccgtcggtctgttgctggctatacatctgtgtctgtttaccatgttcggcatgctcctgttcgccgggggaaaacaggacgacggacaggaccgcgagcggcttacctactttcaaaatcttcccgaatctttaacaagcctgctcgtactcctcaccaccgccaataatcccgatgtgatgatcccagcttactccaaaaaccgcgcttacgctattttctttatcgtgttcacagtgataggaagtctgttcctaatgaaccttttgacagccatcatttactctcagtttcgtgggtatctcatgaagtcccttcagacaagtcttttccgcaggaggctaggtactcgggctgcgttcgaagtattgtcatccatggtcggggagggcggtgccttcccccaggccgtgggggtgaaaccacagaaccttctgcaagtcctgcagaaagtgcagcttgattcttctcataagcaagccatgatggaaaaagtgcgctcttatggttctgtcctgctgtctgctgaggagttccagaagctgttcaatgagctggaccggtccgtcgttaaggaacatccgcctcgcccagagtatcaaagcccgtttctccaatcagcccagtttttattcgggcattactactttgactatctcgggaatttgattgccctggctaacctcgtctctatctgtgtgttcctggttctcgatgccgatgttcttcctgctgaaagggatgatttcatcctcggaatcctaaactgtgtgtttattgtctattatctgctggagatgcttctgaaagtctttgcattaggtctcaggggatatcttagttacccctctaatgtcttcgacggacttttgactgttgtgctgctcgtgctcgaaattagcacattggccgtttatcgcctaccacaccctgggtggagacctgagatggtcggattgttgtccctctgggacatgacccggatgttgaacatgctgatcgttttccgcttccttaggattatcccctccatgaagctgatggcagtggtagcttccaccgtgcttggattagtgcagaacatgcgcgccttcggtggaatactcgtggtggtgtactacgtcttcgccatcatcggaatcaacctgttccggggcgtgatcgtggctctcccaggtaatagctcactcgcgcccgccaacggatcggctccgtgcggctcgttcgagcagctggagtactgggccaacaactttgacgattttgcggcagctctggtgacactgtggaacctcatggtcgtcaacaactggcaggtgttcctggatgcgtacaggcggtactcgggcccttggtccaaaatatactttgtgctgtggtggttagtcagttcggtcatatgggttaacctgtttctggcactcattctggagaactttctccataagtgggatccaaggtcacacttgcagcctctggcagggactcctgaggccacctatcagatgacagtcgaattgctttttcgggatatcctggaagaaccgggcgaggacgaactcacagaaagactgtcacaacatccccacctgtggctgtgtcgctag

SEQ ID NO: 238114 - DNA, 2259 bp, Artificial Sequence
  derived and/or modified sequence
atggccgagccccaggccgagagcgagcccctgctgggcggggcccggggcggcggcggggactggccagctggcctgaccacctaccgcagcatccaggtgggccctggagctgctgcccgctgggacctgtgcatcgaccaggccgtggtgttcattgaagatgccatccagtaccgcagcatcaaccaccgggtggatgccagctccatgtggctgtaccgccgctactacagcaatgtgtgccagaggaccctgtccttcaccatcttcctgatcctcttcctggccttcatcgagacccccagcagcctgaccagcacagcagatgtgcgctacagagctgccccctgggagcccccctgtggcctgacagaatctgtggaggtgctgtgcctgctggtgtttgctgctgacctgtctgtgaagggctacctgtttggctgggcccacttccagaagaacctgtggctgctgggctacctggtggtgctggtggtgtccctggtggactggacagtgtccctgagcctggtgtgccacgagcccctgcgcatccggcggctgctgcggcccttcttcctgctgcagaacagctccatgatgaagaagaccctgaagtgcatccgctggagcctgcctgagatggcctctgtgggcctgctgctggccatccacctgtgcctcttcaccatgtttggcatgctgctgtttgctgggggcaagcaggatgatggccaggaccgggagcggctgacctacttccagaacctgcctgagagcctgaccagcctgctggtgctgctgaccacagccaacaacccagatgtgatgatcccagcctacagcaagaacagagcctatgccatcttcttcatcgtgttcaccgtcatcggcagcctcttcctgatgaacctgctgacagccatcatctacagccagttccggggctacctgatgaagagcctgcagaccagcctcttcagaagaaggctgggcacccgggccgcctttgaggtgctgagctccatggtgggggagggcggggccttcccccaggccgtgggcgtgaagccccagaacctgctgcaggtgctgcagaaggtgcagctggacagcagccacaagcaggccatgatggagaaggtgcgctcctatggctctgtgctgctgtctgctgaggagttccagaagctgttcaatgagctggacagatctgtggtgaaggagcacccccccaggcctgagtaccagagccccttcctgcagagcgcccagttcctgtttggccactactactttgactacctgggcaacctgattgccctggccaacctggtgtccatctgtgtgttcctggtgctggatgctgatgtgctgcctgctgagagagatgacttcatcctgggcatcctgaactgtgtgttcatcgtgtactacctgctggagatgctgctgaaggtgtttgccctgggcctgcggggctacctgagctaccccagcaatgtgtttgatggcctgctgactgtggtgctgctggtgctggagatcagcaccctggccgtgtaccgcctgccccaccctggctggaggcctgagatggtgggcctgctgagcctgtgggacatgaccaggatgctgaacatgctgattgtgttccgcttcctgcgcatcatccccagcatgaagctgatggctgtggtggccagcacagtgctgggcctggtgcagaacatgagggccttcggcggcatcctggtggtggtgtactacgtgtttgccatcatcggcatcaacctcttccggggcgtgattgtggccctgcccggcaacagcagcctggccccagccaacggcagcgccccctgtggcagctttgagcagctggagtactgggccaacaactttgatgactttgctgctgccctggtgaccctgtggaacctgatggtggtgaacaactggcaggtgttcctggatgcctaccgccgctacagcggcccctggagcaagatctactttgtgctgtggtggctggtgagcagcgtcatctgggtgaacctcttcctggccctgatcctggagaacttcctgcacaagtgggaccccaggagccacctgcagcccctggccggcaccccagaggccacctaccagatgacagtggagctgctcttccgggacatcctggaggagcctggagaagatgagctgacagagcggctgagccagcacccccacctgtggctgtgcaggtag

SEQ ID NO: 238115 - DNA, 2259 bp, Artificial Sequence
  derived and/or modified sequence
atggccgagccccaggccgagagcgagcccctgctgggcggcgcccggggcggcggcggcgattggcccgccggcctgacgacttaccggagcatacaggtcggccctggggctgcggcacgatgggacctgtgcatcgatcaagccgtggtctttatcgaggacgcaattcagtatcgctccatcaaccacagagtggacgcctcatccatgtggctgtaccggagatactacagcaatgtgtgtcagcgaacactgtctttcacaattttcttaatcctgttcctcgcattcatagagactcccagctcactcacgtccacggcagatgtgcgataccgcgctgccccttgggagccaccgtgtggcctgacggaaagtgtggaggtcttgtgtctgctcgtgttcgccgccgacctttcagtgaagggatatctcttcggatgggctcatttccaaaagaacttatggctactggggtacctggtggtgctcgttgttagtctcgtcgattggacagtctctctgagtctggtttgtcatgaacctttgaggataaggcgtctccttaggcccttcttcctcctccaaaatagttcaatgatgaagaaaacgctcaagtgcatcagatggtcactgccagaaatggcgtcagtgggcctgctgctggccatacacctgtgtttatttactatgtttggtatgcttttgttcgctggtggaaaacaggatgatggccaggaccgtgaaaggttaacttatttccagaatctgcccgagtccctgacaagtctgctggtcctgctgacgacagctaacaatccagacgtcatgattcctgcctactccaagaacagagcttacgcgatcttttttattgtgtttactgtgatagggagccttttcctgatgaatcttctaacagctattatttactcacagttccggggctacctgatgaaaagtttgcaaacgagcctttttagaagacgactgggcacccgcgccgccttcgaagtcctaagctctatggtcggcgaaggcggtgcatttccacaggcggttggcgtaaagcctcagaacctccttcaagtgctgcagaaagtccagctcgacagctcccataagcaggcaatgatggagaaagttcgctcgtatgggagcgtcctgttgtcagccgaggagtttcagaagctcttcaatgagctggatcgctccgttgtaaaagagcatccccccaggccagagtatcagtcacccttcctgcagtccgctcagttcctattcgggcactattactttgactaccttggaaacctgattgcacttgctaacttagtgtccatttgtgtttttcttgttcttgacgctgacgtcttacccgctgagcgcgacgatttcatcctgggaatcctaaactgcgttttcattgtgtactatttgctggagatgctgctgaaggtttttgccctagggctcaggggatatctctcctaccctagcaacgtgtttgatggattgctgaccgtggtgctgttggtgttggagatctcaactctggcagtgtacagactgccccacccagggtggaggcctgaaatggtcgggcttctctcattatgggacatgacaagaatgctgaacatgctgatcgtcttcagattcctgcgcatcataccgtctatgaagttgatggcagtcgtggcctctactgtcctaggactggtgcaaaacatgcgcgcatttggtggcatcttagtcgtggtttattatgtgttcgccataatagggataaatctgtttcgaggggttatcgtcgctctgcctggtaattcttcgctcgctcccgccaacggttccgcgccttgtggttccttcgagcagctggagtactgggccaacaattttgacgattttgctgccgctctggtgactttgtggaatctgatggtggtgaataattggcaagtctttctggatgcatatagaaggtactcaggtccatggtcaaagatctatttcgtgctctggtggttggtctcgtccgtcatatgggtcaacctgttcttggccctgatcctggaaaacttcctgcacaagtgggaccctagaagccaccttcaaccactggctggcactccagaagccacctatcagatgaccgtggaattactcttcagggacatattggaagagccaggggaagacgagctgactgagcggctctcccaacatccacatctgtggctatgccgatag

SEQ ID NO: 238116 - DNA, 2259 bp, Artificial Sequence
  derived and/or modified sequence
atggccgaaccgcaggcagaatcagagccactcctgggaggtgctcggggaggcggtggggactggcccgctggtcttaccacgtacagatcgatacaggtgggcccaggtgccgctgcaagatgggatctttgtatcgaccaggccgtggtgtttattgaggacgcaatccagtaccgttccatcaatcatagagtcgacgcctcttcaatgtggctgtataggcgatactattcgaatgtgtgtcaacgaaccttgtcctttacgatcttccttatattgtttctggccttcatcgaaactccaagctccttgacatcgaccgctgacgtaaggtatagggctgcaccctgggagccaccatgcgggctgaccgagtcagttgaggttctgtgtctcctggtgtttgctgcagatctgtccgtgaagggctacttgttcgggtgggcccatttccaaaaaaacctttggttactcggatacctggttgtcttggtggtgtcgcttgtcgactggaccgtaagcctgagcctggtctgccacgaacctcttcggatcagacgtctattgagacctttttttcttctgcagaattcttcgatgatgaaaaagacattgaagtgtattcgttggtccttaccagagatggcaagcgtgggtttactgcttgccatccatctctgcctcttcacaatgttcggaatgctgttattcgccggaggaaagcaggacgatgggcaagaccgcgaacgactcacctacttccagaacttaccggaatccctaacctctctgctggtgctgttaactaccgctaataacccagatgtgatgatcccagcgtactccaagaaccgcgcttacgccattttctttatcgtgttcaccgtcataggctcccttttccttatgaaccttttgacagccatcatctacagtcaattccgcggatatcttatgaagtcacttcagacgtcactatttcgtcggagactgggcaccagggcggcttttgaggtattaagttcgatggtcggggaaggcggtgcctttcctcaggcagtgggggtgaagccacagaatctgctccaggtcttgcaaaaggtacagttggactcttcccacaaacaggccatgatggaaaaggtaaggtcatatggctctgtgctactcagtgccgaggagttccagaaactgttcaacgagttagatagatccgttgtcaaggaacacccgccacgaccggagtatcagtccccctttctgcagtcagctcagtttctgtttggccattattacttcgattacctgggtaacctgattgctcttgcaaacctagtctctatttgcgtgtttcttgtgcttgatgccgatgtcttgcccgcagaacgagatgactttattcttgggattcttaattgtgtgtttatagtatactacctgctggaaatgctgctgaaggtgttcgcgctcgggttaagaggctacctctcgtaccccagcaacgtgttcgatggcctgctgactgtcgtgctgctcgtgcttgagattagcaccctagctgtgtaccgcctgccccaccctggctggaggcctgaaatggtaggcctgctaagtctctgggacatgacccgcatgctgaacatgctgatcgtcttccgatttctccgcattatcccctcaatgaaactgatggcagtggtggccagcaccgttctcgggctcgtgcaaaatatgagggcattcggtggaatactggtggtggtgtactacgtcttcgctatcattggtatcaacctattccgaggcgtgatcgtcgccctacccggaaattcaagtttagccccagccaacgggtccgccccatgtgggtcattcgaacagctggagtactgggccaataactttgacgacttcgccgcagctctcgtaactctctggaacttaatggtggtcaataattggcaagttttcctcgatgcctaccgaaggtatagcggcccttggagtaaaatttacttcgtcctgtggtggctcgtctccagcgttatctgggtgaacctgttcctggccctgattctggagaactttttacataaatgggacccgagaagtcatctgcagccactcgcgggtaccccggaagccacctaccaaatgaccgtggaactgttatttagggacattcttgaggaacctggcgaggacgagctcaccgaacggctctcccagcacccccacctgtggctctgtcgatag

SEQ ID NO: 238117 - DNA, 2931 bp, Artificial Sequence
  derived and/or modified sequence
agcaaaaacgccagggacggggtctccgcgcctgcgcagtgaagctgggcgccttcggggcttgagcttctgagggtcgggtccagcgcgtgggctgctggatggcggaaccccaggcggagtcggagcccctgctgggcggggcccgcggcggtggcggcgactggccggcggggctgaccacttaccgcagcatccaagtcggccctggtgccgcggccaggtgggacctctgcattgatcaggctgtggtcttcatcgaagatgctattcagtaccgctccatcaaccaccgggtggatgccagctcgatgtggctttaccgacggtattactcgaacgtatgccaacggactttgagcttcaccatcttcttgatcctgtttttggcttttatcgagaccccatcctcactcaccagcacggcggacgtgcgctaccgcgctgctccctgggagccgccctgcggcctgaccgagagtgtcgaggtgctctgcctgctggtctttgcggccgacctctctgtgaagggttacctgttcgggtgggcccatttccagaaaaacctttggctgctgggctacctcgtggtgctggtggtgtctctggtggactggaccgtgtccctgagtctcgtgtgtcatgagcccctgcggatccgccggcttctccgtcccttcttcctgctgcagaactcctctatgatgaagaagaccttgaaatgcatccgctggtcgctgccggaaatggccagcgtcgggctgctgctggccatccacctgtgcctcttcaccatgttcggaatgctgctgttcgctggtgggaagcaggatgatgggcaggacagggagaggctgacctacttccagaacctgcctgagtctctgacttccctcctggtgctgctgaccacggccaacaaccccgatgtgatgattcctgcgtattccaagaaccgggcctatgccatcttcttcatagtcttcactgtgataggaagcctgtttctgatgaacctgctgacagccatcatctacagtcagttccggggctacctgatgaaatctctccagacctcgctgtttcggaggcggctgggaacccgggctgcctttgaagtcctatcctccatggtgggggagggaggagccttccctcaggcagttggggtgaagccccagaacttgctgcaggtgcttcagaaggtccagctggacagctcccacaaacaggccatgatggagaaggtgcgttcctatggcagtgttctgctctcagctgaggagtttcagaagctcttcaacgagcttgacagaagtgtggttaaagagcacccgccgaggcccgagtaccagtctccgtttctgcagagcgcccagttcctcttcggccactactactttgactacctggggaacctcatcgccctggcaaacctggtgtccatttgcgtgttcctggtgctggatgcagatgtgctgcctgctgagcgtgatgacttcatcctggggattctcaactgcgtcttcattgtgtactacctgttggagatgctgctcaaggtctttgccctgggcctgcgagggtacctgtcctaccccagcaacgtgtttgacgggctcctcaccgttgtcctgctggttttggagatctcaactctggctgtgtaccgattgccacacccaggctggaggccggagatggtgggcctgctgtcgctgtgggacatgacccgcatgctgaacatgctcatcgtgttccgcttcctgcgtatcatccccagcatgaagctgatggccgtggtggccagtaccgtcctgggcctggtgcagaacatgcgtgcgtttggcgggatcctggtggtggtctactacgtatttgccatcattgggatcaacttgtttagaggcgtcattgtggctcttcctggaaacagcagcctggcccctgccaatggctcggcgccctgtgggagcttcgagcagctggagtactgggccaacaacttcgatgactttgcggctgccctggtcactctgtggaacttgatggtggtgaacaactggcaggtgtttctggatgcatatcggcgctactcaggcccgtggtccaagatctattttgtattgtggtggctggtgtcgtctgtcatctgggtcaacctgtttctggccctgattctggagaacttccttcacaagtgggacccccgcagccacctgcagccccttgctgggaccccagaggccacctaccagatgactgtggagctcctgttcagggatattctggaggagcccggggaggatgagctcacagagaggctgagccagcacccgcacctgtggctgtgcaggtgacgtccgggctgccgtcccagcaggggcggcaggagagagaggctggcctacacaggtgcccgtcatggaagaggcggccatgctgtggccagccaggcaggaagagacctttcctctgacggaccactaagctggggacaggaaccaagtcctttgcgtgtggcccaacaaccatctacagaacagctgctggtgcttcagggaggcgccgtgccctccgctttcttttatagctgcttcagtgagaattccctcgtcgactccacagggacctttcagacaaaaatgcaagaagcagcggcctcccctgtcccctgcagcttccgtggtgcctttgctgccggcagcccttggggaccacaggcctgaccagggcctgcacaggttaaccgtcagacttccggggcattcaggtggggatgctggtggtttgacatggagagaaccttgactgtgttttattatttcatggcttgtatgagtgtgactgggtgtgtttctttagggttctgattgccagttattttcatcaataagtcttgcaaagaatgggattgtcattcttcacttc

SEQ ID NO: 238118 - protein, 409 aa, Artificial Sequence
  derived and/or modified sequence
MEGESTSAVLSGFVLGALAFQHLNTDSDTEGFLLGEVKGEAKNSITDSQMDDVEVVYTIDIQKYIPCYQLFSFYNSSGEVNEQALKKILSNVKKNVVGWYKFRRHSDQIMTFRERLLHKNLQEHFSNQDLVFLLLTPSIITESCSTHRLEHSLYKPQKGLFHRVPLVVANLGMSEQLGYKTVSGSCMSTGFSRAVQTHSSKFFEEDGSLKEVHKINEMYASLQEELKSICKKVEDSEQAVDKLVKDVNRLKREIEKRRGAQIQAAREKNIQKDPQENIFLCQALRTFFPNSEFLHSCVMSLKNRHVSKSSCNYNHHLDVVDNLTLMVEHTDIPEASPASTPQIIKHKALDLDDRWQFKRSRLLDTQDKRSKADTGSSNQDKASKMSSPETDEEIEKMKGFGEYSRSPTF

SEQ ID NO: 238119 - protein, 360 aa, Artificial Sequence
  derived and/or modified sequence
MDDVEVVYTIDIQKYIPCYQLFSFYNSSGEVNEQALKKILSNVKKNVVGWYKFRRHSDQIMTFRERLLHKNLQEHFSNQDLVFLLLTPSIITESCSTHRLEHSLYKPQKGLFHRVPLVVANLGMSEQLGYKTVSGSCMSTGFSRAVQTHSSKFFEEDGSLKEVHKINEMYASLQEELKSICKKVEDSEQAVDKLVKDVNRLKREIEKRRGAQIQAAREKNIQKDPQENIFLCQALRTFFPNSEFLHSCVMSLKNRHVSKSSCNYNHHLDVVDNLTLMVEHTDIPEASPASTPQIIKHKALDLDDRWQFKRSRLLDTQDKRSKADTGSSNQDKASKMSSPETDEEIEKMKGFGEYSRSPTF

SEQ ID NO: 238120 - protein, 110 aa, Artificial Sequence
  derived and/or modified sequence
MDDVEVVYTIDIQKYIPCYQLFSFYNSSGEVNEQALKKILSNVKKNVVGWYKFRRHSDQIMTFRERLLHKNLQEHFSNQDLVFLLLTPSIITESCSTHRLEHSLYKPQKG

SEQ ID NO: 238121 - DNA, 1230 bp, Artificial Sequence
  derived and/or modified sequence
atggagggtgaaagtacctccgcagtgctgtctgggtttgttttgggtgcccttgctttccagcacctgaacactgactctgataccgagggcttcctcctgggggaggttaagggcgaggcgaaaaactcgataaccgattcccaaatggatgacgtggaagtggtttacaccatcgatattcagaaatacatcccttgttaccagctattcagcttttataatagctctggagaggtgaatgaacaggctctgaagaagatcttgagtaacgtcaagaagaatgtggtgggctggtataaattccgacgacactctgatcagatcatgacctttagggaacggcttcttcacaaaaatctccaggaacacttcagtaaccaagacctggtgtttctgctgctcacaccttctatcattactgagagctgttcaacccacaggctcgaacacagcttgtacaagcctcagaagggactgtttcatcgggtgccgctggtcgtagctaatctgggaatgtcagaacaactgggctacaagaccgtttccggtagctgcatgagtaccggattctcccgagctgtgcagacacattctagcaaattctttgaagaagatggctctctcaaggaggtgcataagatcaacgaaatgtacgcgagcctgcaggaggagctgaagagtatttgtaagaaagttgaagattctgagcaagctgtagataaactagtgaaggatgtgaataggctgaaacgggagattgaaaagagaaggggagcccagatacaggctgcccgggaaaagaacatccaaaaggacccacaggaaaacatctttctctgccaagccctgagaaccttttttcccaacagcgaatttctgcattcctgtgtcatgagcttgaagaacagacatgtgtctaaatcttcttgcaactataatcaccaccttgatgttgtagataatttgacactcatggtggaacacactgatatccccgaagcttcacctgcctcaaccccacagatcatcaaacataaagctctggacctcgacgaccgctggcaatttaaacggtctaggctgctggatacccaggacaagcgttcgaaagccgatacggggtcatctaatcaggacaaagcgagcaagatgagttcccctgaaacggacgaggagatagagaaaatgaaaggatttggtgagtactctcgctctccgacattttag

SEQ ID NO: 238122 - DNA, 1230 bp, Artificial Sequence
  derived and/or modified sequence
atggagggggagagcaccagcgctgtgctgagcggctttgtgctgggcgccctggccttccagcacctgaacacagacagcgacacagagggcttcctgctgggggaggtgaagggggaggccaagaacagcatcacagacagccagatggatgatgtggaggtggtgtacaccatcgacatccagaagtacatcccctgctaccagctgttctccttctacaacagcagtggagaggtgaatgagcaggccctgaagaagatcctgagcaatgtgaagaagaatgtggtgggctggtacaagttcagaagacacagcgaccagatcatgaccttccgggagcggctgctgcacaagaacctgcaggagcacttcagcaaccaggacctggtgttcctgctgctgacccccagcatcatcacagagagctgcagcacccaccggctggagcacagcctgtacaagccccagaagggcctcttccaccgggtgcccctggtggtggccaacctgggcatgtctgagcagctgggctacaagacagtgtctggcagctgcatgagcacaggcttcagcagagctgtgcagacccacagcagcaagttctttgaagaagatggcagcctgaaggaggtgcacaagatcaatgagatgtatgccagcctgcaggaggagctgaagagcatctgcaagaaggtggaggacagcgagcaggccgtggacaagctggtgaaggatgtgaaccggctgaagcgggagattgagaagagaagaggagcccagatccaggccgcccgggagaagaacatccagaaggacccccaggagaacatcttcctgtgccaggccctgcggaccttcttccccaacagcgagttcctgcacagctgtgtgatgagcctgaagaacagacatgtgtccaagagcagctgcaactacaaccaccacctggatgtggtggacaacctgaccctgatggtggagcacacagacatccctgaggccagccctgccagcaccccccagatcatcaagcacaaggccctggacctggatgaccgctggcagttcaagaggagccggctgctggacacccaggacaagaggagcaaggctgacaccggcagcagcaaccaggacaaggccagcaagatgagcagccctgagacagatgaggagattgagaagatgaagggctttggagagtacagccgcagccccaccttctag

SEQ ID NO: 238123 - DNA, 1230 bp, Artificial Sequence
  derived and/or modified sequence
atggagggcgagagcaccagcgccgtgctgagcggcttcgtgctgggagcactggctttccagcatctaaacacggactctgacactgagggattcttactgggtgaagtcaagggagaagctaaaaactccatcactgattcccaaatggacgatgtggaggtagtttataccatagatatacaaaagtatattccatgctaccagctgttttcattttataactcttcaggtgaggtgaatgagcaggcccttaagaagattctttccaacgtgaagaagaatgtcgtgggttggtataagtttcgaagacacagtgatcagatcatgaccttccgggagcggctgttgcacaaaaatcttcaggagcacttctccaaccaggacctcgtcttcctgcttctgactccttcaatcataactgagtcctgctctactcaccgtctggagcactccctctataagccgcagaagggcctgtttcaccgggttccgttggtggtggccaatctcggcatgagtgagcagttaggatataagaccgtatccggtagttgcatgagcacgggcttctctcgcgctgttcagactcactctagtaaattcttcgaagaggatggcagcctgaaggaggttcacaaaataaacgagatgtacgcctcgctccaggaagagctcaagtctatctgtaagaaagtggaggatagtgaacaggcggtagacaagctggtcaaggatgttaatcgattgaagagagagatcgaaaaaagacggggagctcaaatacaggcggcccgtgagaaaaacatccaaaaagatccccaggaaaatatcttcctatgtcaggccctgagaactttttttcctaattctgagtttctccatagctgtgtgatgagcctaaaaaaccggcacgtgagtaagtcatcttgcaattataatcatcacctagatgtggtggacaacctgactctgatggtggaacacacagatattcctgaagcgtcacccgcttccaccccgcagataatcaagcacaaagccttggatctggacgaccggtggcagttcaagagatccagactgttagatactcaggacaaaaggagtaaggccgataccggctcctcaaaccaggacaaggcaagcaagatgtcatctcctgagaccgacgaagagattgaaaagatgaaaggcttcggtgagtactccagaagtcctactttttag

SEQ ID NO: 238124 - DNA, 1230 bp, Artificial Sequence
  derived and/or modified sequence
atggaaggtgagagtacatctgcagtactgtcaggcttcgtgcttggcgcactggcctttcaacatctgaataccgactctgacaccgagggatttctgctcggcgaggttaagggagaagccaaaaactccattacagactcccagatggatgatgtcgaagtggtatacacgatcgatatccagaagtatatcccatgctaccagctgttcagcttttacaacagctccggggaggtcaacgaacaggcacttaagaagatactgtcaaacgtaaagaagaacgtggtaggatggtacaaattccgtcgacactctgatcagatcatgaccttcagagagcggctgctacataagaacctacaagagcatttttcaaatcaggacttggttttccttctgctaacccctagcattatcaccgagtcatgttcaacgcatagacttgaacactctctctacaagccacagaaggggctgttccaccgtgtaccactggtagtggccaatttaggaatgtcggagcaactggggtacaagacagtttccggatcttgcatgtcaacgggcttcagccgggcagtgcagacccactccagcaaattcttcgaggaggatgggagcctgaaagaagtccacaagatcaatgagatgtatgcgagcctccaggaggagcttaagtccatttgcaagaaagtagaggactcagagcaggccgtggacaagctcgtgaaagatgtcaataggctgaagcgtgagattgagaaacgcagaggcgctcaaatccaggcggctagagaaaaaaacattcagaaggacccacaggagaacatcttcctgtgccaagccctgcgtaccttcttcccgaactcagaatttctccactcatgtgtcatgtcccttaagaatagacacgtcagcaaatcttcctgtaattataatcatcacctggatgttgtggacaacctcactttgatggtggagcacacagacataccggaggcttcacctgcgtcaactccccagatcatcaaacacaaggctcttgacctagacgaccggtggcagttcaagagaagccggctgttggacacacaggataagcgctctaaagccgatactggatcatcaaaccaggacaaagcctccaagatgtcgtccccggaaactgatgaggagatcgaaaaaatgaagggatttggggaatactcacggtcacccaccttttag

SEQ ID NO: 238125 - DNA, 2869 bp, Artificial Sequence
  derived and/or modified sequence
gccggcgcaggccccgcctcctcgctgggccccgcctcgctgccaccacagggtcttgcctccgcgcgccccgccctcgtcctcttgtgtagcctgaggcggcggtagcatggagggggagagtacgtcggcggtgctctcgggctttgtgctcggcgcactcgctttccagcacctcaacacggactcggacacggaaggttttcttcttggggaagtaaaaggtgaagccaagaacagcattactgattcccaaatggatgatgttgaagttgtttatacaattgacattcagaaatatattccatgctatcagctttttagcttttataattcttcaggcgaagtaaatgagcaagcactgaagaaaatattatcaaatgtcaaaaagaatgtggtaggttggtacaaattccgtcgtcattcagatcagatcatgacgtttagagagaggctgcttcacaaaaacttgcaggagcatttttcaaaccaagaccttgtttttctgctattaacaccaagtataataacagaaagctgctctactcatcgactggaacattccttatataaacctcaaaaaggactttttcacagggtacctttagtggttgccaatctgggcatgtctgaacaactgggttataaaactgtatcaggttcctgtatgtccactggttttagccgagcagtacaaacacacagctctaaattttttgaagaagatggatccttaaaggaggtacataagataaatgaaatgtatgcttcattacaagaggaattaaagagtatatgcaaaaaagtggaagacagtgaacaagcagtagataaactagtaaaggatgtaaacagattaaaacgagaaattgagaaaaggagaggagcacagattcaggcagcaagagagaagaacatccaaaaagaccctcaggagaacatttttctttgtcaggcattacggaccttttttccaaattctgaatttcttcattcatgtgttatgtctttaaaaaatagacatgtttctaaaagtagctgtaactacaaccaccatctcgatgtagtagacaatctgaccttaatggtagaacacactgacattcctgaagctagtccagctagtacaccacaaatcattaagcataaagccttagacttagatgacagatggcaattcaagagatctcggttgttagatacacaagacaaacgatctaaagcagatactggtagtagtaaccaagataaagcatccaaaatgagcagcccagaaacagatgaagaaattgaaaagatgaagggttttggtgaatattcacggtctcctacattttgatccttttaaccttacaaggagatttttttatttggctgatgggtaaagccaaacatttctattgtttttactatgttgagctacttgcagtaagttcatttgtttttactatgttcacctgtttgcagtaatacacagataactcttagtgcatttacttcacaaagtactttttcaaacatcagatgcttttatttccaaacctttttttcacctttcactaagttgttgaggggaaggcttacacagacacattctttagaattggaaaagtgagaccaggcacagtggctcacacctgtaatcccagcacttagggaagacaagtcaggaggattgattgaagttaggagttagagaccagcctgggcaacgtattgagaccatgtctattaaaaaataaaatggaaaagcaagaatagccttattttcaaaatatggaaagaaatttatatgaaaatttatctgagtcattaaaattctccttaagtgatacttttttagaagtacattatggctagagttgccagataaaatgctggatatcatgcaataaatttgcaaaacatcatctaaaatttaaatttgtcctacatttgtacttgctaaatctggcagccttaattattacacaactataacacaacacaaacagtaatctctcccctagtttagagtcctttgcatgaaatttagcaaatctatcattttgaatacagtacaagcctggtaatccagtgtatttgggataggccagtggaactcagaactgatacatatatacatgtatgtctatcatattcaatgtctattaggtgtaaatcatctcttcatgtaaaagacactactggtttgagggtagactcgtctaggaatattttgtccttctgtgacagcaccactatccatcccaatgtaacatttctacaaagggaagatatcttaaccaggcatacttatatttgctagttggaaaatcattctgaacagttttaattccattctattgaatggattattgtatgagctatttggggatcagatataaatgacaatcacacagaaccacttttattcaacatagataaaatgtgatgagtgttaacattttaaataagcaatctgcttaatggacattggtatgaaggggaagtgtcattctttacctcactcctcaaacacttttctatccaaaggttggtttgagtcagtattggcatcatacaaccacttactgtaaaataagtttattagtggtaacgtgatagaatttattcccgatatctgatgttacaaactttagggtccttgagatatgcaggatccttgtatgtaactggcataaaccctgtaaagagataattaaagttcttgacaaaacataatgagcaaaatttcagctagctcaattcagttgttgaggtattctttcttacccattatttgagctctcttaattgcttttgtgatttctttctgtttcttcccacaaagacctgtaaaataaaaagctttcttattcataaaaaa

SEQ ID NO: 238126 - DNA, 1869 bp, Artificial Sequence
  derived and/or modified sequence
attagtattctgtaagtttcagtgagtgaagggtgctaaaatgcagcttgaaaaccaaaaccgtggcatatccactgtggcatcgtaatgttgctactcaactcttttattcttgtaatcattgcttgtcttaaaatgaccctgtcaaccgtgttcattttgatagctttgcatgtttgtgacaggtcgctcagcaggcgcaggccaccaaaagcaattcgcagccctctgcagtggtaccgacatgcagcggccttccgggagaggaaggttttcttcttggggaagtaaaaggtgaagccaagaacagcattactgattcccaaatggatgatgttgaagttgtttatacaattgacattcagaaatatattccatgctatcagctttttagcttttataattcttcaggcgaagtaaatgagcaagcactgaagaaaatattatcaaatgtcaaaaagaatgtggtaggttggtacaaattccgtcgtcattcagatcagatcatgacgtttagagagaggctgcttcacaaaaacttgcaggagcatttttcaaaccaagaccttgtttttctgctattaacaccaagtataataacagaaagctgctctactcatcgactggaacattccttatataaacctcaaaaaggactttttcacagggtacctttagtggttgccaatctgggcatgtctgaacaactgggttataaaactgtatcaggttcctgtatgtccactggttttagccgagcagtacaaacacacagctctaaattttttgaagaagatggatccttaaaggaggtacataagataaatgaaatgtatgcttcattacaagaggaattaaagagtatatgcaaaaaagtggaagacagtgaacaagcagtagataaactagtaaaggatgtaaacagattaaaacgagaaattgagaaaaggagaggagcacagattcaggcagcaagagagaagaacatccaaaaagaccctcaggagaacatttttctttgtcaggcattacggaccttttttccaaattctgaatttcttcattcatgtgttatgtctttaaaaaatagacatgtttctaaaagtagctgtaactacaaccaccatctcgatgtagtagacaatctgaccttaatggtagaacacactgacattcctgaagctagtccagctagtacaccacaaatcattaagcataaagccttagacttagatgacagatggcaattcaagagatctcggttgttagatacacaagacaaacgatctaaagcagatactggtagtagtaaccaagataaagcatccaaaatgagcagcccagaaacagatgaagaaattgaaaagatgaagggttttggtgaatattcacggtctcctacattttgatccttttaaccttacaaggagatttttttatttggctgatgggtaaagccaaacatttctattgtttttactatgttgagctacttgcagtaagttcatttgtttttactatgttcacctgtttgcagtaatacacagataactcttagtgcatttacttcacaaagtactttttcaaacatcagatgcttttatttccaaacctttttttcacctttcactaagttgttgaggggaaggcttacacagacacattctttagaattggaaaagtgagaccaggcacagtggctcacacctgtaatcccagcacttagggaagacaagtcaggaggattgattgaagttaggagttagagaccagcctgggcaacgtattgagaccatgtctattaaaaaataaaatggaaaagcaagaatagccttattttcaaaatatggaaagaaatttatatgaaaa

SEQ ID NO: 238127 - DNA, 682 bp, Artificial Sequence
  derived and/or modified sequence
gtcctcttgtgtagcctgaggcggcggtagcatggagggggagagtacgtcggcggtgctctcgggctttgtgctcggcgcactcgctttccagcacctcaacacggactcggacacggtcgggcgcggtggctcacgcctgtaattccagccctttgggaagccgaggcgggtgaatcacctgagcccacgagttcgagaccatcggggacaacgtagtgagacccggtctctacaaaatctaaacattacaaaattgctctttggcacaatcctaataaaggttggaattggaaggttttcttcttggggaagtaaaaggtgaagccaagaacagcattactgattcccaaatggatgatgttgaagttgtttatacaattgacattcagaaatatattccatgctatcagctttttagcttttataattcttcaggcgaagtaaatgagcaagcactgaagaaaatattatcaaatgtcaaaaagaatgtggtaggttggtacaaattccgtcgtcattcagatcagatcatgacgtttagagagaggctgcttcacaaaaacttgcaggagcatttttcaaaccaagaccttgtttttctgctattaacaccaagtataataacagaaagctgctctactcatcgactggaacattccttatataaacctcaaaaagg

SEQ ID NO: 238128 - DNA, 1230 bp, Artificial Sequence
  derived and/or modified sequence
atggagggcgagagcaccagcgccgtgctgagcggcttcgtgctgggcgccctggccttccagcacctgaacaccgacagcgacaccgagggcttcctgctgggcgaggtgaagggcgaggccaagaacagcatcaccgacagccagatggacgacgtggaggtggtgtacaccatcgacatccagaagtacatcccctgctaccagctgttcagcttctacaacagcagcggcgaggtgaacgagcaggccctgaagaagatcctgagcaacgtgaagaagaacgtggtgggctggtacaagttcagaagacacagcgaccagatcatgaccttcagagagagactgctgcacaagaacctgcaggagcacttcagcaaccaggacctggtgttcctgctgctgacccccagcatcatcaccgagagctgcagcacccacagactggagcacagcctgtacaagccccagaagggcctgttccacagagtgcccctggtggtggccaacctgggcatgagcgagcagctgggctacaagaccgtgagcggcagctgcatgagcaccggcttcagcagagccgtgcagacccacagcagcaagttcttcgaggaggacggcagcctgaaggaggtgcacaagatcaacgagatgtacgccagcctgcaggaggagctgaagagcatctgcaagaaggtggaggacagcgagcaggccgtggacaagctggtgaaggacgtgaacagactgaagagagagatcgagaagagaagaggcgcccagatccaggccgccagagagaagaacatccagaaggacccccaggagaacatcttcctgtgccaggccctgagaaccttcttccccaacagcgagttcctgcacagctgcgtgatgagcctgaagaacagacacgtgagcaagagcagctgcaactacaaccaccacctggacgtggtggacaacctgaccctgatggtggagcacaccgacatccccgaggccagccccgccagcaccccccagatcatcaagcacaaggccctggacctggacgacagatggcagttcaagagaagcagactgctggacacccaggacaagagaagcaaggccgacaccggcagcagcaaccaggacaaggccagcaagatgagcagccccgagaccgacgaggagatcgagaagatgaagggcttcggcgagtacagcagaagccccaccttctag

SEQ ID NO: 238129 - protein, 796 aa, Artificial Sequence
  derived and/or modified sequence
MEEEASRSAAATNPGSRLTRWPPPDKREGSAVDPGKRRSLAATPSSSLPCTLIALGLRHEKEANELMEDLFETFQDEMGFSNMEDDGPEEEERVAEPQANFNTPQALRFEELLANLLNEQHQIAKELFEQLKMKKPSAKQQKEVEKVKPQCKEVHQTLILDPAQRKRLQQQMQQHVQLLTQIHLLATCNPNLNPEASSTRICLKELGTFAQSSIALHHQYNPKFQTLFQPCNLMGAMQLIEDFSTHVSIDCSPHKTVKKTANEFPCLPKQVAWILATSKVFMYPELLPVCSLKAKNPQDKILFTKAEDNKYLLTCKTARQLTVRIKNLNMNRAPDNIIKFYKKTKQLPVLGKCCEEIQPHQWKPPIEREEHRLPFWLKASLPSIQEELRHMADGAREVGNMTGTTEINSDQGLEKDNSELGSETRYPLLLPKGVVLKLKPVADRFPKKAWRQKRSSVLKPLLIQPSPSLQPSFNPGKTPAQSTHSEAPPSKMVLRIPHPIQPATVLQTVPGVPPLGVSGGESFESPAALPAMPPEARTSFPLSESQTLLSSAPVPKVMMPSPASSMFRKPYVRRRPSKRRGARAFRCIKPAPVIHPASVIFTVPATTVKIVSLGGGCNMIQPVNAAVAQSPQTIPIATLLVNPTSFPCPLNQPLVASSVSPLIVSGNSVNLPIPSTPEDKAHMNVDIACAVADGENAFQGLEPKLEPQELSPLSATVFPKVEHSPGPPPVDKQCQEGLSENSAYRWTVVKTEEGRQALEPLPQGIQESLNNSSPGDLEEVVKMEPEDATEEISGFL

SEQ ID NO: 238130 - protein, 719 aa, Artificial Sequence
  derived and/or modified sequence
MGFSNMEDDGPEEEERVAEPQANFNTPQALRFEELLANLLNEQHQIAKELFEQLKMKKPSAKQQKEVEKVKPQCKEVHQTLILDPAQRKRLQQQMQQHVQLLTQIHLLATCNPNLNPEASSTRICLKELGTFAQSSIALHHQYNPKFQTLFQPCNLMGAMQLIEDFSTHVSIDCSPHKTVKKTANEFPCLPKQVAWILATSKVFMYPELLPVCSLKAKNPQDKILFTKAEDNKYLLTCKTARQLTVRIKNLNMNRAPDNIIKFYKKTKQLPVLGKCCEEIQPHQWKPPIEREEHRLPFWLKASLPSIQEELRHMADGAREVGNMTGTTEINSDQGLEKDNSELGSETRYPLLLPKGVVLKLKPVADRFPKKAWRQKRSSVLKPLLIQPSPSLQPSFNPGKTPAQSTHSEAPPSKMVLRIPHPIQPATVLQTVPGVPPLGVSGGESFESPAALPAMPPEARTSFPLSESQTLLSSAPVPKVMMPSPASSMFRKPYVRRRPSKRRGARAFRCIKPAPVIHPASVIFTVPATTVKIVSLGGGCNMIQPVNAAVAQSPQTIPIATLLVNPTSFPCPLNQPLVASSVSPLIVSGNSVNLPIPSTPEDKAHMNVDIACAVADGENAFQGLEPKLEPQELSPLSATVFPKVEHSPGPPPVDKQCQEGLSENSAYRWTVVKTEEGRQALEPLPQGIQESLNNSSPGDLEEVVKMEPEDATEEISGFL

SEQ ID NO: 238131 - protein, 730 aa, Artificial Sequence
  derived and/or modified sequence
MEDLFETFQDEMGFSNMEDDGPEEEERVAEPQANFNTPQALRFEELLANLLNEQHQIAKELFEQLKMKKPSAKQQKEVEKVKPQCKEVHQTLILDPAQRKRLQQQMQQHVQLLTQIHLLATCNPNLNPEASSTRICLKELGTFAQSSIALHHQYNPKFQTLFQPCNLMGAMQLIEDFSTHVSIDCSPHKTVKKTANEFPCLPKQVAWILATSKVFMYPELLPVCSLKAKNPQDKILFTKAEDNKYLLTCKTARQLTVRIKNLNMNRAPDNIIKFYKKTKQLPVLGKCCEEIQPHQWKPPIEREEHRLPFWLKASLPSIQEELRHMADGAREVGNMTGTTEINSDQGLEKDNSELGSETRYPLLLPKGVVLKLKPVADRFPKKAWRQKRSSVLKPLLIQPSPSLQPSFNPGKTPAQSTHSEAPPSKMVLRIPHPIQPATVLQTVPGVPPLGVSGGESFESPAALPAMPPEARTSFPLSESQTLLSSAPVPKVMMPSPASSMFRKPYVRRRPSKRRGARAFRCIKPAPVIHPASVIFTVPATTVKIVSLGGGCNMIQPVNAAVAQSPQTIPIATLLVNPTSFPCPLNQPLVASSVSPLIVSGNSVNLPIPSTPEDKAHMNVDIACAVADGENAFQGLEPKLEPQELSPLSATVFPKVEHSPGPPPVDKQCQEGLSENSAYRWTVVKTEEGRQALEPLPQGIQESLNNSSPGDLEEVVKMEPEDATEEISGFL

SEQ ID NO: 238132 - protein, 48 aa, Artificial Sequence
  derived and/or modified sequence
MEDLFETFQDEMGFSNMEDDGPEEEERVAEPQANFNTPQALRQLLLLM

SEQ ID NO: 238133 - protein, 206 aa, Artificial Sequence
  derived and/or modified sequence
MGFSNMEDDGPEEEERVAEPQANFNTPQALRFEELLANLLNEQHQIAKELFEQLKMKKPSAKQQKEVEKVKPQCKEVHQTLILDPAQRKRLQQQMQQHVQLLTQIHLLATCNPNLNPEASSTRICLKELGTFAQSSIALHHQYNPKFQTLFQPCNLMGAMQLIEDFSTHVSIDCSPHKTVKKTANEFPCLPKQVAWILATSKVFMY

SEQ ID NO: 238134 - protein, 194 aa, Artificial Sequence
  derived and/or modified sequence
MEDLFETFQDEMGFSNMEDDGPEEEERVAEPQANFNTPQALRFEELLANLLNEQHQIAKELFEQLKMKKPSAKQQKEVEKVKPQCKEVHQTLILDPAQRKRLQQQMQQHVQLLTQIHLLATCNPNLNPEASSTRICLKELGTFAQSSIALHHQYNPKFQTLFQPCNLMGAMQLIEDFSTHVSIDCSPHKTVKKT

SEQ ID NO: 238135 - protein, 596 aa, Artificial Sequence
  derived and/or modified sequence
MQQKELGTFAQSSIALHHQYNPKFQTLFQPCNLMGAMQLIEDFSTHVSIDCSPHKTVKKTANEFPCLPKQVAWILATSKVFMYPELLPVCSLKAKNPQDKILFTKAEDNKYLLTCKTARQLTVRIKNLNMNRAPDNIIKFYKKTKQLPVLGKCCEEIQPHQWKPPIEREEHRLPFWLKASLPSIQEELRHMADGAREVGNMTGTTEINSDQGLEKDNSELGSETRYPLLLPKGVVLKLKPVADRFPKKAWRQKRSSVLKPLLIQPSPSLQPSFNPGKTPAQSTHSEAPPSKMVLRIPHPIQPATVLQTVPGVPPLGVSGGESFESPAALPAMPPEARTSFPLSESQTLLSSAPVPKVMMPSPASSMFRKPYVRRRPSKRRGARAFRCIKPAPVIHPASVIFTVPATTVKIVSLGGGCNMIQPVNAAVAQSPQTIPIATLLVNPTSFPCPLNQPLVASSVSPLIVSGNSVNLPIPSTPEDKAHMNVDIACAVADGENAFQGLEPKLEPQELSPLSATVFPKVEHSPGPPPVDKQCQEGLSENSAYRWTVVKTEEGRQALEPLPQGIQESLNNSSPGDLEEVVKMEPEDATEEISGFL

SEQ ID NO: 238136 - DNA, 2391 bp, Artificial Sequence
  derived and/or modified sequence
atggaagaagaggcttcaagaagtgccgccgcgactaaccccggaagtaggctaacccggtggccccccccagacaaacgagagggatctgctgtggaccccgggaaaagacgcagcttggccgccacccctagctcgtctcttccctgtaccctgattgccctcggcttacggcatgagaaagaagctaacgaattaatggaggatttgtttgagacttttcaggacgagatgggtttttctaatatggaggatgacggaccagaagaggaggagagagtggccgagccacaggcaaattttaatacaccacaggcacttaggtttgaagagctactcgccaacttgctgaacgagcagcatcagatcgctaaagagctcttcgaacagctgaaaatgaaaaagccaagtgctaagcaacaaaaagaggtagagaaggtgaaaccccagtgcaaggaagtccaccaaacactgatcttagacccagcccagcggaagaggcttcagcagcaaatgcagcagcacgtacagctcctgactcagatccacttactcgcaacatgcaatccgaatctaaatccagaggccagcagcaccaggatctgcctgaaggaattaggcacatttgctcagagcagtatagcgctccaccaccagtacaaccccaagttccagaccttatttcagccctgtaaccttatgggcgccatgcagttgatcgaggacttttccacacacgtgtcaattgactgttcccctcacaagactgtgaaaaagacggctaacgaatttccttgcctgcccaagcaagtcgcctggatattggcgaccagcaaggtcttcatgtaccccgagctgttgccagtttgtagcttgaaggccaaaaacccccaagacaaaattctatttaccaaggctgaagataataagtacctcctgacttgcaagacagctcgccaactgacagtaaggatcaaaaatttgaacatgaaccgggccccagacaacataattaaattctataagaagactaaacagctgccagtgttggggaaatgctgcgaggaaattcaacctcaccagtggaagccccccatcgaaagggaggaacatagactcccattctggctgaaagctagcctgcccagtatccaagaagaattacgccacatggcggacggcgcaagggaggtcgggaacatgaccggcactacagaaattaattcggaccaggggctagagaaagataacagtgagctaggttcagagaccaggtacccgctcctcttgcccaagggagtggtgctcaaattgaaaccggtagccgatagattcccaaagaaggcttggaggcagaagcgttccagcgtgctgaaaccactgctgattcagcctagtccttcactgcaacctagtttcaaccccgggaagactcctgcccaatcgacccattccgaggccccaccatcaaagatggtgctgcgaattcctcacccaatccagccagccacagtcttgcagaccgttcccggagtcccacctttgggcgtatccggtggagaaagcttcgaaagtcccgcagccttaccagccatgccccccgaggccaggacctcgtttcccctctcagaatcacagacattattaagcagtgcccctgttcctaaggttatgatgccttctccagcatcttccatgttcaggaaaccttacgtgcggcggagaccgagtaaacgaagaggtgcccgcgcctttcggtgcataaagcccgcaccagtgatacatccagccagcgtgatcttcacagttccagcgaccacagtcaaaatcgttagcctcggcggcggctgcaacatgattcaaccggttaacgcagccgtggcccagtcaccccagactattcccatcgcaactctgctggtgaacccaacctccttcccttgcccattgaaccagcctttggtggcaagctcagtgtcaccactgatcgtttcggggaatagcgttaacttacccataccatccacgcctgaagacaaggcacatatgaacgtcgacatcgcttgcgccgttgccgacggcgaaaatgcctttcagggtctggagccaaagctggaacctcaggaattgtcccctctcagtgccaccgtgtttccgaaggttgaacattcccctggaccaccccctgtggacaagcagtgtcaagaggggttgtcagaaaacagcgcctaccgatggaccgtggtgaagaccgaggaaggacgacaggcactcgaaccccttcctcagggaatccaggaatccctgaataacagttcccccggggatctggaggaggtagtgaagatggaaccagaagacgccaccgaggagatcagtggatttctctag

SEQ ID NO: 238137 - DNA, 2391 bp, Artificial Sequence
  derived and/or modified sequence
atggaggaggaggccagccgctctgctgctgccaccaaccctggcagccggctgacccgctggcccccaccagacaagcgggagggcagcgctgtggaccccgggaagagaagaagcctggccgccacccccagcagcagcctgccctgcaccctgattgccctgggcctgcggcatgagaaggaggccaatgagctgatggaggacctgtttgagaccttccaggatgagatgggcttcagcaacatggaggatgatggccctgaggaggaggagcgggtggccgagccccaggccaacttcaacaccccccaggccctgcgctttgaggagctgctggccaacctgctgaatgagcagcaccagatcgccaaggagctgtttgagcagctgaagatgaagaagcccagcgccaagcagcagaaggaggtggagaaggtgaagccccagtgcaaggaggtgcaccagaccctcatcctggaccctgcccagaggaagaggctgcagcagcagatgcagcagcacgtgcagctgctgacccagatccacctgctggccacctgcaaccccaacctgaaccctgaggccagcagcacccgcatctgcctgaaggagctgggcacctttgcccagagcagcatcgccctgcaccaccagtacaaccccaagttccagaccctcttccagccctgcaacctgatgggcgccatgcagctgattgaggacttcagcacccacgtgtccattgactgcagcccccacaagacagtgaagaagacagccaatgagttcccctgcctgcccaagcaggtggcctggatcctggccaccagcaaggtgttcatgtacccagagctgctgcctgtgtgcagcctgaaggccaagaacccccaggacaagatcctcttcaccaaggccgaggacaacaagtacctgctgacctgcaagacagcccggcagctgactgtgcgcatcaagaacctgaacatgaacagagccccagacaacatcatcaagttctacaagaagaccaagcagctgcctgtgctgggcaagtgctgtgaggagatccagccccaccagtggaagccacccatcgagcgggaggagcaccggctgcccttctggctgaaggccagcctgcccagcatccaggaggagctgcggcacatggctgatggagcccgggaggtgggcaacatgacaggcaccacagagatcaacagcgaccagggcctggagaaggacaacagcgagctgggcagcgagacccgctaccccctgctgctgcccaagggcgtggtgctgaagctgaagcctgtggccgaccgcttccccaagaaggcctggaggcagaagaggagctctgtgctgaagcccctgctgatccagcccagccccagcctgcagcccagcttcaaccctgggaagaccccagcccagagcacccacagcgaggccccacccagcaagatggtgctgcgcatcccccaccccatccagcctgccaccgtgctgcagacagtgcctggggtgccccccctgggcgtgtctggaggagagagctttgagagccctgctgccctgcctgccatgcctcctgaggcccggaccagcttccccctgtctgagagccagaccctgctgagcagcgcccctgtgcccaaggtgatgatgcccagccctgccagctccatgttcaggaagccctacgtgagaagaagacccagcaagagaagaggagcccgggccttccgctgcatcaagccagcccctgtgatccacccagccagcgtcatcttcaccgtgcctgccaccaccgtgaagatcgtgtccctgggcggcggctgcaacatgatccagcctgtgaatgctgctgtggcccagagcccccagaccatccccatcgccaccctgctggtgaaccccaccagcttcccctgccccctgaaccagcccctggtggccagctctgtgagccccctgattgtgtctggcaacagcgtgaacctgcccatccccagcaccccagaggacaaggcccacatgaatgtggacatcgcctgtgctgtggctgatggagaaaatgccttccagggcctggagcccaagctggagccccaggagctgagccccctgagcgccaccgtcttccccaaggtggagcacagccctggccccccacctgtggacaagcagtgccaggagggcctgtctgagaacagcgcctaccgctggacagtggtgaagacagaggagggccggcaggccctggagcccctgccccagggcatccaggagagcctgaacaacagcagccctggggacctggaggaggtggtgaagatggagccagaagatgccacagaggagatcagcggcttcctgtag

SEQ ID NO: 238138 - DNA, 2391 bp, Artificial Sequence
  derived and/or modified sequence
atggaggaggaggccagccggagcgccgccgccaccaaccccggcagtcgcctgaccaggtggcctcctcccgacaagcgtgagggctccgcggttgatcccggtaaacggagatcactcgctgcaactccgtcttcctccttgccctgcaccctgattgctcttggacttaggcatgagaaggaggctaatgagctgatggaggatttgtttgagacattccaggacgagatgggatttagcaatatggaggacgacggccccgaagaggaggagagagttgccgaaccacaggcaaactttaacacgcctcaggccctaaggttcgaagagctgctggctaacttgctgaacgaacagcaccaaattgccaaggagctctttgagcaactgaagatgaagaaaccttctgctaagcagcagaaggaggtggagaaggtgaagccccaatgcaaggaagtgcatcagaccctcattcttgacccagcccagcgcaaaagacttcaacagcagatgcagcagcacgtgcagctgttgactcagattcacctcttggcaacctgcaacccaaacttgaatccggaggcttcgtccacacgtatttgtctgaaggagctcggcacttttgcccaaagtagtatcgctctgcaccaccaatataacccaaaatttcagactctgtttcagccttgcaacctgatgggggccatgcagttgattgaggatttttccacccacgtcagcatcgattgttcccctcacaaaaccgttaaaaagaccgccaatgagttcccctgcctgccgaagcaggtggcatggattctggccacctccaaggtgttcatgtatcccgaattgctgccagtgtgttctttaaaggcaaagaatcctcaggacaaaattttgttcaccaaagccgaggataacaaatacctgttgacatgcaagaccgcacggcagttaacggtccgaattaaaaatcttaatatgaatcgagcccctgataatataatcaaattttacaagaaaacaaaacagcttccggtcctaggtaagtgctgcgaggagatacaaccccaccagtggaaacccccgatcgagcgtgaggagcacaggctgcccttctggttaaaggccagccttccttcaattcaagaggaactgcgccacatggccgacggagcacgggaggttggtaacatgacagggacaaccgagatcaatagcgatcagggattggagaaggataactccgagttaggctctgaaacccgttacccactgctgctccctaagggcgtcgtgctgaagttgaagccagtcgcagacagattcccaaaaaaggcctggcgacagaagcgctcctctgttctgaagcccctgttgattcagccctcacctagcctgcagcccagcttcaacccgggaaaaactccggcacagagcacccacagcgaagcacctccatcgaaaatggttctgagaatcccccacccaattcagccagcgacagtcctgcagaccgtccctggcgtgcctcctctgggcgtcagtggcggggaaagcttcgagtcccccgcggcgctcccggccatgcctcctgaggcacgaacaagctttcctttatcggagtctcagacgctgctctcctccgcacctgtgcctaaggtgatgatgccaagccctgctagctccatgtttcggaagccttacgtccggcgccgaccttccaaacgacgaggggcccgcgcattccgctgcattaagcccgccccggtgatacacccagccagcgtcatttttacggtgcccgctacgacagtcaagatcgtgagcctagggggaggctgcaacatgatccagcccgtgaatgccgcagtcgcccaatccccacaaaccattccgatcgccaccctgcttgtgaaccccacctcattcccctgtcccctcaatcagcccttagtggctagctctgtaagccccctcatcgtgtctggaaattctgtcaacctacctattccgagtacgccggaggacaaagcccatatgaatgtcgatattgcctgcgccgtggccgacggggaaaacgcattccagggtctcgagccgaaactagagccccaggaactgagcccactttccgcaacagtgtttcccaaggtagagcacagtcccggcccgcctcctgtggacaagcagtgtcaggagggcctgagcgagaattccgcctacaggtggaccgttgtaaagaccgaggaggggcggcaggccttggagccattgccacagggcatccaggagtctttgaataactcgtcccccggtgatctggaagaggtggtcaaaatggagcccgaggatgcaacagaggaaatatccggattcctttag

SEQ ID NO: 238139 - DNA, 2391 bp, Artificial Sequence
  derived and/or modified sequence
atggaagaggaagccagtcgtagcgctgccgcaaccaatcctggatcccggctcacccggtggccccctcctgacaagcgcgagggttctgccgttgaccccggaaagcggagatctctggccgcaacaccatcgagctccctgccttgtactctgattgcgctggggttacggcacgaaaaagaggccaacgaattaatggaagacttgttcgagacattccaggacgagatgggcttctctaatatggaggatgacggccctgaggaggaagagcgggtggcagaaccgcaagctaacttcaacacgccacaggccctgagattcgaggagctgctggcaaaccttctaaatgaacaacaccagatcgctaaggagctttttgagcagctgaagatgaagaagccttcagccaaacaacagaaagaggtggagaaagttaagccacagtgtaaggaggtccatcagactctgattctcgatcccgctcagcgtaaaaggctacagcaacagatgcagcagcacgtgcagctcctcacacaaatccaccttcttgccacatgtaatcctaatctgaacccggaagcctcatcaactaggatttgcctgaaagaacttggcactttcgcccaaagtagcatcgcattacatcatcagtataacccaaagttccagaccttattccagccttgtaacctcatgggggctatgcagctgatagaagatttctcgacccacgtctcaattgactgctcccctcataaaactgtgaagaaaaccgcaaacgagttcccttgtttgcccaagcaggtggcttggatcctggctacatcaaaggtattcatgtatcctgaacttctcccggtctgcagcttaaaagccaagaatccacaggataaaattttgttcactaaagccgaggataataagtacctgctgacatgcaagactgccaggcagctgactgtgagaattaaaaatcttaacatgaacagagccccagacaatattatcaagttttacaaaaaaaccaagcagcttccagtgctggggaagtgttgcgaagaaattcagccgcaccagtggaaaccacccatagaaagggaagaacaccgcctgcctttctggctgaaggcaagtctgccatccatccaagaagagctgcgtcacatggcagacggcgctcgggaggtgggaaacatgacggggaccacagagatcaatagcgaccagggtcttgaaaaagacaatagcgagctgggctctgagacccggtatccgctgctgctgccgaagggagtggtgctgaaacttaaacccgtcgctgatagatttccgaagaaggcctggcgccagaaacggtcaagtgtgctgaaacctcttctgattcagccgagcccgtctttacaaccctcatttaacccaggcaaaacccctgcccagagcacacatagtgaagctccaccttccaagatggttttgcgaatacctcatccaatccaacccgctaccgttctgcaaactgtgccaggagttcccccactgggtgtgtccggtggagagtcctttgaatccccggctgccctccctgccatgccacctgaagccagaacatcttttcccttaagcgaaagtcagactcttctgtcatccgcccctgtgccaaaggtgatgatgccgtctccagcttcaagtatgttccgtaaaccctacgtccgaaggagacctagtaagcggagaggagctcgcgctttccggtgtattaagcccgcaccggttatacacccagcctccgtcatatttaccgtgcctgccacaactgtgaagatcgtgtccttaggcggagggtgcaatatgatccagccagtaaatgccgctgtcgctcaatcaccccagactatcccaattgccactctgctcgtcaaccctacctcctttccgtgtcccctcaatcagcccttggtcgcctcctctgtgagtcccctgatagtgagtggtaattcagtaaacctgcctataccctctactccggaggataaggcccacatgaacgttgatattgcatgcgctgtcgctgacggcgaaaacgcgttccagggattggaaccgaagctggagccgcaggagttgtcaccacttagtgccacagtgttccccaaggtggagcactcaccaggaccacctcctgtcgataagcagtgccaggaaggtctctcagaaaactcagcgtaccgctggaccgtcgtcaaaacagaggaagggcgtcaggcactcgagccactgccacaggggatccaggagtccctcaacaactcttccccaggggatcttgaagaggtagtgaagatggagcctgaggacgctaccgaggaaatctccggctttctgtag

SEQ ID NO: 238140 - DNA, 2626 bp, Artificial Sequence
  derived and/or modified sequence
cctcgatcccctcgccgcggtcccatggaggaggaggcgagccgcagcgccgcggcgacgaacccagggagtcggcttacccgctggccgcctcctgacaagcgggagggatccgcggtggacccagggaagcggaggagcctggcggccaccccctcttcctcacttccctgtactctcatcgctctcggcctccgacacgaaaaggaagcaaatgagctgatggaagatctgtttgaaactttccaagatgagatgggattctccaacatggaagatgatggcccagaagaggaggagcgtgtggctgagcctcaagctaactttaacacccctcaagctctacggtttgaggaactactggccaacctactaaatgaacaacatcagatagcgaaggaactatttgaacagctgaagatgaagaaaccttcagccaaacagcagaaggaggtagagaaggttaaaccccagtgtaaggaagttcatcagaccctgattctggacccagcacaaaggaagagactccagcagcagatgcagcagcatgttcagctcttgacacaaatccaccttcttgccacctgcaaccccaatctcaatccggaggccagtagcaccaggatatgtcttaaagagctgggaacctttgctcaaagctccatcgcccttcaccatcagtacaaccccaagtttcagaccctgttccaaccctgtaacttgatgggagctatgcagctgattgaagacttcagcacacatgtcagcattgactgcagccctcataaaactgtcaagaagactgccaatgaatttccctgtttgccaaagcaagtggcttggatcctggccacaagcaaggttttcatgtatccagagttacttccagtgtgttccctgaaggcaaagaatccccaggataagatcctcttcaccaaggctgaggacaacaagtaccttctaacctgcaagactgcccgccaactgacagtgagaatcaagaacctcaacatgaacagagctcctgacaacatcattaaattttataagaagaccaaacagctgccagtcctaggaaaatgctgtgaagagatccagccacatcagtggaagccacctatagagagagaagaacaccggctcccattctggttaaaggccagtctgccatccatccaggaagaactgcggcacatggctgatggtgctagagaggtaggaaatatgactggaaccactgagatcaactcagatcaaggcctagaaaaagacaactcagagttggggagtgaaactcggtacccactgctattgcctaagggtgtagtcctgaaactgaagccagttgccgaccgtttccccaagaaggcttggagacagaagcgttcatcagtcctgaaacccctccttatccaacccagcccctctctccagcccagcttcaaccctgggaaaacaccagcccaatcaactcattcagaagcccctccgagcaaaatggtgctccggattcctcacccaatacagccagccactgttttacagacagttccaggtgtccctccactgggggtcagtggaggtgagagttttgagtctcctgcagcactgcctgctatgccccctgaggccaggacaagcttccctctgtctgagtcccagactttgctctcttctgcccctgtgcccaaggtaatgatgccctcccctgcctcttccatgtttcgaaagccatatgtgagacggagaccctcaaaaagaaggggagccagggcctttcgctgtatcaaacctgcccctgttatccaccctgcatctgttatcttcactgttcctgctaccactgtgaagattgtgagccttggcggtggctgtaacatgatccagcctgtcaatgcggctgtggcccagagtccccagactattcccatcgccaccctcttggttaaccctacttccttcccctgtccattgaaccagccccttgtggcctcctctgtctcacccttaattgtttctggcaattctgtgaatcttcctataccatccacccctgaagataaggcccacatgaatgtggacattgcttgtgctgtggctgatggggaaaatgcctttcagggcctagaacccaaattagagccccaggaactatctcctctctctgctactgttttccccaaagtggaacatagcccagggcctccaccagtcgataaacagtgccaagaaggattgtcagagaacagtgcctatcgctggaccgttgtgaaaacagaggagggaaggcaagctctggagccgctccctcagggcatccaggagtctctaaacaactcttcccctggggatttagaggaagttgtcaagatggaacctgaagatgctacagaggaaatcagtggatttctttgagctaggagaataagagtctggagactgggagccttcacttcggcctccgattggtggcgcatagggtgtaaccaataggaaacccctaaagggtacttaaaccccagattttgcaactggggctcttgagcagcttgctttagcctgctcccactctgtggaatatacttttgcttcaataaatctgtgcttttattgcttcattgtttca

SEQ ID NO: 238141 - DNA, 2391 bp, Artificial Sequence
  derived and/or modified sequence
atggaggaggaggccagcagaagcgccgccgccaccaaccccggcagcagactgaccagatggcccccccccgacaagagagagggcagcgccgtggaccccggcaagagaagaagcctggccgccacccccagcagcagcctgccctgcaccctgatcgccctgggcctgagacacgagaaggaggccaacgagctgatggaggacctgttcgagaccttccaggacgagatgggcttcagcaacatggaggacgacggccccgaggaggaggagagagtggccgagccccaggccaacttcaacaccccccaggccctgagattcgaggagctgctggccaacctgctgaacgagcagcaccagatcgccaaggagctgttcgagcagctgaagatgaagaagcccagcgccaagcagcagaaggaggtggagaaggtgaagccccagtgcaaggaggtgcaccagaccctgatcctggaccccgcccagagaaagagactgcagcagcagatgcagcagcacgtgcagctgctgacccagatccacctgctggccacctgcaaccccaacctgaaccccgaggccagcagcaccagaatctgcctgaaggagctgggcaccttcgcccagagcagcatcgccctgcaccaccagtacaaccccaagttccagaccctgttccagccctgcaacctgatgggcgccatgcagctgatcgaggacttcagcacccacgtgagcatcgactgcagcccccacaagaccgtgaagaagaccgccaacgagttcccctgcctgcccaagcaggtggcctggatcctggccaccagcaaggtgttcatgtaccccgagctgctgcccgtgtgcagcctgaaggccaagaacccccaggacaagatcctgttcaccaaggccgaggacaacaagtacctgctgacctgcaagaccgccagacagctgaccgtgagaatcaagaacctgaacatgaacagagcccccgacaacatcatcaagttctacaagaagaccaagcagctgcccgtgctgggcaagtgctgcgaggagatccagccccaccagtggaagccccccatcgagagagaggagcacagactgcccttctggctgaaggccagcctgcccagcatccaggaggagctgagacacatggccgacggcgccagagaggtgggcaacatgaccggcaccaccgagatcaacagcgaccagggcctggagaaggacaacagcgagctgggcagcgagaccagataccccctgctgctgcccaagggcgtggtgctgaagctgaagcccgtggccgacagattccccaagaaggcctggagacagaagagaagcagcgtgctgaagcccctgctgatccagcccagccccagcctgcagcccagcttcaaccccggcaagacccccgcccagagcacccacagcgaggccccccccagcaagatggtgctgagaatcccccaccccatccagcccgccaccgtgctgcagaccgtgcccggcgtgccccccctgggcgtgagcggcggcgagagcttcgagagccccgccgccctgcccgccatgccccccgaggccagaaccagcttccccctgagcgagagccagaccctgctgagcagcgcccccgtgcccaaggtgatgatgcccagccccgccagcagcatgttcagaaagccctacgtgagaagaagacccagcaagagaagaggcgccagagccttcagatgcatcaagcccgcccccgtgatccaccccgccagcgtgatcttcaccgtgcccgccaccaccgtgaagatcgtgagcctgggcggcggctgcaacatgatccagcccgtgaacgccgccgtggcccagagcccccagaccatccccatcgccaccctgctggtgaaccccaccagcttcccctgccccctgaaccagcccctggtggccagcagcgtgagccccctgatcgtgagcggcaacagcgtgaacctgcccatccccagcacccccgaggacaaggcccacatgaacgtggacatcgcctgcgccgtggccgacggcgagaacgccttccagggcctggagcccaagctggagccccaggagctgagccccctgagcgccaccgtgttccccaaggtggagcacagccccggccccccccccgtggacaagcagtgccaggagggcctgagcgagaacagcgcctacagatggaccgtggtgaagaccgaggagggcagacaggccctggagcccctgccccagggcatccaggagagcctgaacaacagcagccccggcgacctggaggaggtggtgaagatggagcccgaggacgccaccgaggagatcagcggcttcctgtag

SEQ ID NO: 238142 - DNA, 2498 bp, Artificial Sequence
  derived and/or modified sequence
gagaaggcttgggctcgcgccgctgaagtcggcttacccgctggccgcctcctgacaagcgggagggatccgcggtggacccagggaagcggaggagcctggcggccaccccctcttcctcacttccctgtactctcatcgctctcggcctccgacacgaaaaggaagcaaatgagctgatggaagatctgtttgaaactttccaagatgagatgggattctccaacatggaagatgatggcccagaagaggaggagcgtgtggctgagcctcaagctaactttaacacccctcaagctctacggtttgaggaactactggccaacctactaaatgaacaacatcagatagcgaaggaactatttgaacagctgaagatgaagaaaccttcagccaaacagcagaaggaggtagagaaggttaaaccccagtgtaaggaagttcatcagaccctgattctggacccagcacaaaggaagagactccagcagcagatgcagcagcatgttcagctcttgacacaaatccaccttcttgccacctgcaaccccaatctcaatccggaggccagtagcaccaggatatgtcttaaagagctgggaacctttgctcaaagctccatcgcccttcaccatcagtacaaccccaagtttcagaccctgttccaaccctgtaacttgatgggagctatgcagctgattgaagacttcagcacacatgtcagcattgactgcagccctcataaaactgtcaagaagactgtttgttagctttaggactgaagcattttgaagggactgagtttcttaaccctctaatcagcaagtaccttctaacctgcaagactgcccgccaactgacagtgagaatcaagaacctcaacatgaacagagctcctgacaacatcattaaattttataagaagaccaaacagctgccagtcctaggaaaatgctgtgaagagatccagccacatcagtggaagccacctatagagagagaagaacaccggctcccattctggttaaaggccagtctgccatccatccaggaagaactgcggcacatggctgatggtgctagagaggtaggaaatatgactggaaccactgagatcaactcagatcaaggcctagaaaaagacaactcagagttggggagtgaaactcggtacccactgctattgcctaagggtgtagtcctgaaactgaagccagttgccgaccgtttccccaagaaggcttggagacagaagcgttcatcagtcctgaaacccctccttatccaacccagcccctctctccagcccagcttcaaccctgggaaaacaccagcccaatcaactcattcagaagcccctccgagcaaaatggtgctccggattcctcacccaatacagccagccactgttttacagacagttccaggtgtccctccactgggggtcagtggaggtgagagttttgagtctcctgcagcactgcctgctatgccccctgaggccaggacaagcttccctctgtctgagtcccagactttgctctcttctgcccctgtgcccaaggtaatgatgccctcccctgcctcttccatgtttcgaaagccatatgtgagacggagaccctcaaaaagaaggggagccagggcctttcgctgtatcaaacctgcccctgttatccaccctgcatctgttatcttcactgttcctgctaccactgtgaagattgtgagccttggcggtggctgtaacatgatccagcctgtcaatgcggctgtggcccagagtccccagactattcccatcgccaccctcttggttaaccctacttccttcccctgtccattgaaccagccccttgtggcctcctctgtctcacccttaattgtttctggcaattctgtgaatcttcctataccatccacccctgaagataaggcccacatgaatgtggacattgcttgtgctgtggctgatggggaaaatgcctttcagggcctagaacccaaattagagccccaggaactatctcctctctctgctactgttttccccaaagtggaacatagcccagggcctccaccagtcgataaacagtgccaagaaggattgtcagagaacagtgcctatcgctggaccgttgtgaaaacagaggagggaaggcaagctctggagccgctccctcagggcatccaggagtctctaaacaactcttcccctggggatttagaggaagttgtcaagatggaacctgaagatgctacagaggaaatcagtggatttctttgagctaggagaataagagtctggagactgggagccttcacttcggcctccgattggtggcgcatagggtgtaaccaataggaaacccctaaagggtacttaaaccccagattttgcaactggggctcttgagcagcttgctttagcctgctcccactctgtggaatatacttttgcttcaataaatctgtgcttttattgcttcattgtttca

SEQ ID NO: 238143 - protein, 728 aa, Artificial Sequence
  derived and/or modified sequence
MRWLLLYYALCFSLSKASAHTVELNNMFGQIQSPGYPDSYPSDSEVTWNITVPDGFRIKLYFMHFNLESSYLCEYDYVKVETEDQVLATFCGRETTDTEQTPGQEVVLSPGSFMSITFRSDFSNEERFTGFDAHYMAVDVDECKEREDEELSCDHYCHNYIGGYYCSCRFGYILHTDNRTCRVECSDNLFTQRTGVITSPDFPNPYPKSSECLYTIELEEGFMVNLQFEDIFDIEDHPEVPCPYDYIKIKVGPKVLGPFCGEKAPEPISTQSHSVLILFHSDNSGENRGWRLSYRAAGNECPELQPPVHGKIEPSQAKYFFKDQVLVSCDTGYKVLKDNVEMDTFQIECLKDGTWSNKIPTCKIVDCRAPGELEHGLITFSTRNNLTTYKSEIKYSCQEPYYKMLNNNTGIYTCSAQGVWMNKVLGRSLPTCLPECGQPSRSLPSLVKRIIGGRNAEPGLFPWQALIVVEDTSRVPNDKWFGSGALLSASWILTAAHVLRSQRRDTTVIPVSKEHVTVYLGLHDVRDKSGAVNSSAARVVLHPDFNIQNYNHDIALVQLQEPVPLGPHVMPVCLPRLEPEGPAPHMLGLVAGWGISNPNVTVDEIISSGTRTLSDVLQYVKLPVVPHAECKTSYESRSGNYSVTENMFCAGYYEGGKDTCLGDSGGAFVIFDDLSQRWVVQGLVSWGGPEECGSKQVYGVYTKVSNYVDWVWEQMGLPQSVVEPQVER

SEQ ID NO: 238144 - DNA, 2187 bp, Artificial Sequence
  derived and/or modified sequence
atgcggtggctcctgctctattacgccttgtgtttttctcttagtaaagcatctgcccatacagtagaattaaacaacatgtttgggcaaattcagtctcccggctatcctgactcttatccatcagactcagaggtgacttggaacatcacagttccagatggctttcgaatcaagttgtatttcatgcattttaacctggagtcgagctacctgtgtgagtatgattacgtcaaggtcgagacggaggatcaggtgctggcgactttctgcggacgggagacgacggacaccgaacaaacacccgggcaggaggtggttctcagccctggcagtttcatgtccataactttcagatccgactttagcaatgaggaaaggtttacagggttcgacgcacattacatggccgtcgacgtggacgaatgcaaggagcgagaggatgaggagcttagctgtgaccattattgccacaattacattgggggatactactgctcatgcagatttggatatatactgcatactgacaatcgcacgtgccgagtggaatgttccgataatctgtttacacaacggaccggtgtcatcacttcccctgatttcccaaacccctacccaaagtcaagcgagtgcttgtacactatagagctggaagaaggatttatggtgaacctgcagttcgaagatattttcgatatcgaagatcatccagaggtgccatgcccttacgactacatcaagattaaagtcggacctaaagtgcttggcccgttttgcggcgaaaaagctccggaacctatttccacgcagtcacattccgttctcatcttatttcattccgacaattccggcgagaacagaggttggcggctcagttacagagccgctggcaatgagtgccctgaactgcagcctcctgttcacgggaaaattgaacctagccaggccaagtacttctttaaagaccaagtcctcgtgtcctgcgacacaggatacaaggtcctgaaggataatgttgaaatggacacgtttcagattgaatgtctgaaggacggcacctggagcaataagattccaacctgtaagattgttgactgtagggctccaggtgaactggagcacggtctcatcaccttctccacccgcaacaatttgaccacatataaaagcgagatcaaatacagttgtcaggagccttattacaaaatgctgaacaataacactggcatttatacatgctcagcacagggggtgtggatgaacaaggttctcggcaggtctctgcccacatgtctgccagagtgtggacagccttcccgatctttgcccagcctcgttaagcgcatcatcgggggacgaaacgcagagcctggcctgttcccctggcaggccctgatcgtcgtcgaggacacatctagagtccccaatgataaatggttcgggagcggcgccctccttagcgcaagctggatcctcacggcggcccatgtgttaagaagccagagaagagatactaccgtgataccagtcagtaaggagcatgttaccgtctacctggggctacacgacgtaagagataagagcggcgctgtgaactcaagtgccgcccgcgttgtgctgcaccccgactttaatatacagaactacaaccatgacatagccttggtgcagctccaagagcccgtccctctgggcccacatgtgatgccagtctgtctacctagactcgagccagagggccccgccccccacatgctgggactggtggccggttgggggatcagcaatcccaacgttacagtcgacgagatcatatctagtggcaccagaacactctctgacgttctgcaatacgttaagttacccgtggtgccccacgcagagtgcaagaccagctacgaaagtagatctgggaattatagcgtaaccgagaacatgttctgcgctggatactatgagggcggcaaagatacatgcctgggcgactctgggggcgccttcgtcatttttgacgatctgtcacaaaggtgggtcgttcaaggattggtgtcgtggggagggcccgaagagtgtggctcgaaacaggtttatggtgtatacaccaaggtgtctaactacgtggattgggtctgggagcagatgggtttaccccagagcgtggtggagccccaggtggagcggtag

SEQ ID NO: 238145 - DNA, 2187 bp, Artificial Sequence
  derived and/or modified sequence
atgcgctggctgctgctgtactatgccctgtgcttcagcctgagcaaggccagcgcccacacagtggagctgaacaacatgtttggccagatccagagccctggctacccagacagctaccccagcgacagcgaggtgacctggaacatcaccgtgcctgatggcttccgcatcaagctgtacttcatgcacttcaacctggagagcagctacctgtgtgaatatgactatgtgaaggtggagacagaggaccaggtgctggccaccttctgtggccgggagaccacagacacagagcagaccccaggccaggaggtggtgctgagccctggcagcttcatgagcatcaccttcagaagtgacttcagcaatgaggagcgcttcaccggctttgatgcccactacatggctgtggatgtggatgagtgcaaggagagagaagatgaggagctgagctgtgaccactactgccacaactacatcggcggctactactgcagctgccgcttcggctacatcctgcacacagacaacagaacctgccgggtggagtgcagcgacaacctcttcacccagaggactggagtcatcaccagcccagacttccccaacccctaccccaagagcagtgaatgtctgtacaccatcgagctggaggagggcttcatggtgaacctgcagtttgaggacatctttgatattgaggaccaccctgaggtgccctgcccctatgactacatcaagatcaaggtgggccccaaggtgctgggccccttctgtggggagaaggcccctgagcccatcagcacccagagccacagcgtgctgatcctcttccacagcgacaacagcggggagaacagaggctggaggctgagctacagagctgctggaaatgaatgtcctgagctgcagccccctgtgcacggcaagattgagcccagccaggccaagtacttcttcaaggaccaggtgctggtgtcctgtgacaccggctacaaggtgctgaaggacaacgtggagatggacaccttccagatcgagtgcctgaaggatggcacctggagcaacaagatccccacctgcaagatcgtggactgccgggcccctggagagctggagcacggcctcatcaccttcagcaccaggaacaacctgaccacctacaagtctgagatcaagtacagctgccaggagccctactacaagatgctgaacaacaacacaggcatctacacctgcagcgcccagggcgtgtggatgaacaaggtgctgggccgcagcctgcccacctgcctgcctgaatgtggccagcccagccgcagcctgcccagcctggtgaagaggatcattggaggaagaaatgctgagcccggcctcttcccctggcaggccctgattgtggtggaggacaccagccgggtgcccaatgacaagtggtttggaagtggggccctgctgagcgcctcctggatcctgacagctgcccacgtgctgcggagccagaggcgggacaccaccgtcatccctgtgtccaaggagcacgtgacagtgtacctgggcctgcatgatgtgcgggacaagtctggagctgtgaacagcagcgctgcccgggtggtgctgcacccagacttcaacatccagaactacaaccacgacatcgccctggtgcagctgcaggagcctgtgcccctgggcccccacgtgatgcctgtgtgcctgccccggctggagcctgagggccctgccccccacatgctgggcctggtggccggctggggcatcagcaaccccaacgtgacagtggatgagatcatcagcagcggcaccaggaccctgagtgatgtgctgcagtatgtgaagctgcctgtggtgccccatgctgagtgcaagaccagctatgagagccgcagcggcaactacagcgtgacagagaacatgttctgtgccggctactatgaaggaggcaaggacacctgcctgggggacagcggcggggccttcgtcatctttgatgacctgagccagcgctgggtggtgcagggcctggtgtcctggggcggcccagaagaatgtggcagcaagcaggtgtatggagtgtacaccaaggtgagcaactacgtggactgggtgtgggagcagatgggcctgccccagagcgtggtggagccccaggtggagaggtag

SEQ ID NO: 238146 - DNA, 4015 bp, Artificial Sequence
  derived and/or modified sequence
agagagagaggagagaggaaaagccagagggagagagggggagaggggatctgttgcaggcaggggaaggcgtgacctgaatggagaatgccagccaattccagagacacacagggacctcagaacaaagataaggcatcacggacaccacaccgggcacgagctcacaggcaagtcaagctgggaggaccaaggccgggcagccgggagcacccaaggcaggaaaatgaggtggctgcttctctattatgctctgtgcttctccctgtcaaaggcttcagcccacaccgtggagctaaacaatatgtttggccagatccagtcgcctggttatccagactcctatcccagtgattcagaggtgacttggaatatcactgtcccagatgggtttcggatcaagctttacttcatgcacttcaacttggaatcctcctacctttgtgaatatgactatgtgaaggtagaaactgaggaccaggtgctggcaaccttctgtggcagggagaccacagacacagagcagactcccggccaggaggtggtcctctcccctggctccttcatgtccatcactttccggtcagatttctccaatgaggagcgtttcacaggctttgatgcccactacatggctgtggatgtggacgagtgcaaggagagggaggacgaggagctgtcctgtgaccactactgccacaactacattggcggctactactgctcctgccgcttcggctacatcctccacacagacaacaggacctgccgagtggagtgcagtgacaacctcttcactcaaaggactggggtgatcaccagccctgacttcccaaacccttaccccaagagctctgaatgcctgtataccatcgagctggaggagggtttcatggtcaacctgcagtttgaggacatatttgacattgaggaccatcctgaggtgccctgcccctatgactacatcaagatcaaagttggtccaaaagttttggggcctttctgtggagagaaagccccagaacccatcagcacccagagccacagtgtcctgatcctgttccatagtgacaactcgggagagaaccggggctggaggctctcatacagggctgcaggaaatgagtgcccagagctacagcctcctgtccatgggaaaatcgagccctcccaagccaagtatttcttcaaagaccaagtgctcgtcagctgtgacacaggctacaaagtgctgaaggataatgtggagatggacacattccagattgagtgtctgaaggatgggacgtggagtaacaagattcccacctgtaaaattgtagactgtagagccccaggagagctggaacacgggctgatcaccttctctacaaggaacaacctcaccacatacaagtctgagatcaaatactcctgtcaggagccctattacaagatgctcaacaataacacaggtatatatacctgttctgcccaaggagtctggatgaataaagtattggggagaagcctacccacctgccttccagagtgtggtcagccctcccgctccctgccaagcctggtcaagaggatcattgggggccgaaatgctgagcctggcctcttcccgtggcaggccctgatagtggtggaggacacttcgagagtgccaaatgacaagtggtttgggagtggggccctgctctctgcgtcctggatcctcacagcagctcatgtgctgcgctcccagcgtagagacaccacggtgataccagtctccaaggagcatgtcaccgtctacctgggcttgcatgatgtgcgagacaaatcgggggcagtcaacagctcagctgcccgagtggtgctccacccagacttcaacatccaaaactacaaccacgatatagctctggtgcagctgcaggagcctgtgcccctgggaccccacgttatgcctgtctgcctgccaaggcttgagcctgaaggcccggccccccacatgctgggcctggtggccggctggggcatctccaatcccaatgtgacagtggatgagatcatcagcagtggcacacggaccttgtcagatgtcctgcagtatgtcaagttacccgtggtgcctcacgctgagtgcaaaactagctatgagtcccgctcgggcaattacagcgtcacggagaacatgttctgtgctggctactacgagggcggcaaagacacgtgccttggagatagcggtggggcctttgtcatctttgatgacttgagccagcgctgggtggtgcaaggcctggtgtcctgggggggacctgaagaatgcggcagcaagcaggtctatggagtctacacaaaggtctccaattacgtggactgggtgtgggagcagatgggcttaccacaaagtgttgtggagccccaggtggaacggtgagctgacttacttcctcggggcctgcctcccctgagcgaagctacaccgcacttccgacagcacactccacattacttatcagaccatatggaatggaacacactgacctagcggtggcttctcctaccgagacagcccccaggaccctgagaggcagagtgtggtatagggaaaaggctccaggcaggagacctgtgttcctgagcttgtccaagtctctttccctgtctgggcctcactctaccgagtaatacaatgcaggagctcaaccaaggcctctgtgccaatcccagcactcctttccaggccatgcttcttaccccagtggcctttattcactcctgaccacttatcaaacccatcggtcctactgttggtataactgagcttggacctgactattagaaaatggtttctaacattgaactgaatgccgcatctgtatattttcctgctctgccttctgggactagccttggcctaatccttcctctaggagaagagcattcaggttttgggagatggctcatagccaagcccctctctcttagtgtgatcccttggagcaccttcatgcctggggtttctctcccaaaagcttcttgcagtctaagccttatcccttatgttccccattaaaggaatttcaaaagacatggagaaagttgggaaggtttgtgctgactgctgggagcagaatagccgtgggaggcccaccaagcccttaaattcccattgtcaactcagaacacatttgggcccatatgccaccctggaacaccagctgacaccatgggcgtccacacctgctgctccagacaagcacaaagcaatctttcagccttgaaatgtattatctgaaaggctacctgaagcccaggcccgaatatggggacttagtcgattacctggaaaaagaaaagacccacactgtgtcctgctgtgcttttgggcaggaaaatggaagaaagagtggggtgggcacattagaagtcacccaaatcctgccaggctgcctggcatccctggggcatgagctgggcggagaatccaccccgcaggatgttcagagggacccactccttcatttttcagagtcaaaggaatcagaggctcacccatggcaggcagtgaaaagagccaggagtcctgggttctagtccctgctctgcccccaactggctgtataacctttgaaaaatcattttctttgtctgagtctctggttctccgtcagcaacaggctggcataaggtcccctgcaggttccttctagctggagcactcagagcttccctgactgctagcagcctctctggccctcacagggctgattgttctccttctccctggagctctctctcctgaaaatctccatcagagcaaggcagccagagaagcccctgagagggaatgattgggaagtgtccactttctcaaccggctcatcaaacacactcctttgtctatgaatggcacatgtaaatgatgttatattttgtatcttttatatcatatgcttcaccattctgtaaagggcctctgcattgttgctcccatcaggggtctcaagtggaaataaaccctcgtggataaccaaca

SEQ ID NO: 238147 - DNA, 2169 bp, Artificial Sequence
  derived and/or modified sequence
acacacagagtgatacaaatacctgcttgagcccctcagttattttctctcaagggctgaagtcagccacacaggataaaggagggaagggaaggagcagatcttttcggtaggaagacagattttgttgtcaggttcctgggagtgcaagagcaagtcaaaggagagagagaggagagaggaaaagccagagggagagagggggagaggggatctgttgcaggcaggggaaggcgtgacctgaatggagaatgccagccaattccagagacacacagggacctcagaacaaagataaggcatcacggacaccacaccgggcacgagctcacaggcaagtcaagctgggaggaccaaggccgggcagccgggagcacccaaggcaggaaaatgaggtggctgcttctctattatgctctgtgcttctccctgtcaaaggcttcagcccacaccgtggagctaaacaatatgtttggccagatccagtcgcctggttatccagactcctatcccagtgattcagaggtgacttggaatatcactgtcccagatgggtttcggatcaagctttacttcatgcacttcaacttggaatcctcctacctttgtgaatatgactatgtgaaggtagaaactgaggaccaggtgctggcaaccttctgtggcagggagaccacagacacagagcagactcccggccaggaggtggtcctctcccctggctccttcatgtccatcactttccggtcagatttctccaatgaggagcgtttcacaggctttgatgcccactacatggctgtggatgtggacgagtgcaaggagagggaggacgaggagctgtcctgtgaccactactgccacaactacattggcggctactactgctcctgccgcttcggctacatcctccacacagacaacaggacctgccgagtggagtgcagtgacaacctcttcactcaaaggactggggtgatcaccagccctgacttcccaaacccttaccccaagagctctgaatgcctgtataccatcgagctggaggagggtttcatggtcaacctgcagtttgaggacatatttgacattgaggaccatcctgaggtgccctgcccctatgactacatcaagatcaaagttggtccaaaagttttggggcctttctgtggagagaaagccccagaacccatcagcacccagagccacagtgtcctgatcctgttccatagtgacaactcgggagagaaccggggctggaggctctcatacagggctgcaggaaatgagtgcccagagctacagcctcctgtccatgggaaaatcgagccctcccaagccaagtatttcttcaaagaccaagtgctcgtcagctgtgacacaggctacaaagtgctgaaggataatgtggagatggacacattccagattgagtgtctgaaggatgggacgtggagtaacaagattcccacctgtaaaattgtagactgtagagccccaggagagctggaacacgggctgatcaccttctctacaaggaacaacctcaccacatacaagtctgagatcaaatactcctgtcaggagccctattacaagatgctcaacaataacacaggtatatatacctgttctgcccaaggagtctggatgaataaagtattggggagaagcctacccacctgccttccagagtgtggtcagccctcccgctccctgccaagcctggtcaagaggatcattgggggccgaaatgctgagcctggcctcttcccgtggcaggccctgatagtggtggaggacacttcgagagtgccaaatgacaagtggtttgggagtggggccctgctctctgcgtcctggatcctcacagcagctcatgtgctgcgctcccagcgtagagacaccacggtgataccagtctccaaggagcatgtcaccgtctacctgggcttgcatgatgtgcgagacaaatcgggggcagtcaacagctcagctgcccgagtggtgctccacccagacttcaacatccaaaactacaaccacgatatagctctggtgcagctgcaggagcctgtgcccctgggaccccacgttatgcctgtctgcctgccaaggcttgagcctcctggtggccggctggggcatctccaatcccaatgtgacagt

SEQ ID NO: 238148 - DNA, 2187 bp, Artificial Sequence
  derived and/or modified sequence
atgcggtggctgctgctgtactacgccctgtgcttcagcctgagcaaggctagtgcacacactgtagaattaaacaatatgttcgggcagatccagtcccccggctatccagacagttatccatccgacagcgaggtcacttggaacatcactgtccctgacgggttcagaatcaagctgtattttatgcattttaacctggagtccagctacctctgtgaatatgactacgtgaaagtggaaacagaggaccaggtgctcgccacgttctgtggtagggagaccactgataccgaacagactcccggccaggaggtggtgctgtcccctggttccttcatgtctatcactttccgctctgatttcagtaacgaggaaaggtttacggggtttgacgcccattacatggctgttgatgtggacgaatgtaaggaacgtgaagacgaagagcttagctgcgatcactactgccacaattacatcgggggatattattgttcctgtaggttcggatatattttacatactgacaatcgcacttgtagggtcgagtgcagtgacaatttgtttacacaacggacaggggtcattaccagtcccgactttccaaacccataccccaagtctagcgaatgtctttacacaatcgaattagaagaggggtttatggtaaacctgcagttcgaggacatctttgatatcgaagatcaccctgaggttccctgcccatatgactacattaaaatcaaggttggtccaaaagtgctgggccccttctgtggagaaaaagcacctgagcccatttctacgcaatcgcatagcgtgcttatattgtttcatagcgacaactctggggagaatagagggtggcgactgagctatcgggccgcgggcaatgagtgtcccgagctgcagccccctgtgcatggaaaaatcgagccctcccaggccaagtactttttcaaagatcaggtcttagtttcctgcgatacggggtataaggttctgaaggataacgtggaaatggacaccttccagatcgagtgtttgaaggacggcacttggagcaataagattcccacctgtaaaattgttgattgccgggcccccggtgagctggaacatgggcttatcactttctccactcgtaacaacctgactacttacaagagcgagatcaaatacagctgtcaggaaccgtactataagatgttgaataataacactgggatctacacctgcagtgctcaaggcgtctggatgaacaaagtccttggccggtccttgcccacatgtctacctgaatgcgggcagcctagcaggagtctgccctctctggtgaaacgtattattggagggagaaacgctgaacccggtctatttccctggcaggccttgatcgtcgttgaggatacgtcccgcgtgccaaatgacaagtggtttggtagcggcgcactgttgagcgcctcttggatccttacagcggcacatgtgctccgctcccagagacgggatactacagtcatacccgtgagcaaggaacatgtgaccgtgtatctcggactgcatgacgttcgagataaatcaggggccgtaaactcctctgcagccagagtcgtgctccatcctgactttaatattcagaactataatcacgatatcgcgttggtacagctccaggaaccagttccactgggtcctcatgtgatgccggtttgtctgcctcgtctggagccagagggtccagccccacatatgctggggcttgtggccgggtggggcatttctaatcctaatgttaccgtcgatgagatcattagctcaggtactcgcactttgtcagacgtcttacagtacgtcaagctacccgtggtgccgcacgccgagtgtaagacttcctacgaatctcgtagcggtaactattccgtgaccgagaatatgttctgtgctgggtattacgagggaggcaaagatacgtgcctcggcgactcggggggtgcgtttgtgatctttgacgacctgagccagaggtgggtggtgcagggcctggtatcctggggcggccccgaagagtgtggatcgaagcaggtttatggggtttacactaaggtgtctaactatgttgactgggtgtgggaacagatgggcctccctcagagcgttgtcgaaccccaggtggagcgttag

SEQ ID NO: 238149 - DNA, 2187 bp, Artificial Sequence
  derived and/or modified sequence
atgagatggctgcttctgtactacgccttatgttttagtctgagtaaggccagcgcacacacagtggaactaaacaacatgtttgggcagatccagtcacccggttatccagactcataccctagtgatagtgaggtaacctggaatatcaccgtcccagacggatttagaatcaagttatattttatgcacttcaatctggagagttcatacctgtgcgagtacgactatgtgaaagtggagacagaagaccaggtgcttgctacattctgtgggcgtgagacaactgatacagagcagacacctggacaggaagtggtgctgtcacctggcagctttatgtcaatcaccttcaggtctgatttttccaatgaagagagatttaccggcttcgatgcgcactatatggcagtggatgtcgatgaatgcaaagagcgtgaggatgaggaactgagctgtgatcattactgccacaactatatcggtggctattattgctcatgcaggtttggatacattctccacaccgacaacaggacttgcagggtggagtgttctgataatctgtttacccagcggactggagttatcacgtctcccgactttccaaacccctatcccaagagttctgaatgtctctatacaattgagcttgaggagggttttatggtgaacctgcagttcgaagatatttttgatatcgaggatcatcccgaggtgccatgtccttatgattacatcaaaattaaggttggccctaaggtattaggacctttctgcggagagaaagcgcctgagcccataagtactcagtcacacagcgtccttattctgtttcactccgacaattcaggcgagaacagggggtggcggctttcctatcgggctgccggaaatgagtgtcccgagctgcaacctcctgtgcacggtaagatagaaccttcccaggccaaatattttttcaaggaccaagtgctggtctcttgtgatacaggttataaggttctcaaggacaacgtagaaatggataccttccagatcgaatgcctcaaggatggcacctggtcgaataaaatacccacatgcaagatcgtcgattgtagggcaccgggtgagctggagcacggtctgataactttcagcacacggaataatctcaccacttacaaaagcgagattaaatattcgtgccaggaaccttactataaaatgcttaacaataatacaggtatctatacctgcagcgcccagggagtgtggatgaacaaagtgctgggacgcagcctgccaacttgcttaccagaatgcggccagccttctcgatctctaccctccctggtgaagcgtatcattggtggcaggaatgcggaacccggtcttttcccctggcaggctctgatcgtggttgaggatacaagtcgcgtgccgaacgacaaatggtttggtagtggcgcacttctctcagccagctggatcctcactgctgctcacgtcctgcgcagtcagaggcgcgacacaactgttatcccggttagcaaggaacatgtgactgtctacctgggactgcacgacgtgagagacaaatctggagctgtcaattcctccgctgcgagggtcgtcctgcatcccgacttcaatatccagaactacaatcatgacatagccttagtgcaacttcaggagcccgtgcctctgggtccgcatgtgatgccagtgtgcctgcccagactcgaacccgaagggccagcccctcacatgctgggactggtcgcaggttggggtatctctaacccaaatgtcactgtagatgaaattatttcaagcgggaccagaactcttagtgatgtccttcagtacgtgaaactcccagttgtgccacacgcggagtgtaaaacttcatatgaatcgcggtccggcaactatagcgtaactgaaaacatgttctgcgctgggtactacgaggggggtaaggacacctgtctgggagattcaggaggcgcttttgtgattttcgatgacctctcgcagcggtgggtggtccaagggcttgtatcctggggtggcccagaggaatgtgggtccaaacaagtgtatggcgtatacaccaaggtcagtaattacgtcgattgggtttgggagcagatgggactaccccagtctgtcgtggaacctcaagtggagagatag

SEQ ID NO: 238150 - DNA, 2187 bp, Artificial Sequence
  derived and/or modified sequence
atgcggtggttacttttgtactacgcgctgtgttttagccttagtaaggcaagtgctcacaccgtggaactcaacaatatgttcggacagattcagtccccaggttatcccgactcctatccttccgacagcgaggtgacatggaacattactgtccctgacggatttaggattaaactatactttatgcatttcaacttagaatcctcttacctgtgcgagtatgactacgttaaggttgagactgaagaccaagtcctagccactttctgtgggcgtgaaactacagatactgagcagaccccagggcaggaagtcgtcctatcacctggcagcttcatgagtattacatttagaagcgacttttccaacgaggagagatttactgggtttgacgctcattatatggccgtggacgttgatgaatgcaaggaacgcgaggacgaagaactgtcttgcgatcactattgtcacaattacattggtggatattactgctcgtgtaggttcggttacattctacatactgacaatcgaacatgccgcgttgagtgcagtgacaatctctttacacagcggacgggcgttataacatctcccgatttccccaacccttatcccaagagcagtgagtgtctgtacacaatcgaactggaagagggattcatggtgaatttacagttcgaagatatctttgatattgaagaccatcctgaagttccgtgcccgtacgactacatcaaaattaaggtcggtccaaaggtgctcggccctttctgcggtgaaaaggctcccgaaccgatcagcacccagagccacagtgtgctgattctcttccatagtgataattccggagaaaatcgggggtggcgactcagttatcgcgctgctggcaacgagtgtcctgaactccaacctccagtacatggcaagatcgagcctagtcaggcaaaatactttttcaaagaccaagtccttgtatcctgcgacaccggatataaggtcctaaaggacaatgtggagatggatacatttcagatcgagtgcctgaaagatggaacatggtccaataagatcccaacctgtaagatcgtggactgtcgagcccctggggaattggaacatggcttgataaccttctccacccgcaataatctgacaacttataagagtgaaatcaaatactcctgtcaggagccgtattataagatgttgaataacaacacaggaatctatacatgttcagctcaaggggtttggatgaacaaggtgctgggaaggtccttaccaacttgtcttcccgagtgtggccagccatcccgatcccttcccagtttagttaagcgtatcattggagggcgtaatgccgagcccggtttgtttccttggcaggccctgatagtagttgaagacacatcccgagtgcctaacgataagtggtttggcagcggggccttgctgtcagcttcatggattttgacagctgctcacgtactgcgatcccagagaagagataccactgtcatcccagtgagtaaggagcacgtaacagtctatctgggactgcacgacgtgcgtgataaatccggtgcggtcaacagttcggccgctagggtcgtgctgcatccggacttcaacattcaaaactataatcatgacatcgcactcgtacagctgcaagaaccagtcccactcggaccacatgttatgccagtctgcttacctagactagaaccagaggggcctgctccccatatgctcgggctggtcgccggatgggggatttctaatcctaacgttaccgtcgacgaaattatttcctctggaacaaggacactgtcagacgtgctgcagtatgtgaagttaccagtggtgccccacgctgagtgtaagacctcgtacgagtctcgcagcggcaattattctgtcaccgaaaacatgttctgtgcagggtattatgagggtggaaaggatacatgtctgggagactcggggggggcatttgtgatttttgatgacctatcacagcgctgggtagttcaagggctggtgagttggggcggtcccgaggagtgtggtagtaagcaggtttacggggtttatacaaaggtgtcaaactacgtggactgggtgtgggaacaaatgggtttgcctcagtctgtggtcgaaccccaagtggagcgttag

SEQ ID NO: 238151 - DNA, 2187 bp, Artificial Sequence
  derived and/or modified sequence
atgagatggttgcttctgtactacgcactctgtttttccctatctaaggcttcggcacacactgtagaattaaacaatatgtttggacagatacagtccccaggttatcctgacagctaccccagtgatagcgaggtgacttggaatattacagtccctgacggttttcgtattaagttatacttcatgcacttcaatcttgaatcatcatatctctgtgagtacgattatgtaaaggtggagaccgaggatcaagttctggcaacattttgcgggcgtgaaaccacagatactgagcagacacctggccaggaagtggttctgtcacctggctcttttatgtccatcacttttcgcagtgattttagcaacgaagaaagatttaccggattcgacgctcattacatggccgtggacgtagatgagtgtaaagaacgtgaagatgaggagctgtcgtgcgatcattactgtcacaattacataggagggtactattgcagctgtcggtttggctacattctgcacacagataacaggacctgtagggtggagtgctcagataaccttttcactcagcgcactggagtcattacatccccagacttccctaatccctaccctaaatctagcgagtgcctgtacaccattgaactagaagaaggattcatggtgaatctgcaatttgaggacatattcgacattgaggatcaccctgaggtgccatgcccctacgactatattaaaatcaaggttggacctaaagtgttaggacccttttgcggagagaaggccccagaacctatttctactcagtcccacagtgtcttaatcctgtttcacagcgataactctggcgagaacaggggctggagacttagttacagggcagccggaaacgaatgcccagagctgcagcctccagtgcacggaaagatcgagccaagccaggccaaatattttttcaaagaccaggtcttagtatcgtgtgataccggatacaaagtgctgaaagataatgtcgaaatggacacttttcaaatagaatgcttgaaggacggcacatggagtaacaaaataccaacttgcaaaatcgtggactgcagggcaccgggcgaactggaacacggcctcattactttttcgacccgcaacaatcttactacttataagtccgaaatcaagtattcctgtcaagagccgtattataaaatgctgaataacaacacaggcatatacacttgttccgcccagggcgtgtggatgaataaggtcctcggacgatcactccctacatgtttgcccgaatgtggacagccctctcgcagcctgccaagtttggtgaaaagaattatcggcggccgaaatgcagagcctggactgttcccatggcaggcgttaatcgtggtggaagacacctcgcgagttcccaacgacaaatggttcggaagcggtgctctgttgtctgcttcttggattcttaccgctgctcatgtcctgcgatctcagcgcagagacaccactgtgattcctgtgtctaaggagcacgttacagtgtatttaggcctccacgacgtcagggataagtctggagcagttaactcaagtgcagcgcgagtagtcctccaccccgactttaatatacagaactacaaccacgacattgccttagtgcagctgcaggaacctgtgcccctgggtccccatgtgatgccagtgtgtttgccccgtctagagcctgaagggcccgcaccacatatgttgggcttagttgcaggatggggaatcagcaacccaaacgtcactgtcgacgaaattatttcttctgggacgagaactttgagcgatgtattacagtatgtcaaacttcctgtagtgccacacgccgaatgcaaaacttcctacgaatccaggtctggaaactactcagtgactgagaatatgttttgtgccggctattatgaggggggcaaggacacatgcctgggtgatagcggtggagcgttcgtaatttttgacgatctatcccagcgatgggttgtacagggcctcgtatcctggggagggccagaagaatgcggcagtaaacaggtgtatggggtgtacacgaaggtgagtaactatgtggattgggtgtgggagcaaatgggtcttcctcagagtgtcgttgaaccgcaggtcgagaggtag

SEQ ID NO: 238152 - DNA, 2187 bp, Artificial Sequence
  derived and/or modified sequence
atgagatggctgctgctgtactacgccctgtgcttcagcctgagcaaggccagcgcccacaccgtggagctgaacaacatgttcggccagatccagagccccggctaccccgacagctaccccagcgacagcgaggtgacctggaacatcaccgtgcccgacggcttcagaatcaagctgtacttcatgcacttcaacctggagagcagctacctgtgcgagtacgactacgtgaaggtggagaccgaggaccaggtgctggccaccttctgcggcagagagaccaccgacaccgagcagacccccggccaggaggtggtgctgagccccggcagcttcatgagcatcaccttcagaagcgacttcagcaacgaggagagattcaccggcttcgacgcccactacatggccgtggacgtggacgagtgcaaggagagagaggacgaggagctgagctgcgaccactactgccacaactacatcggcggctactactgcagctgcagattcggctacatcctgcacaccgacaacagaacctgcagagtggagtgcagcgacaacctgttcacccagagaaccggcgtgatcaccagccccgacttccccaacccctaccccaagagcagcgagtgcctgtacaccatcgagctggaggagggcttcatggtgaacctgcagttcgaggacatcttcgacatcgaggaccaccccgaggtgccctgcccctacgactacatcaagatcaaggtgggccccaaggtgctgggccccttctgcggcgagaaggcccccgagcccatcagcacccagagccacagcgtgctgatcctgttccacagcgacaacagcggcgagaacagaggctggagactgagctacagagccgccggcaacgagtgccccgagctgcagccccccgtgcacggcaagatcgagcccagccaggccaagtacttcttcaaggaccaggtgctggtgagctgcgacaccggctacaaggtgctgaaggacaacgtggagatggacaccttccagatcgagtgcctgaaggacggcacctggagcaacaagatccccacctgcaagatcgtggactgcagagcccccggcgagctggagcacggcctgatcaccttcagcaccagaaacaacctgaccacctacaagagcgagatcaagtacagctgccaggagccctactacaagatgctgaacaacaacaccggcatctacacctgcagcgcccagggcgtgtggatgaacaaggtgctgggcagaagcctgcccacctgcctgcccgagtgcggccagcccagcagaagcctgcccagcctggtgaagagaatcatcggcggcagaaacgccgagcccggcctgttcccctggcaggccctgatcgtggtggaggacaccagcagagtgcccaacgacaagtggttcggcagcggcgccctgctgagcgccagctggatcctgaccgccgcccacgtgctgagaagccagagaagagacaccaccgtgatccccgtgagcaaggagcacgtgaccgtgtacctgggcctgcacgacgtgagagacaagagcggcgccgtgaacagcagcgccgccagagtggtgctgcaccccgacttcaacatccagaactacaaccacgacatcgccctggtgcagctgcaggagcccgtgcccctgggcccccacgtgatgcccgtgtgcctgcccagactggagcccgagggccccgccccccacatgctgggcctggtggccggctggggcatcagcaaccccaacgtgaccgtggacgagatcatcagcagcggcaccagaaccctgagcgacgtgctgcagtacgtgaagctgcccgtggtgccccacgccgagtgcaagaccagctacgagagcagaagcggcaactacagcgtgaccgagaacatgttctgcgccggctactacgagggcggcaaggacacctgcctgggcgacagcggcggcgccttcgtgatcttcgacgacctgagccagagatgggtggtgcagggcctggtgagctggggcggccccgaggagtgcggcagcaagcaggtgtacggcgtgtacaccaaggtgagcaactacgtggactgggtgtgggagcagatgggcctgccccagagcgtggtggagccccaggtggagagatag

SEQ ID NO: 238153 - DNA, 2763 bp, Artificial Sequence
  derived and/or modified sequence
atgttcaacaaatcttttggaaccccattcggaggcggcactggaggatttgggacaacgagcacctttggtcagaatactggctttggaaccacatctgggggggcattcggaaccagtgcctttgggagctctaataacacaggtggactgttcggtaatagccaaaccaaaccgggaggtctgttcggcacttcttccttctctcaaccagccacaagcacctcaaccggatttggattcggaacatccaccggtacagctaataccctcttcggcacggcttccacgggcacgtcccttttttcctcacagaataacgccttcgcgcagaataaacccacagggttcgggaactttggcacatcaacctcttcaggcgggttgtttgggaccactaacaccactagcaacccattcgggtctacctccggcagcctcttcggacccagctctttcactgcggcgcccacgggcacaacgattaagtttaatccacctactggaaccgataccatggtaaaggccggcgttagtacaaacatctccacaaagcaccaatgtataactgcaatgaaagagtatgaatctaaatccttggaagagctccgtttggaagattatcaggccaatcgaaaggggccacagaatcaggttggcgctggcaccacaaccggactgttcgggagttcacccgctacatccagtgccacaggcttattttcatcctccaccactaacagtggattcgcctacgggcagaacaagacggccttcggaacttcaacgactggatttggaaccaaccctggggggttgtttggccaacagaatcagcagactacgtccctcttttctaagccctttggacaagcgacaactactcaaaataccggatttagcttcgggaacacttcaaccataggacaacctagcaccaacacgatgggtctgtttggcgttacacaagcatctcagcctggcggcctgttcggcacagccaccaacactagtacaggcactgcctttggcactggtactggattatttggccagactaatactggatttggcgccgtaggctctactttatttgggaacaacaagctcaccacattcggctccagcacaaccagcgccccaagctttggcaccacttctggcggattgtttggcttcgggactaatactagcggcaattcaatttttggtagcaagcctgcaccaggaacactcggcaccggactgggggctggattcggaacggccttgggggccgggcaagcgtcgctctttgggaataatcagcctaagattgggggtcctctgggcacgggcgcattcggtgcccccgggttcaacactacaaccgcgacactgggattcggtgccccgcaggctcccgtggcattaactgaccctaacgcctccgctgcgcagcaggctgtgttacagcaacacatcaacagtctgacttatagccccttcggcgactcgcccctattccggaatcccatgtcagatcccaaaaagaaagaggagaggttgaagcccaccaacccagcagctcagaaggcactgaccacaccgacccactacaagctcacaccccgccccgcaaccagagtgcgtccaaaggcgctccagacaaccggtactgccaaatcccacttgtttgacgggctggacgatgatgagcccagcttagcaaacggcgcttttatgcccaagaagagcatcaagaagttggtgctgaagaaccttaacaattcaaatcttttcagcccagtgaaccgcgatagtgagaacttggcttctccttccgaataccctgagaacggagaaaggtttagctttctctcaaagcctgtggatgagaaccatcagcaggacggggatgaagacagcctggtgagtcacttttacacgaaccccatagccaaaccaataccacagacaccagaatctgcagggaataagcattccaactccaactccgtcgacgacaccattgttgctctcaatatgcgggcagccctgaggaacggcctggaaggatcgagcgaagagacatcattccatgatgagtcactccaggatgatagagaagagatcgaaaacaacagctaccacatgcatccagcaggaattatcttgaccaaggtgggctactacaccattccaagcatggatgatctcgcgaagatcacaaacgagaaaggagagtgcatagtcagtgactttaccattgggcggaagggatatggaagcatctacttcgaaggggacgtgaacctgaccaatctgaacctagacgatattgtccacatccgccgtaaagaagtggtggtctatctagatgacaatcaaaaaccccccgtaggagaaggactgaaccgaaaggctgaagtcaccctggatggagtgtggcccacagataaaacctcacggtgtctgataaagtctcctgatcgactggcagacatcaattacgaaggccgcctggaagctgtgtcaaggaagcagggagctcaatttaaagagtacagaccagagacaggctcatgggtgttcaaggtgtcacacttcagtaagtacggcttgcaagattctgacgaggaagaggaggaacacccgtctaagactagtaccaaaaagttgaaaactgccccacttccccctgcatcgcagactactcctctacagatggctctgaacggaaagcccgcaccaccaccccaggtggagaagaagggacaatag

SEQ ID NO: 238154 - DNA, 2763 bp, Artificial Sequence
  derived and/or modified sequence
atgttcaacaagagctttggcaccccatttggaggcggcaccggcggcttcggcaccaccagcaccttcggccagaacacaggcttcggcaccaccagcggcggggccttcggcaccagcgccttcggcagcagcaacaacacaggaggcctgtttggaaacagccagaccaagccaggcggcctgtttggcaccagcagcttcagccagcctgccaccagcaccagcactggatttggatttggcaccagcactggaacagccaacaccctgtttggaacagccagcacaggcaccagcctcttcagcagccagaacaatgcctttgcccagaacaagcccactggatttggaaactttggcaccagcaccagcagcggcggcctgtttggcaccaccaacaccaccagcaaccccttcggcagcaccagcggcagcctgtttggccccagcagcttcaccgctgcccccaccggcaccaccatcaagttcaacccccccaccggcacagacaccatggtgaaggccggcgtgtccaccaacatcagcaccaagcaccagtgcatcacagccatgaaggagtatgagagcaagagcctggaggagctgcggctggaggactaccaggccaacaggaagggcccccagaaccaggtgggcgccggcaccaccaccggcctgtttggcagcagccctgccaccagcagcgccaccggcctcttcagcagcagcaccaccaacagcggctttgcctacggccagaacaagacagccttcggcaccagcaccaccggcttcggcaccaaccctgggggcctgtttggccagcagaaccagcagaccaccagcctcttcagcaagcccttcggccaggccaccaccacccagaacacaggcttctcctttggaaacaccagcaccatcggccagcccagcaccaacaccatgggcctgtttggagtgacccaggccagccagcccggcggcctgtttggaacagccaccaacaccagcactggaacagcctttggaactggaacaggcctgtttggccagaccaacacaggctttggagctgtgggcagcaccctgtttggaaacaacaagctgaccaccttcggcagcagcaccaccagcgcccccagctttggcaccaccagcggcggcctgtttggatttggcaccaacaccagcggcaacagcatcttcggcagcaagccagcccctggcaccctgggcaccggcctgggcgccggcttcggcacagccctgggcgccggccaggccagcctgtttggaaacaaccagcccaagattggaggccccctgggcactggagccttcggggcccctggcttcaacaccaccacagccaccctgggctttggagccccccaggcccctgtggccctgacagaccccaatgccagcgctgcccagcaggccgtgctgcagcagcacatcaacagcctgacctacagcccctttggagacagccccctcttcaggaaccccatgtctgaccccaagaagaaggaggagcggctgaagcccaccaacccagctgcccagaaggccctgaccacccccacccactacaagctgacccccaggcctgccaccagggtgcggcccaaggccctgcagaccactggaacagccaagagccacctgtttgatggcctggatgatgatgagcccagcctggccaatggagccttcatgcccaagaagagcatcaagaagctggtgctgaagaacctgaacaacagcaacctcttcagccctgtgaacagagattctgagaacctggccagccccagcgagtacccagaaaatggagagcgcttctccttcctgagcaagcctgtggatgagaaccaccagcaggatggagatgaggacagcctggtgagccacttctacaccaaccccatcgccaagcccatcccccagaccccagagagcgctggcaacaagcacagcaacagcaacagcgtggatgacaccatcgtggccctgaacatgagagctgccctgagaaatggcctggagggcagcagcgaggagaccagcttccatgatgagagcctgcaggatgaccgggaggagattgagaacaacagctaccacatgcaccctgctggcatcatcctgaccaaggtgggctactacaccatccccagcatggatgacctggccaagatcaccaatgagaagggggagtgcatcgtgtctgacttcaccatcggcaggaagggctacggcagcatctactttgaaggagatgtgaacctgaccaacctgaacctggatgacatcgtgcacatccggaggaaggaggtggtggtgtacctggatgacaaccagaagccccctgtgggggagggcctgaacaggaaggccgaggtgaccctggatggagtgtggcccacagacaagaccagccgctgcctgatcaagagcccagaccggctggccgacatcaactatgagggccgcctggaggccgtgtccaggaagcagggcgcccagttcaaggagtacagacctgagaccggctcctgggtgttcaaggtgagccacttcagcaaatatggcctgcaggacagtgatgaggaggaggaggagcaccccagcaagaccagcaccaagaagctgaagacagcccccctgcccccagccagccagaccacccccctgcagatggccctgaatggcaagccagcccccccaccccaggtggagaagaagggccagtag

SEQ ID NO: 238155 - DNA, 2763 bp, Artificial Sequence
  derived and/or modified sequence
atgttcaacaagagcttcggcacccccttcggcggcggcaccggcggtttcggtaccacatcaacattcgggcagaataccggtttcgggacaaccagcgggggggctttcggtacatctgctttcggctcttcaaataataccggagggctgttcggcaactcccagacaaagcctggtggactattcggcacttccagtttctcccagcccgctacctctaccagtaccggttttggctttgggacctccacaggaactgccaacacactctttggaactgcaagcacaggtacatctcttttctccagtcagaataatgcatttgcccagaataagcccacgggttttggcaactttggcacatctacttctagcggcggcttattcggcaccaccaatactacttccaatccctttgggtcaacttctggctcactatttggtccctcatctttcacagctgctcctaccgggaccaccataaagtttaacccacctacggggacggatacaatggtcaaggccggggtgtctacaaatatttctaccaagcaccagtgcattaccgcaatgaaggaatacgagagcaaatccctggaagaactccgcctggaggactatcaggccaaccgcaaaggaccgcagaaccaagtgggggcggggactacgaccggactgttcggcagctcacccgccacgtcttccgccacaggcctattctcgagtagcactacaaacagtggatttgcatacgggcagaacaaaacagcctttggcactagcacaacgggttttggcactaaccctgggggcctgtttggacagcagaaccagcagacaacatccctgttttctaaaccattcgggcaggccaccactacccagaataccgggttctcattcgggaatacttcaaccataggccagccctccaccaatacaatgggactgtttggagtgacccaagcttcacagcctggcggcttattcggcaccgctacaaatacaagcacaggcaccgcttttggaactggaacgggcctgtttggacagacaaatactggctttggggcagtcgggagcaccctcttcggcaacaataagttaaccactttcggatcttctactacatccgccccatcttttggtactacgtcaggcggcctctttgggttcggcacaaacactagtggcaactctatctttggttctaagcctgccccgggcacactagggacaggcttgggcgccgggtttggcaccgctctgggcgctggtcaggcatcgttatttggtaataatcagcccaaaatcgggggccctctgggaaccggggcattcggtgcacccggctttaacacaacaactgcaacactcggatttggcgcacctcaggcaccggttgctctcactgacccaaatgccagtgccgctcagcaggccgtcctccagcagcatatcaattccctgacatatagtcctttcggggattcacccctgttccggaatcccatgagcgacccaaagaaaaaggaagagaggctgaagcctacgaatccagccgctcagaaggctctaaccacaccaacacattacaagttgacgccccggccggccacacgcgtgagacctaaagcccttcaaactaccggaaccgccaaatctcatctcttcgacggccttgatgacgatgagccttctttagcaaacggggcctttatgcccaaaaaatccatcaaaaagctggtgctgaagaatctgaacaattccaatttattttcacctgtgaaccgggattccgagaacctggcttcacccagtgaatacccagagaacggtgagcgtttttccttcttgagcaaacctgtggatgaaaatcatcaacaggatggcgacgaagacagcctcgtcagtcacttttatacaaatccgatcgccaaaccgattccacaaactccagagtctgccggaaataagcacagcaactcgaatagcgttgacgatactatagtggctctcaatatgagggcggctctcaggaatgggctcgagggctcctctgaagagacatcctttcacgatgaatccctacaggacgatagagaggagatcgaaaacaattcttaccacatgcacccagccggtattatcctaactaaggtagggtactacactattcccagcatggatgacctggctaagatcaccaacgaaaaaggagaatgcattgtttctgactttactattggaaggaaaggctacggttccatctactttgagggtgacgttaatttaaccaacttgaaccttgacgatattgttcatatcaggaggaaagaggtggttgtgtatttggatgataaccaaaagcccccagtgggagaaggcctgaacaggaaagctgaagtgaccttggacggagtgtggccaacagataagaccagtcgctgcctgatcaagagcccagacagattagcggatatcaattatgaaggccgcctggaagccgtgagtaggaagcagggggcgcagtttaaggaataccgaccagagactggatcttgggttttcaaagttagccatttcagcaagtacggcctgcaggattctgatgaagaagaggaagagcacccctcgaagacttccacgaaaaagctgaagaccgcccccttgccgcctgcatcccagactaccccactgcagatggccctgaatgggaaaccagcccctcccccccaggtcgagaaaaaaggacaatag

SEQ ID NO: 238156 - DNA, 3923 bp, Artificial Sequence
  derived and/or modified sequence
ctgcgcgctgcgcccgaagcggcggtcggtggcaggggtggtagcggcggcggcgacggtttcgtgggggccgcgcgctgctctgtgagcggcgggtggcagcaggggactcctgacacttccccttccccaccgaaccgcgctttctgaaacaaagactcattttgaagatgtttaacaaatcatttggaacaccctttgggggtggcacaggtggctttggcacaacttcaacatttggacagaatactggctttggcactactagtggaggggcatttggaacatctgcatttggttctagcaacaatactggaggcctctttggaaattcacagactaaaccaggaggattgtttggaaccagttcatttagccagccagctacctccacaagcactggctttgggtttggtacgtcaacaggaacagcaaataccttgtttggaactgcaagcacagggaccagtctcttctcatcccaaaacaatgcctttgcacaaaataaaccaactggctttggcaattttggaaccagtactagcagtggaggactctttggaaccacaaataccacctctaatccttttggcagcacatctggctccctctttgggccaagtagttttacagctgctcctactgggactactattaaatttaaccctccaactggtacagatactatggtcaaagctggagttagcactaacataagtaccaagcaccagtgtattactgctatgaaagaatatgaaagcaagtcactagaggaacttcgtttagaggattatcaggctaacaggaagggcccacagaaccaggtgggagcaggtaccacaactggcttgtttgggtcttctccagccacttccagcgcaacaggactcttcagctcctccaccactaattcaggctttgcatatggtcagaacaaaactgcctttggaactagtacaactggatttggaacaaatccaggtggtctctttggccaacagaatcagcagactaccagcctcttcagcaaaccatttggccaggctacaaccacccagaacactggcttttcctttggtaataccagcaccataggacagccaagcaccaacaccatgggattatttggagtaacccaagcctcacagcctggaggtctttttgggacagctacaaacaccagcactgggacagcatttggaacaggaacaggtctctttgggcagaccaatactggatttggtgctgttggttcgaccctgtttggcaataacaagcttactacatttggaagcagcacaaccagtgcaccttcatttggtacaaccagtggcgggctctttggttttggcacaaataccagtgggaatagtatttttggaagtaaaccagcacctgggactcttggaactgggcttggtgcaggatttggaacagctcttggtgctggacaggcatctttgtttgggaacaaccaacctaagattggagggcctcttggtacaggagcctttggggcccctggatttaatactacgacagccactttgggctttggagccccccaggccccagtagctttgacagatccaaatgcttctgctgcccagcaggctgttctccagcagcacatcaatagtctaacatactcaccttttggagactctcctctcttccggaatccgatgtcagaccctaagaagaaggaagagagattgaaaccaacaaatccagcagcccagaaggctcttactacacctactcattataaactgacaccccgccctgccactagagtccggccaaaggctttacaaacaacaggcacagccaagtcacatctctttgatgggctggatgacgatgaaccatccctagccaatggagcattcatgcccaagaagagcattaagaagttggttttgaagaaccttaataatagcaatctcttttctcctgttaatcgtgattcagaaaatctagcttcaccatctgaatatccagaaaatggagagagatttagtttcctaagcaaacctgttgatgagaatcaccagcaggatggagatgaagattcccttgtttcacatttttatactaaccctattgccaaacctattcctcaaaccccagaaagtgctggaaataaacacagcaacagcaacagtgtggatgataccattgttgcattaaacatgcgtgctgctttgcgaaatgggctggaaggaagcagtgaagaaacgtcttttcatgatgagtcacttcaggatgaccgagaagaaatagaaaataattcttaccatatgcacccagcaggtattattctcactaaggttggttactatactattccatctatggatgaccttgctaaaattaccaatgaaaaaggagagtgcattgtctctgatttcactattggtcggaaaggttatggttcaatctattttgaaggagatgtgaatttgacaaatctaaatttggatgatattgtgcatatccggaggaaagaagtagttgtctacttagatgataaccaaaaaccacctgtgggtgaagggctaaataggaaggctgaagttacattggatggagtttggccaacagataaaacatctcgttgtttaataaagagcccagatcgccttgctgatatcaactatgaaggaagattggaagcagtttcaaggaaacagggagctcaattcaaagaataccggcctgaaactggttcttgggtgtttaaggtctcccatttttctaagtatggccttcaggattctgatgaagaggaggaggagcatccgtctaaaactagtacaaagaagttgaagactgctcctttgcctcctgcaagccagactacgcccttgcagatggctcttaatggcaaacctgcacctccacctcaggtagagaaaaaaggacagtgaatttgaatggaatccgtgataccgaagttgaaagcaagtcattcagctaatacaaagctgttttatgacccttggaactttgaagagtacaaacattggcaatcacgttgaaacaagtgcaagggagggcgtgaggtcttgcaggcatctgtctttttactggagagatttaaagaattctcttgctgtttggattattcctctacagattgtcatttttaaaccctttgttctctctcatttggacttgctgaattctctgctcagtgattaacttaagatttgctcatgtgggttcatgcacagtaaattctgcctttattgactacctgatgtgcagtttaatctttttctttacctccatggttttttaaaagttaaattagctttctgaaagggtttttaatctccatttttttaaagttgtttgcttatacttcgggtaaccttgatatttgtattttaatagtacataatctttatgaaaaatagtttgggaatgtaaatgaattattatttggcttggggagattagggcctacattgtttatcgcaattacttgtatcattgatacgggatttctttgtaaagcatcctctacctctcagctgctgaaagctagacctttggtattttccatgctataattcttatggctgctgaaatgtgtggtttttatgatttattaaataatctcttaggaggcatttctggagaatgtgtgtatatacatgtttgcgcgtacaggggaggggagggtatgataaatgtgggaaactggaaatatattgacttttatgtttataatcttggtagcatttagaatgcccctaagaaatctccattgacaaatgaaatgctatagacttggttttccagttatccatattcattttgtctgtcatatgctttgtatcatctccttctttcctaattttttataaccttatatatatatttattataaatatatgtatttctgagggaaa

SEQ ID NO: 238157 - DNA, 2763 bp, Artificial Sequence
  derived and/or modified sequence
atgtttaataaatctttcggcacaccattcggtggcggaactggaggctttggaaccacgagcacgttcggacagaacactggctttggaaccacgtctggcggagccttcggtaccagcgccttcggtagcagcaataatactggtggcctgttcggcaactctcagactaaaccagggggactgtttgggacaagttcgtttagccagccagccaccagcacttctactggcttcggatttggtactagcacagggaccgctaacaccctcttcggcaccgctagcactgggaccagcttgttttcttcacagaacaacgcgttcgcacagaataagcctaccggctttggaaacttcggcacatctacatcctcaggagggttgtttggaaccacaaacactactagtaacccgttcggttctacaagcggatctcttttcggcccatcgtcattcaccgctgctcctacaggcacgactattaaattcaacccacctacagggaccgacaccatggtcaaggcaggagtttcgacaaacatcagcacaaagcaccagtgcatcactgccatgaaagagtacgagagtaaatctttggaggaactgagactggaggactaccaagcgaatcgtaagggccctcagaatcaagtgggtgccggtactacaaccgggcttttcggatcatcacccgctacatcaagtgcgactggcctgttctccagctccacaacaaactccggctttgcctatgggcagaacaaaaccgctttcgggacttctaccacaggcttcggtacaaaccccggagggttgttcgggcagcaaaaccaacaaactaccagtttgttttcaaagccttttggccaagccaccacgacgcagaacaccggatttagtttcgggaatacatctaccattggtcagccatcgacaaacaccatgggcctgttcggggtgacacaggcatcccagccagggggactctttgggaccgctactaatacatcaacgggtacagcctttggcacagggactggcctcttcggacagacaaatactggatttggagccgttggtagcacactgttcgggaacaacaagttaacaacattcggaagcagtactacaagcgctccatcctttggtaccacaagtggaggcctgtttggcttcggcacaaatactagcggtaacagtatctttggatcaaagcctgcacccggtaccctgggcacgggactaggagcagggtttggaacagctttaggtgcagggcaggcctctttgtttggcaataatcagccaaagattggcggtcctttgggcacgggcgctttcggggctccgggatttaatacgactactgcgacccttggatttggagctccacaagccccagtcgccctgaccgatcctaacgcgagcgctgcccagcaagctgtgctgcagcagcatatcaattcgctaacatacagcccttttggggatagtccactgttcaggaacccgatgtctgaccccaagaaaaaagaggagagactgaaacccaccaatccagctgcccagaaagccctaacaactccaactcactataagctgacgcccagaccagccacgagagtaaggccaaaggccctccagaccacaggcactgctaaatcccacctgtttgacggactggacgatgatgagcctagcctcgccaacggcgcattcatgccaaagaaatccatcaagaaactcgtcctgaaaaacctgaacaactccaacctcttcagcccagtgaaccgggacagcgagaatttggcctctccctcagagtaccccgaaaatggagagcgattttccttcctgagcaaacctgtggatgagaaccatcaacaggatggggacgaagatagcttggtgtcccatttctatacaaaccctatcgcgaagcctatcccgcagacaccagagagcgcgggtaataaacattccaattctaattcagtggatgatactatcgtcgcactcaatatgcgagcagcactccgaaacggtctagaagggtcttcagaggagactagtttccatgacgaatccctccaggatgaccgtgaggagatagagaacaattcgtaccacatgcatcccgctggcattatcctgactaaggtgggctactatacaattcccagtatggacgacctcgccaagattaccaatgagaagggtgagtgtattgtttccgatttcaccatcggtcggaaagggtatggctccatctactttgagggggacgtgaatctgaccaacctgaacctggacgatattgtgcacattcggcgaaaggaggtagtggtctatcttgatgacaatcagaagccacccgtgggggagggactcaataggaaggctgaggtcacactcgatggtgtgtggccaacagacaaaaccagccgctgtcttatcaaaagcccagatagattagcggacatcaactacgagggaaggctagaggccgtgtccagaaagcagggagcgcagtttaaggagtatagacccgaaactgggtcatgggtcttcaaggtctctcattttagcaagtatggcctgcaggacagcgatgaggaagaagaggagcacccttctaagacatcaaccaagaaactgaaaaccgccccactccccccagcctctcagactacccccctgcaaatggccctcaatggtaagcccgctcctccgccacaggtggagaagaagggacagtag

SEQ ID NO: 238158 - DNA, 2763 bp, Artificial Sequence
  derived and/or modified sequence
atgttcaacaagagcttcggcacccccttcggcggcggcaccggcggcttcggcaccaccagcaccttcggccagaacaccggcttcggcaccaccagcggcggcgccttcggcaccagcgccttcggcagcagcaacaacaccggcggcctgttcggcaacagccagaccaagcccggcggcctgttcggcaccagcagcttcagccagcccgccaccagcaccagcaccggcttcggcttcggcaccagcaccggcaccgccaacaccctgttcggcaccgccagcaccggcaccagcctgttcagcagccagaacaacgccttcgcccagaacaagcccaccggcttcggcaacttcggcaccagcaccagcagcggcggcctgttcggcaccaccaacaccaccagcaaccccttcggcagcaccagcggcagcctgttcggccccagcagcttcaccgccgcccccaccggcaccaccatcaagttcaacccccccaccggcaccgacaccatggtgaaggccggcgtgagcaccaacatcagcaccaagcaccagtgcatcaccgccatgaaggagtacgagagcaagagcctggaggagctgagactggaggactaccaggccaacagaaagggcccccagaaccaggtgggcgccggcaccaccaccggcctgttcggcagcagccccgccaccagcagcgccaccggcctgttcagcagcagcaccaccaacagcggcttcgcctacggccagaacaagaccgccttcggcaccagcaccaccggcttcggcaccaaccccggcggcctgttcggccagcagaaccagcagaccaccagcctgttcagcaagcccttcggccaggccaccaccacccagaacaccggcttcagcttcggcaacaccagcaccatcggccagcccagcaccaacaccatgggcctgttcggcgtgacccaggccagccagcccggcggcctgttcggcaccgccaccaacaccagcaccggcaccgccttcggcaccggcaccggcctgttcggccagaccaacaccggcttcggcgccgtgggcagcaccctgttcggcaacaacaagctgaccaccttcggcagcagcaccaccagcgcccccagcttcggcaccaccagcggcggcctgttcggcttcggcaccaacaccagcggcaacagcatcttcggcagcaagcccgcccccggcaccctgggcaccggcctgggcgccggcttcggcaccgccctgggcgccggccaggccagcctgttcggcaacaaccagcccaagatcggcggccccctgggcaccggcgccttcggcgcccccggcttcaacaccaccaccgccaccctgggcttcggcgccccccaggcccccgtggccctgaccgaccccaacgccagcgccgcccagcaggccgtgctgcagcagcacatcaacagcctgacctacagccccttcggcgacagccccctgttcagaaaccccatgagcgaccccaagaagaaggaggagagactgaagcccaccaaccccgccgcccagaaggccctgaccacccccacccactacaagctgacccccagacccgccaccagagtgagacccaaggccctgcagaccaccggcaccgccaagagccacctgttcgacggcctggacgacgacgagcccagcctggccaacggcgccttcatgcccaagaagagcatcaagaagctggtgctgaagaacctgaacaacagcaacctgttcagccccgtgaacagagacagcgagaacctggccagccccagcgagtaccccgagaacggcgagagattcagcttcctgagcaagcccgtggacgagaaccaccagcaggacggcgacgaggacagcctggtgagccacttctacaccaaccccatcgccaagcccatcccccagacccccgagagcgccggcaacaagcacagcaacagcaacagcgtggacgacaccatcgtggccctgaacatgagagccgccctgagaaacggcctggagggcagcagcgaggagaccagcttccacgacgagagcctgcaggacgacagagaggagatcgagaacaacagctaccacatgcaccccgccggcatcatcctgaccaaggtgggctactacaccatccccagcatggacgacctggccaagatcaccaacgagaagggcgagtgcatcgtgagcgacttcaccatcggcagaaagggctacggcagcatctacttcgagggcgacgtgaacctgaccaacctgaacctggacgacatcgtgcacatcagaagaaaggaggtggtggtgtacctggacgacaaccagaagccccccgtgggcgagggcctgaacagaaaggccgaggtgaccctggacggcgtgtggcccaccgacaagaccagcagatgcctgatcaagagccccgacagactggccgacatcaactacgagggcagactggaggccgtgagcagaaagcagggcgcccagttcaaggagtacagacccgagaccggcagctgggtgttcaaggtgagccacttcagcaagtacggcctgcaggacagcgacgaggaggaggaggagcaccccagcaagaccagcaccaagaagctgaagaccgcccccctgccccccgccagccagaccacccccctgcagatggccctgaacggcaagcccgccccccccccccaggtggagaagaagggccagtag

SEQ ID NO: 238159 - protein, 1726 aa, Artificial Sequence
  derived and/or modified sequence
MFNKSFGTPFGGGTGGFGTTSTFGQNTGFGTTSGGAFGTSAFGSSNNTGGLFGNSQTKPGGLFGTSSFSQPATSTSTGFGFGTSTGTANTLFGTASTGTSLFSSQNNAFAQNKPTGFGNFGTSTSSGGLFGTTNTTSNPFGSTSGSLFGPSSFTAAPTGTTIKFNPPTGTDTMVKAGVSTNISTKHQCITAMKEYESKSLEELRLEDYQANRKGPQNQVGAGTTTGLFGSSPATSSATGLFSSSTTNSGFAYGQNKTAFGTSTTGFGTNPGGLFGQQNQQTTSLFSKPFGQATTTQNTGFSFGNTSTIGQPSTNTMGLFGVTQASQPGGLFGTATNTSTGTAFGTGTGLFGQTNTGFGAVGSTLFGNNKLTTFGSSTTSAPSFGTTSGGLFGFGTNTSGNSIFGSKPAPGTLGTGLGAGFGTALGAGQASLFGNNQPKIGGPLGTGAFGAPGFNTTTATLGFGAPQAPVALTDPNASAAQQAVLQQHINSLTYSPFGDSPLFRNPMSDPKKKEERLKPTNPAAQKALTTPTHYKLTPRPATRVRPKALQTTGTAKSHLFDGLDDDEPSLANGAFMPKKSIKKLVLKNLNNSNLFSPVNRDSENLASPSEYPENGERFSFLSKPVDENHQQDGDEDSLVSHFYTNPIAKPIPQTPESAGNKHSNSNSVDDTIVALNMRAALRNGLEGSSEETSFHDESLQDDREEIENNSYHMHPAGIILTKVGYYTIPSMDDLAKITNEKGECIVSDFTIGRKGYGSIYFEGDVNLTNLNLDDIVHIRRKEVVVYLDDNQKPPVGEGLNRKAEVTLDGVWPTDKTSRCLIKSPDRLADINYEGRLEAVSRKQGAQFKEYRPETGSWVFKVSHFSKYGLQDSDEEEEEHPSKTSTKKLKTAPLPPASQTTPLQMALNGKPAPPPQSQSPEVEQLGRVVELDSDMVDITQEPVLDTMLEESMPEDQEPVSASTHIASSLGINPHVLQIMKASLLTDEEDVDMALDQRFSRLPSKADTSQEICSPRLPISASHSSKTRSLVGGLLQSKFTSGAFLSPSVSVQECRTPRAASLMNIPSTSSWSVPPPLTSVFTMPSPAPEVPLKTVGTRRQLGLVPREKSVTYGKGKLLMDMALFMGRSFRVGWGPNWTLANSGEQLNGSHELENHQIADSMEFGFLPNPVAVKPLTESPFKVHLEKLSLRQRKPDEDMKLYQTPLELKLKHSTVHVDELCPLIVPNLGVAVIHDYADWVKEASGDLPEAQIVKHWSLTWTLCEALWGHLKELDSQLNEPREYIQILERRRAFSRWLSCTATPQIEEEVSLTQKNSPVEAVFSYLTGKRISEACSLAQQSGDHRLALLLSQFVGSQSVRELLTMQLVDWHQLQADSFIQDERLRIFALLAGKPVWQLSEKKQINVCSQLDWKRSLAIHLWYLLPPTASISRALSMYEEAFQNTSDSDRYACSPLPSYLEGSGCVIAEEQNSQTPLRDVCFHLLKLYSDSIREKAVRELLTRHCQLLETPESWAKETFLTQKLRVPAKWIHEAKAVRAHMESDKHLEALCLFKAEHWNRCHKLIIRHLASDAIINENYDYLKGFLEDLAPPERSSLIQDWETSGLVYLDYIRVIEMLRHIQQVDCSGNDLEQLHIKVTSLCSRIEQIQCYSAKDRLAQSDMAKRVANLLRVVLSLHHPPDRTSDSTPDPQRVPLRLLAPHIGRLPMPEDYAMDELRSLTQSYLRELAVGSL

SEQ ID NO: 238160 - protein, 1638 aa, Artificial Sequence
  derived and/or modified sequence
MFNKSFGTPFGGGTGGFGTTSTFGQNTGFGTTSGGAFGTSAFGSSNNTGGLFGNSQTKPGGLFGTSSFSQPATSTSTGFGFGTSTGTANTLFGTASTGTSLFSSQNNAFAQNKPTGFGNFGTSTSSGGLFGTTNTTSNPFGSTSGSLFGPSSFTAAPTGTTIKFNPPTGTDTMVKAGVSTNISTKHQCITAMKEYESKSLEELRLEDYQANRKGPQNQVGAGTTTGLFGSSPATSSATGLFSSSTTNSGFAYGQNKTAFGTSTTGFGTNPGGLFGQQNQQTTSLFSKPFGQATTTQNTGFSFGNTSTIGQPSTNTMGLFGVTQASQPGGLFGTATNTSTGTAFGTGTGLFGQTNTGFGAVGSTLFGNNKLTTFGSSTTSAPSFGTTSGGLFGFGTNTSGNSIFGSKPAPGTLGTGLGAGFGTALGAGQASLFGNNQPKIGGPLGTGAFGAPGFNTTTATLGFGAPQAPVALTDPNASAAQQAVLQQHINSLTYSPFGDSPLFRNPMSDPKKKEERLKPTNPAAQKALTTPTHYKLTPRPATRVRPKALQTTGTAKSHLFDGLDDDEPSLANGAFMPKKSIKKLVLKNLNNSNLFSPVNRDSENLASPSEYPENGERFSFLSKPVDENHQQDGDEDSLVSHFYTNPIAKPIPQTPESAGNKHSNSNSVDDTIVALNMRAALRNGLEGSSEETSFHDESLQDDREEIENNSYHMHPAGIILTKVGYYTIPSMDDLAKITNEKGECIVSDFTIGRKGYGSIYFEGDVNLTNLNLDDIVHIRRKEVVVYLDDNQKPPVGEGLNRKAEVTLDGVWPTDKTSRCLIKSPDRLADINYEGRLEAVSRKQGAQFKEYRPETGSWVFKVSHFSKYGLQDSDEEEEEHPSKTSTKKLKTAPLPPASQTTPLQMALNGKPAPPPQSQSPEVEQLGRVVELDSDMVDITQEPVLDTMLEESMPEDQEPVSASTHIASSLGINPHVLQIMKASLLTDEEDVDMALDQRFSRLPSKADTSQEICSPRLPISASHSSKTRSLVGGLLQSKFTSGAFLSPSVSVQECRTPRAASLMNIPSTSSWSVPPPLTSVFTMPSPAPEVPLKTVGTRRQLGLVPREKSVTYGKGKLLMDMALFMGRSFRVGWGPNWTLANSGEQLNGSHELENHQIADSMEFGFLPNPVAVKPLTESPFKVHLEKLSLRQRKPDEDMKLYQTPLELKLKHSTVHVDELCPLIVPNLGVAVIHDYADWVKEASGDLPEAQIVKHWSLTWTLCEALWGHLKELDSQLNEPREYIQILERRRAFSRWLSCTATPQIEEEVSLTQKNSPVEAVFSYLTGKRISEACSLAQQSGDHRLALLLSQFVGSQSVRELLTMQLVDWHQLQADSFIQDERLRIFALLAGKPVWQLSEKKQINVCSQLDWKRSLAIHLWYLLPPTASISRALSMYEEAFQNTSDSDRYACSPLPSYLEGSGCVIAEEQNSQTPLRDVCFHLLKLYSDSIREKAVRELLTRHCQLLETPESWAKETFLTQKLRVPAKWIHEAKAVRAHMESDKHLEALCLFKAEHWNRCHKLIIRHLASDAIINENYDYLKGFLEDLAPPERSSLIQDWETSGLVYLDYIRVIEMLRHIQQIALFCVEWIAQVMTWSSYTSK

SEQ ID NO: 238161 - DNA, 5181 bp, Artificial Sequence
  derived and/or modified sequence
atgtttaataaaagttttgggacaccctttggaggtggtaccggcgggttcggcactactagcaccttcggtcaaaatactggattcggcaccaccagcggtggggctttcggcacatcagcttttgggagctcaaataatacgggaggcctctttgggaattcgcagaccaagccaggaggtttatttgggacatcctcattttcccaacctgccaccagcaccagcacggggttcggttttggaacttcgacaggcaccgccaacactctctttggaaccgcttccaccgggaccagcctgttctcctcgcaaaataacgcctttgcccagaataagccaacaggctttgggaattttgggacttcaaccagtagcggcggtctgtttggaactacgaataccacatccaaccccttcggcagcacgagcgggtctttattcggaccatcctccttcacggccgctcccactggtaccaccataaagttcaatccacccaccggaaccgacactatggtgaaggccggggtgagcaccaacatttccacgaagcatcagtgcataaccgcaatgaaggaatacgaaagcaagtctctcgaagagctcaggcttgaggactaccaggccaacaggaagggccctcagaaccaggtcggggccgggactacaaccggcctctttggctcatcacccgctacgtcctccgcaacaggactgttcagtagctccacaactaactcaggctttgcctacggccagaataaaactgcgttcggtacatccaccacgggatttgggacaaaccctggcggtttgtttgggcagcaaaaccagcagaccacctcactgttctccaaaccattcggccaggccaccacgacccagaatacaggctttagctttggaaacactagcaccattggacaaccatctactaacaccatgggcctattcggtgtcacccaggcgtcccagccaggcgggctctttggcacggcaaccaacacaagcaccggaacagcctttgggactggcaccggtctttttggccagaccaatacaggctttggggcggtcggatccacattattcggcaataataaattaactacattcggcagctcaaccacaagcgcgccctcctttggtacaaccagcggggggttgttcggtttcgggaccaacacttctggtaattctatcttcggctctaaacccgccccgggcactttagggactggcttgggggcaggatttgggaccgccctcggtgcaggccaggcatccttattcggaaataaccagcctaagattggcggtcccctaggcacaggggcattcggagccccgggattcaacactaccacagccacactaggcttcggcgccccacaggcgcctgtagctctgactgatcctaatgcctccgccgcgcagcaagcagttctgcagcaacacatcaactccctgacctacagcccatttggtgactcccccctgtttcggaatccaatgtcagatccgaaaaaaaaggaagaaagactcaaaccaaccaatcccgcagcacaaaaggccctcactactcctacgcattacaagttaacaccacgaccagctacacgagtacggccaaaggctctgcaaaccactggaacagccaagagccatttgtttgacggtctcgacgacgatgagccaagcttggccaatggtgctttcatgcccaagaaatcaattaagaaactggtccttaaaaatcttaacaattctaacctgttctcccctgtgaatagggactccgaaaacctggccagcccatcagaatacccggagaatggagagcgattctcctttctgagtaaaccagtggatgagaatcaccaacaggatggcgatgaagactccttagtttctcacttttatacaaaccctatagccaagccaatcccacagactccagaaagtgccggcaacaagcatagcaattctaactccgtggacgatacaatcgtcgcgctgaacatgagagcagctctcagaaatgggctggaaggcagttccgaggaaactagcttccatgacgaatctcttcaggacgacagagaggaaattgaaaataatagttaccatatgcatcccgccggaatcatacttactaaggttggctattacactatcccgagcatggatgatctcgcaaagataaccaacgagaagggcgagtgtatcgtctccgatttcactatcggcaggaaggggtatggttcaatatatttcgagggcgatgtgaatcttacaaatctaaatctggatgacattgtgcacatccggcggaaggaagtggttgtgtacctggatgacaatcagaagccccctgttggcgaaggattaaatcggaaggccgaggtcaccctggacggggtgtggcccaccgacaaaacttctagatgcctaataaagtctccggaccgcctggccgacattaactacgaaggccgactggaggccgtaagccggaagcagggcgcccagttcaaggagtaccgtccagaaaccggaagttgggtgttcaaagtgagtcacttcagcaaatatggacttcaggacagtgatgaagaggaggaagaacacccgtccaagaccagtacaaagaagctgaaaacagcccctctcccacctgcgtcccagaccactcctctgcagatggcactgaacggtaaaccggcacctcccccccagagtcagtctcctgaagtggagcaactgggacgcgtagtggagctcgacagtgacatggtggacatcacccaggagccagtactagacaccatgttggaggaatctatgcctgaggaccaagagccagtgagcgcctccactcatatagcctcgtctctggggatcaatccacacgtgctccaaatcatgaaagcgtctctgctgacagatgaggaagatgtggatatggctctggatcagcgttttagtcgtctcccttccaaagccgacacgtcacaggagatctgttcacctagactgccaatatccgcaagccacagctctaagacccggtcactcgtcggcggtttactgcaatcaaaatttacaagtggcgctttcctctccccatcagtctctgttcaagagtgccgcacccctcgagctgccagtctgatgaacatcccaagcacatccagctggtctgtgccgcctccccttacaagcgtatttacaatgccttcaccggcaccagaggtacctctcaagacagtcggtaccaggcgccagctgggcctcgtccctagggaaaaatcagtaacctatgggaagggtaaactgttgatggatatggccctgtttatgggccgctcctttcgagttgggtggggaccaaattggacactggctaactcgggggaacagctgaatggctcacacgagctggagaaccatcagatcgctgatagcatggagttcggattcctgcccaatccagtagcagtgaaaccgctgaccgaatcgccctttaaggtgcatttggaaaagttgtctctgcggcaacgcaagcccgacgaggatatgaagctgtaccagacccctctggagctcaagctcaagcattcgaccgtgcacgtcgatgagttatgtcccctgatcgtccctaacctaggcgtggccgtcatccatgattacgccgattgggtgaaggaggcctcgggtgacctgcccgaggcacagattgtaaagcactggagcctgacttggactctctgcgaagccctttggggacatctcaaggaactggacagtcagctcaatgagccaagagaatacatccagatcctcgagcgccgtagagcattttcccgttggctgagttgtaccgcaactcctcagatcgaggaggaagtaagtctgacacagaaaaatagtcccgtggaagcggtcttctcatacctcactggcaagcggatatccgaagcgtgctccctggcccaacaaagcggcgatcacagactagcactgctactgtcacagtttgtcggaagccagtccgtgagagagctgctgactatgcagctagttgactggcaccagctgcaggcagacagcttcattcaggacgagagactccgcatttttgctcttctggccggtaagcctgtctggcaactgagtgagaaaaagcagatcaatgtgtgctctcagctggattggaaaaggtctctggcaattcatttatggtatctgctgccccccaccgcaagcatttcacgggctctgagtatgtatgaagaagccttccagaatacgagcgactccgaccgctacgcatgctcccctcttcctagctatttggagggatcaggctgtgtgattgcagaagaacagaacagccagacaccccttcgtgacgtgtgttttcatttgctgaagctttactccgattctattcgcgagaaggccgtcagagaactgctgactcgtcactgccagctactggaaacccccgagtcatgggcaaaggagacatttttgactcagaagctacgtgtgcctgctaaatggatacacgaggctaaagccgttcgcgcccacatggaaagcgataagcatttagaggcattgtgcctgttcaaggccgagcactggaatcggtgccataaactaattattagacacctggcctccgatgccattatcaatgaaaattacgactatttgaaaggcttcctggaggacctcgctcctccagaaaggtcatcgctcatccaggactgggagacctcaggcttggtctaccttgattacattagggtgattgagatgctgcggcacattcagcaggtggattgctccggtaatgacttagagcagctgcatatcaaggtcacttcactttgtagtcgcattgagcaaattcaatgttatagcgctaaggatcgtctagcccaaagcgatatggccaagcgggtcgctaatctgcttcgcgtcgttctctcactgcaccacccccctgatcggacatctgacagcacaccagacccacagagggtgccgctccgactgctggccccccacattggtaggttgcccatgcctgaggattatgccatggacgaactcagatccctcactcagagctatctacgggagctcgccgttgggtccctttag

SEQ ID NO: 238162 - DNA, 4917 bp, Artificial Sequence
  derived and/or modified sequence
atgttcaataaatcctttggaacgcccttcggtgggggtaccggaggttttggaaccacgtccacgttcgggcagaataccgggtttggcacaactagtggcggcgcttttggcacttccgcattcggatcctctaacaataccggcggactgtttggcaattcccagaccaagcccggaggtttgttcggcacctctagtttcagccagcccgcaacatccacaagcacgggctttggatttggaaccagcaccggcaccgccaatactctatttggaacagcatcgacaggcacctcccttttttcttcccaaaacaacgcattcgcacaaaacaagccaaccgggttcggtaacttcggaacatcaacttccagtggcggtctgttcgggacgactaacaccacgtccaacccttttggctctacctctggcagtttattcggtccctcctcattcactgcagctcccacagggacaactatcaaattcaatccccctacaggtactgatacgatggtgaaagccggtgtttcaacgaatattagcacaaagcatcagtgcatcaccgcaatgaaggagtacgagtccaagtccttggaagaattgcggctggaagactaccaggcgaatcgcaagggtccacagaatcaagtaggcgccggcacaaccacaggcttattcgggagcagtcctgccacgtcatctgcaactggcttattttcctcttctacaaccaattcaggatttgcttacggacagaacaagactgccttcggtactagtactactggatttgggacaaaccccggcgggctctttggccagcaaaaccaacagacaacgtctctcttttccaaacctttcggccaggcaaccacaacacagaacactggcttttccttcgggaacacatctacaatcggtcagccatctaccaacacgatgggactgttcggcgtaacccaggcaagccagcccggaggccttttcgggacagccaccaacacctccactggaaccgccttcgggaccggcactggcctgtttggacagaccaatacaggttttggcgctgtaggctctaccttattcggtaacaacaagttgaccacttttggcagctccaccacatccgccccaagttttggtaccaccagtggcggtctctttggatttggcactaatactagtggcaatagcatctttggctccaagcctgccccaggaacgctgggaaccggactgggagcaggctttggtactgccctgggcgcaggacaggccagcctgtttggaaacaatcagcccaagatcggtgggcccctaggaaccggggcttttggcgcccccgggtttaacaccaccaccgccacactcgggttcggggccccacaagctcccgtcgctctaacagatcccaacgcttctgctgctcagcaggccgtcctgcagcaacacattaattctttgacctattcccccttcggtgactcccccctcttccgtaatccaatgtcggaccctaaaaagaaggaggagagactgaagcctaccaacccagctgcccagaaggccctaacaacacctacccactataaactgacccctaggccggccacaagggtccggccaaaagcgctgcagaccactggcactgccaagtcacacctgttcgatgggttggatgacgacgagccatctctcgccaacggggcttttatgccgaaaaaatctatcaagaaactggtattgaagaatcttaataattcgaatctctttagcccggtgaaccgcgattcggagaatttggcgtcaccgtccgagtaccctgagaacggtgagcggttcagttttctcagtaagcccgtggatgaaaaccatcaacaagatggcgacgaggacagcctggtttctcacttttacacaaaccctatcgccaagccgatccctcagacccccgagtctgctggtaataagcatagcaacagtaatagcgtggatgacactattgtcgctctcaatatgcgcgctgccctaagaaatggcctggagggaagctccgaagaaacctcattccatgatgagagtctgcaggatgatcgggaagagatcgagaacaactcttaccacatgcatcccgctgggatcatcctgactaaggttggttattatactattcccagcatggatgatctggcaaagatcaccaacgagaaaggcgaatgtatcgtcagcgacttcacaattggacggaagggatatggtagcatatatttcgaaggtgacgtgaatcttactaacctcaatctagatgacattgtacatatcaggcgcaaagaagtcgtggtatatctagacgacaatcaaaaaccacctgtaggagaagggctgaataggaaggccgaagttacactggatggggtgtggcctaccgacaaaactagtaggtgtctcataaaatcgccggaccggttggccgacattaattacgaggggcgcctggaagccgtcagtaggaagcagggcgcccagtttaaggagtatcggcccgaaaccggcagctgggtgttcaaggtttctcacttcagcaaatacggcctgcaggacagcgatgaagaagaggaggagcatccgtctaaaacatccaccaagaagctgaagacagcacccctgccacccgcatcccaaactactccattacagatggccctaaatggtaagcccgccccaccaccccagtctcagagtcctgaagtcgaacagctgggacgagtcgtagagctagactctgatatggtggacatcactcaggagccagtgctcgatacgatgctggaagagagtatgcccgaggatcaggagccagttagcgcatctacgcacatcgcaagcagcctaggtattaacccacacgtcctacagataatgaaggccagccttcttaccgatgaggaggatgtcgacatggcactggaccaacgctttagccgcctgccaagcaaggcagatacctcccaggaaatctgctctccccggttacctatctctgcatcccacagctctaagacaaggtcgttggtaggtggactcctgcaaagcaaattcacatctggagcattcttgtccccctccgtctccgttcaggaatgccgcaccccccgggcagcctctctgatgaatattccgtccacttcctcttggtccgttccgccacccctaacctccgtctttacaatgccctcacccgcgcctgaggttccattgaaaaccgtcggaacccgaaggcagcttgggctggtgccccgcgagaagtccgtgacatatgggaaaggcaagctgctgatggacatggctctatttatggggcgctccttccgcgtgggatgggggcccaattggaccctggctaatagcggggaacagctgaatggcagccacgagttggaaaaccaccagatcgccgatagcatggagtttggttttctccccaacccagtcgccgttaagccactcacagaaagtcccttcaaagtgcatttagagaagttaagcttacgacaaaggaaacccgatgaagacatgaagttatatcagactcctcttgaactgaaactgaagcactccacagtccacgtggacgagctgtgtcccctaattgttcctaatttgggtgtcgccgtgatacatgactacgccgactgggtgaaagaggcgagtggtgacttgccagaagcgcaaatcgtcaaacactggtctctcacctggactctgtgcgaagctctttggggtcacctgaaggaactggacagccaactgaacgagcctagagagtacatacaaattttagaaagacgacgcgccttctcacgttggctgtcatgcacggccactccgcagatcgaagaggaggtgagcctgactcagaagaactcacccgtggaagcggtgttttcatatctgaccggcaagaggatctcagaggcctgcagtctcgcccagcagtctggagaccatcggctggcccttcttctctctcagttcgtgggtagtcagagcgtgcgagagctcttgacaatgcagttagtggattggcatcaattacaggctgacagctttatacaggatgaacgcctacgcatattcgccctcttggctggaaagcccgtgtggcaactcagcgaaaagaaacaaatcaacgtgtgcagccaattggactggaagaggtcgcttgcaattcacctgtggtacctcctcccacccacagcctcaatctcaagggctttgtccatgtatgaagaagcttttcagaacaccagtgactccgaccggtacgcatgttctcctctgccatcatatctcgagggatccggatgcgtgattgcggaggaacagaattctcagaccccgctcagagatgtctgcttccacctccttaagctatatagtgatagcattagagagaaagccgtgcgagaacttctgacccgtcactgtcaactgcttgagacgcctgagtcctgggctaaggagacatttttaacgcagaaacttcgcgtgcctgccaagtggatacatgaggctaaagccgtgagggcccacatggagagcgacaagcatctggaagctctgtgtctgttcaaagccgaacactggaatcggtgccacaagctgatcatccggcatctggcgtcggacgcaatcattaacgagaactacgattacctgaaaggctttctcgaggacctcgcaccccctgagaggagctccttgattcaggactgggagaccagtggactggtgtacttggattatatccgcgttatagaaatgctgcggcacatccagcagatagccctcttctgtgtggaatggatcgcccaagtcatgacctggagttcttatacttccaaatag

SEQ ID NO: 238163 - DNA, 5181 bp, Artificial Sequence
  derived and/or modified sequence
atgttcaacaagagctttggcaccccatttggaggcggcaccggcggcttcggcaccaccagcaccttcggccagaacacaggcttcggcaccaccagcggcggggccttcggcaccagcgccttcggcagcagcaacaacacaggaggcctgtttggaaacagccagaccaagccaggcggcctgtttggcaccagcagcttcagccagcctgccaccagcaccagcactggatttggatttggcaccagcactggaacagccaacaccctgtttggaacagccagcacaggcaccagcctcttcagcagccagaacaatgcctttgcccagaacaagcccactggatttggaaactttggcaccagcaccagcagcggcggcctgtttggcaccaccaacaccaccagcaaccccttcggcagcaccagcggcagcctgtttggccccagcagcttcaccgctgcccccaccggcaccaccatcaagttcaacccccccaccggcacagacaccatggtgaaggccggcgtgtccaccaacatcagcaccaagcaccagtgcatcacagccatgaaggagtatgagagcaagagcctggaggagctgcggctggaggactaccaggccaacaggaagggcccccagaaccaggtgggcgccggcaccaccaccggcctgtttggcagcagccctgccaccagcagcgccaccggcctcttcagcagcagcaccaccaacagcggctttgcctacggccagaacaagacagccttcggcaccagcaccaccggcttcggcaccaaccctgggggcctgtttggccagcagaaccagcagaccaccagcctcttcagcaagcccttcggccaggccaccaccacccagaacacaggcttctcctttggaaacaccagcaccatcggccagcccagcaccaacaccatgggcctgtttggagtgacccaggccagccagcccggcggcctgtttggaacagccaccaacaccagcactggaacagcctttggaactggaacaggcctgtttggccagaccaacacaggctttggagctgtgggcagcaccctgtttggaaacaacaagctgaccaccttcggcagcagcaccaccagcgcccccagctttggcaccaccagcggcggcctgtttggatttggcaccaacaccagcggcaacagcatcttcggcagcaagccagcccctggcaccctgggcaccggcctgggcgccggcttcggcacagccctgggcgccggccaggccagcctgtttggaaacaaccagcccaagattggaggccccctgggcactggagccttcggggcccctggcttcaacaccaccacagccaccctgggctttggagccccccaggcccctgtggccctgacagaccccaatgccagcgctgcccagcaggccgtgctgcagcagcacatcaacagcctgacctacagcccctttggagacagccccctcttcaggaaccccatgtctgaccccaagaagaaggaggagcggctgaagcccaccaacccagctgcccagaaggccctgaccacccccacccactacaagctgacccccaggcctgccaccagggtgcggcccaaggccctgcagaccactggaacagccaagagccacctgtttgatggcctggatgatgatgagcccagcctggccaatggagccttcatgcccaagaagagcatcaagaagctggtgctgaagaacctgaacaacagcaacctcttcagccctgtgaacagagattctgagaacctggccagccccagcgagtacccagaaaatggagagcgcttctccttcctgagcaagcctgtggatgagaaccaccagcaggatggagatgaggacagcctggtgagccacttctacaccaaccccatcgccaagcccatcccccagaccccagagagcgctggcaacaagcacagcaacagcaacagcgtggatgacaccatcgtggccctgaacatgagagctgccctgagaaatggcctggagggcagcagcgaggagaccagcttccatgatgagagcctgcaggatgaccgggaggagattgagaacaacagctaccacatgcaccctgctggcatcatcctgaccaaggtgggctactacaccatccccagcatggatgacctggccaagatcaccaatgagaagggggagtgcatcgtgtctgacttcaccatcggcaggaagggctacggcagcatctactttgaaggagatgtgaacctgaccaacctgaacctggatgacatcgtgcacatccggaggaaggaggtggtggtgtacctggatgacaaccagaagccccctgtgggggagggcctgaacaggaaggccgaggtgaccctggatggagtgtggcccacagacaagaccagccgctgcctgatcaagagcccagaccggctggccgacatcaactatgagggccgcctggaggccgtgtccaggaagcagggcgcccagttcaaggagtacagacctgagaccggctcctgggtgttcaaggtgagccacttcagcaaatatggcctgcaggacagtgatgaggaggaggaggagcaccccagcaagaccagcaccaagaagctgaagacagcccccctgcccccagccagccagaccacccccctgcagatggccctgaatggcaagccagcccccccaccccagagccagagccctgaggtggagcagctgggccgggtggtggagctggacagcgacatggtggacatcacccaggagcctgtgctggacaccatgctggaggagagcatgcctgaggaccaggagcctgtgtctgccagcacccacatcgccagcagcctgggcatcaacccccacgtgctgcagatcatgaaggccagcctgctgacagatgaggaggatgtggacatggccctggaccagcgcttcagccggctgcccagcaaggctgacaccagccaggagatctgcagcccccggctgcccatcagcgccagccacagcagcaagaccaggagcctggtgggcggcctgctgcagagcaagttcaccagcggggccttcctgagccccagcgtgtctgtgcaggagtgcaggaccccccgggccgccagcctgatgaacatccccagcaccagctcctggagcgtgcccccacccctgaccagcgtcttcaccatgcccagccctgcccctgaggtgcccctgaagacagtgggcacccggcggcagctgggcctggtgccccgggagaagtctgtgacctacggcaagggcaagctgctgatggacatggccctcttcatgggccgctccttccgggtgggctggggccccaactggaccctggccaacagcggggagcagctgaatggcagccatgagctggagaaccaccagattgctgacagcatggagtttggcttcctgcccaaccctgtggccgtgaagcccctgacagagagccccttcaaggtgcacctggagaagctgagcctgcggcagaggaagccagatgaggacatgaagctgtaccagacccccctggagctgaagctgaagcacagcacagtgcacgtggatgagctgtgccccctcatcgtgcccaacctgggcgtggccgtcatccatgactatgctgactgggtgaaggaggccagcggggacctgcctgaggcccagatcgtgaagcactggagcctgacctggaccctgtgtgaggccctgtggggccacctgaaggagctggacagccagctgaatgagccccgggagtacatccagatcctggagcggcggcgggccttcagccgctggctgagctgcacagccaccccccagatcgaggaggaggtgtccctgacccagaagaacagccctgtggaggccgtgttctcctacctgaccgggaagaggatcagcgaggcctgcagcctggcccagcagagcggggaccaccggctggccctgctgctgagccagtttgtgggcagccagagcgtgcgggagctgctgaccatgcagctggtggactggcaccagctgcaggccgacagcttcatccaggatgagcggctgcgcatctttgccctgctggccggcaagcctgtgtggcagctgtctgagaagaagcagatcaacgtgtgcagccagctggactggaagaggagcctggccatccacctgtggtacctgctgcccccaacagccagcatcagccgggccctgtccatgtatgaggaggccttccagaacaccagtgacagcgacagatatgcctgcagccccctgcccagctacctggagggcagcggctgtgtgattgctgaggagcagaacagccagacccccctgagagatgtgtgcttccacctgctgaagctgtacagcgacagcatccgggagaaggctgtgcgggagctgctgaccaggcactgccagctgctggagaccccagagagctgggccaaggagaccttcctgacccagaagctgcgggtgcctgccaagtggatccacgaggccaaggctgtgcgggcccacatggagagtgacaagcacctggaggccctgtgcctcttcaaggccgagcactggaaccgctgccacaagctgatcatccgccacctggccagtgatgccatcatcaatgaaaattatgactacctgaagggcttcctggaggacctggcccctcctgagaggagcagcctcatccaggactgggagaccagcggcctggtgtacctggactacatccgggtgattgagatgctgcggcacatccagcaggtggactgcagcggaaatgacctggagcagctgcacatcaaggtgaccagcctgtgcagcagaattgagcagatccagtgctacagcgccaaggaccggctggcccagagcgacatggccaagagggtggccaacctgctgcgggtggtgctgagcctgcaccaccccccagacaggaccagtgacagcaccccagacccccagagggtgcccctgcggctgctggccccccacatcggccgcctgcccatgccagaagattatgccatggatgagctgcggagcctgacccagagctacctgcgggagctggccgtgggcagcctgtag

SEQ ID NO: 238164 - DNA, 4917 bp, Artificial Sequence
  derived and/or modified sequence
atgttcaacaagagctttggcaccccatttggaggcggcaccggcggcttcggcaccaccagcaccttcggccagaacacaggcttcggcaccaccagcggcggggccttcggcaccagcgccttcggcagcagcaacaacacaggaggcctgtttggaaacagccagaccaagccaggcggcctgtttggcaccagcagcttcagccagcctgccaccagcaccagcactggatttggatttggcaccagcactggaacagccaacaccctgtttggaacagccagcacaggcaccagcctcttcagcagccagaacaatgcctttgcccagaacaagcccactggatttggaaactttggcaccagcaccagcagcggcggcctgtttggcaccaccaacaccaccagcaaccccttcggcagcaccagcggcagcctgtttggccccagcagcttcaccgctgcccccaccggcaccaccatcaagttcaacccccccaccggcacagacaccatggtgaaggccggcgtgtccaccaacatcagcaccaagcaccagtgcatcacagccatgaaggagtatgagagcaagagcctggaggagctgcggctggaggactaccaggccaacaggaagggcccccagaaccaggtgggcgccggcaccaccaccggcctgtttggcagcagccctgccaccagcagcgccaccggcctcttcagcagcagcaccaccaacagcggctttgcctacggccagaacaagacagccttcggcaccagcaccaccggcttcggcaccaaccctgggggcctgtttggccagcagaaccagcagaccaccagcctcttcagcaagcccttcggccaggccaccaccacccagaacacaggcttctcctttggaaacaccagcaccatcggccagcccagcaccaacaccatgggcctgtttggagtgacccaggccagccagcccggcggcctgtttggaacagccaccaacaccagcactggaacagcctttggaactggaacaggcctgtttggccagaccaacacaggctttggagctgtgggcagcaccctgtttggaaacaacaagctgaccaccttcggcagcagcaccaccagcgcccccagctttggcaccaccagcggcggcctgtttggatttggcaccaacaccagcggcaacagcatcttcggcagcaagccagcccctggcaccctgggcaccggcctgggcgccggcttcggcacagccctgggcgccggccaggccagcctgtttggaaacaaccagcccaagattggaggccccctgggcactggagccttcggggcccctggcttcaacaccaccacagccaccctgggctttggagccccccaggcccctgtggccctgacagaccccaatgccagcgctgcccagcaggccgtgctgcagcagcacatcaacagcctgacctacagcccctttggagacagccccctcttcaggaaccccatgtctgaccccaagaagaaggaggagcggctgaagcccaccaacccagctgcccagaaggccctgaccacccccacccactacaagctgacccccaggcctgccaccagggtgcggcccaaggccctgcagaccactggaacagccaagagccacctgtttgatggcctggatgatgatgagcccagcctggccaatggagccttcatgcccaagaagagcatcaagaagctggtgctgaagaacctgaacaacagcaacctcttcagccctgtgaacagagattctgagaacctggccagccccagcgagtacccagaaaatggagagcgcttctccttcctgagcaagcctgtggatgagaaccaccagcaggatggagatgaggacagcctggtgagccacttctacaccaaccccatcgccaagcccatcccccagaccccagagagcgctggcaacaagcacagcaacagcaacagcgtggatgacaccatcgtggccctgaacatgagagctgccctgagaaatggcctggagggcagcagcgaggagaccagcttccatgatgagagcctgcaggatgaccgggaggagattgagaacaacagctaccacatgcaccctgctggcatcatcctgaccaaggtgggctactacaccatccccagcatggatgacctggccaagatcaccaatgagaagggggagtgcatcgtgtctgacttcaccatcggcaggaagggctacggcagcatctactttgaaggagatgtgaacctgaccaacctgaacctggatgacatcgtgcacatccggaggaaggaggtggtggtgtacctggatgacaaccagaagccccctgtgggggagggcctgaacaggaaggccgaggtgaccctggatggagtgtggcccacagacaagaccagccgctgcctgatcaagagcccagaccggctggccgacatcaactatgagggccgcctggaggccgtgtccaggaagcagggcgcccagttcaaggagtacagacctgagaccggctcctgggtgttcaaggtgagccacttcagcaaatatggcctgcaggacagtgatgaggaggaggaggagcaccccagcaagaccagcaccaagaagctgaagacagcccccctgcccccagccagccagaccacccccctgcagatggccctgaatggcaagccagcccccccaccccagagccagagccctgaggtggagcagctgggccgggtggtggagctggacagcgacatggtggacatcacccaggagcctgtgctggacaccatgctggaggagagcatgcctgaggaccaggagcctgtgtctgccagcacccacatcgccagcagcctgggcatcaacccccacgtgctgcagatcatgaaggccagcctgctgacagatgaggaggatgtggacatggccctggaccagcgcttcagccggctgcccagcaaggctgacaccagccaggagatctgcagcccccggctgcccatcagcgccagccacagcagcaagaccaggagcctggtgggcggcctgctgcagagcaagttcaccagcggggccttcctgagccccagcgtgtctgtgcaggagtgcaggaccccccgggccgccagcctgatgaacatccccagcaccagctcctggagcgtgcccccacccctgaccagcgtcttcaccatgcccagccctgcccctgaggtgcccctgaagacagtgggcacccggcggcagctgggcctggtgccccgggagaagtctgtgacctacggcaagggcaagctgctgatggacatggccctcttcatgggccgctccttccgggtgggctggggccccaactggaccctggccaacagcggggagcagctgaatggcagccatgagctggagaaccaccagattgctgacagcatggagtttggcttcctgcccaaccctgtggccgtgaagcccctgacagagagccccttcaaggtgcacctggagaagctgagcctgcggcagaggaagccagatgaggacatgaagctgtaccagacccccctggagctgaagctgaagcacagcacagtgcacgtggatgagctgtgccccctcatcgtgcccaacctgggcgtggccgtcatccatgactatgctgactgggtgaaggaggccagcggggacctgcctgaggcccagatcgtgaagcactggagcctgacctggaccctgtgtgaggccctgtggggccacctgaaggagctggacagccagctgaatgagccccgggagtacatccagatcctggagcggcggcgggccttcagccgctggctgagctgcacagccaccccccagatcgaggaggaggtgtccctgacccagaagaacagccctgtggaggccgtgttctcctacctgaccgggaagaggatcagcgaggcctgcagcctggcccagcagagcggggaccaccggctggccctgctgctgagccagtttgtgggcagccagagcgtgcgggagctgctgaccatgcagctggtggactggcaccagctgcaggccgacagcttcatccaggatgagcggctgcgcatctttgccctgctggccggcaagcctgtgtggcagctgtctgagaagaagcagatcaacgtgtgcagccagctggactggaagaggagcctggccatccacctgtggtacctgctgcccccaacagccagcatcagccgggccctgtccatgtatgaggaggccttccagaacaccagtgacagcgacagatatgcctgcagccccctgcccagctacctggagggcagcggctgtgtgattgctgaggagcagaacagccagacccccctgagagatgtgtgcttccacctgctgaagctgtacagcgacagcatccgggagaaggctgtgcgggagctgctgaccaggcactgccagctgctggagaccccagagagctgggccaaggagaccttcctgacccagaagctgcgggtgcctgccaagtggatccacgaggccaaggctgtgcgggcccacatggagagtgacaagcacctggaggccctgtgcctcttcaaggccgagcactggaaccgctgccacaagctgatcatccgccacctggccagtgatgccatcatcaatgaaaattatgactacctgaagggcttcctggaggacctggcccctcctgagaggagcagcctcatccaggactgggagaccagcggcctggtgtacctggactacatccgggtgattgagatgctgcggcacatccagcagatcgccctcttctgtgtggagtggatcgcccaggtgatgacctggagcagctacaccagcaagtag

SEQ ID NO: 238165 - DNA, 5181 bp, Artificial Sequence
  derived and/or modified sequence
atgttcaacaagagcttcggcacccccttcggcggcggcaccggcggttttggcaccactagtacttttggtcagaatacggggttcggaacgacctccggcggagcctttggcacttccgcattcggatcatctaacaataccgggggattgtttggcaactctcaaaccaagccaggcggtttgttcggtacctctagcttctctcagccagcaaccagcacatccaccggattcggattcgggaccagtactgggaccgccaatactttgttcggaacagcgagcactggcacatctctattctcaagccaaaacaatgccttcgcccagaacaagcccaccggctttggcaatttcgggacttccacatcaagcggggggctcttcggtacaaccaacactacatccaaccctttcggctccacctctggctcactgttcgggccaagttcgtttacagcggcccctactggtaccactatcaagtttaatcccccaacggggactgacaccatggtgaaagctggggtttctacgaacatctcaactaagcaccagtgtattaccgccatgaaggagtacgagagtaagtcgctggaggaactgcgccttgaagactatcaggcaaaccggaagggaccgcaaaatcaggtgggtgcagggactacaaccggcctattcggttcctcaccagccacatcttcggccaccggcctgttctcgagcagtaccaccaacagtggattcgcgtacggtcagaacaagacagcattcggcacgagcaccacagggttcggtaccaatccgggcggactgttcgggcagcagaaccagcagaccacctcactatttagcaaaccatttggacaggccactactacacagaacacgggattcagctttggcaacacatccaccattggccaaccttccacaaacaccatggggctgtttggcgtaacacaggcttcgcagcctggtggtcttttcgggaccgccacaaacactagtactggcacagcttttgggaccggaaccggtttgttcggtcagaccaacacagggtttggcgccgtgggctcgacactgtttggcaacaacaagctgaccaccttcgggtcctccacgacatctgctccgtctttcgggaccacatccggcggtctcttcggttttggtacgaatacgagtggtaacagcatttttggcagcaagccagctccaggtaccttagggaccgggctgggtgctgggttcggcaccgccctgggtgctggacaggcgagcctgtttgggaataaccagcccaagattggtggccccctcgggaccggtgctttcggagctccagggttcaacactacgactgcgaccttagggtttggtgccccccaggctccggtcgccctgacagacccaaacgccagcgcagcccagcaggccgtgctgcagcagcacattaacagcctcacatatagccctttcggcgattcgcccctgttcaggaatcccatgtcagatcccaagaagaaagaggagaggctgaagcctaccaaccctgctgctcagaaagccctgaccacacctacacactataagttgacacctcgaccagctacccgggtgcgaccaaaggcccttcagactaccggtaccgctaagagccacctgttcgatggcctagacgatgatgaaccatcactagccaacggtgccttcatgccaaagaaatctattaaaaaactagtgctgaaaaatttgaacaatagcaatctgtttagtcccgtgaatagagacagtgaaaatctggcctcaccctctgagtacccagagaatggggaacgatttagcttcctgagcaaacccgtggacgagaaccatcaacaggacggagatgaagactcactggtgtcccacttttataccaacccgatcgccaagcctattccccagactcccgagtcagccgggaataagcatagcaactctaacagtgtggacgacacaatcgtggcactcaacatgcgcgccgctctgcgcaacgggctggaggggtcctctgaagaaaccagcttccatgacgagagcctgcaggatgatcgggaggagattgagaacaatagttatcatatgcacccagccggcataatcctgacaaaagtcggctattacaccataccgtccatggacgatctcgctaagatcactaatgagaaaggtgaatgcattgtatcagactttacaataggtcgcaaaggctatggatcgatttatttcgaaggcgatgtgaatcttaccaatctgaatctggacgatatcgtccacattaggcggaaggaggtcgtcgtttacctggatgacaatcagaagccacccgtaggtgagggcctgaaccgcaaggcagaggtgaccctagatggtgtgtggcctacagataaaacaagtcgttgccttatcaagtcacccgaccggctggctgatattaactatgagggcagactggaggcagtgtcccgcaagcagggcgcccagttcaaggaatatcggcctgagacaggatcctgggtgttcaaagtgagccacttcagtaagtacggattacaggactctgacgaagaggaggaagagcacccatccaagacaagcacaaagaagcttaagacggcaccgctgccacctgcgtcacagacgactccgctgcagatggctctgaatggtaagcccgctccaccaccacagagccaaagccctgaagttgaacagctgggtcgcgtcgtggagctcgatagtgacatggtcgacatcacccaagagcctgtcctcgataccatgctggaggagtcaatgcctgaagatcaagagcccgtttccgcatcaacgcacatcgccagcagtttggggataaatccccacgtcctccaaattatgaaagcctctctcctgaccgacgaggaagacgttgacatggccctggaccaaagattctcccgcttaccttcaaaggcggacacatcccaggaaatttgctcccctagattgccaatctccgcatcccacagctcgaagacgcgcagtttggtcggcggactactgcagtccaaattcacctccggcgctttcctctcacccagtgtcagcgtgcaggagtgtcgcactccacgagctgcctccctgatgaatatacctagcacatcctcttggtcagttccacccccgctgaccagcgtgttcactatgccctcacccgcacccgaagtgccattaaagacggtaggcactagacggcaactgggtctcgtgccgcgagaaaagtcagtcacttatggaaaagggaagttactaatggacatggcactctttatgggacgctccttcagggttggttggggccctaactggaccctggcaaattccggagagcaacttaacggttctcacgagctggagaaccatcaaatcgccgacagtatggagttcggattcctgccaaatcccgtggctgtaaagcccttgacagaaagccctttcaaagtgcacttagagaagctgtccctgcgccagcgaaagccagatgaagatatgaaattataccagacccctctggagttaaagttgaagcactcaacggttcatgtcgacgagttgtgtcctctgattgtgcctaatctgggggtcgcggtaattcacgattacgcggattgggtgaaggaagcatccggcgacttacccgaagctcagattgtgaaacactggtcactgacttggacactgtgcgaggccctgtggggacacttaaaggaactggattcacagttgaatgagcctcgcgagtacatccagatcctagagcggaggagagcgttcagccgctggctatcatgtactgccacgcctcagatagaagaagaggtctccctgactcagaaaaattcacccgtggaggctgttttctcataccttaccggcaagcggatcagcgaggcatgttctctcgcacaacaaagcggtgatcaccgactcgccttgcttctgagccagttcgtcggttcacagagtgttcgggagcttctgactatgcagctggttgattggcaccaactgcaggcagacagtttcatacaagacgaacgcctgagaatttttgctcttctggcagggaaacccgtgtggcagttgagtgagaaaaagcaaatcaacgtgtgttcacaactagactggaaaagaagtctggcaatacacctgtggtatctgctgccacccaccgccagtattagccgggcactcagtatgtacgaagaggcttttcagaacacctccgactctgaccgctatgcgtgttctcctctgccctcttacttggagggttcaggttgcgtcatcgctgaggaacagaacagtcagactcccttgagggacgtgtgttttcacctgttgaaattatattccgactctatccgagaaaaagccgtgcgggagttgcttacaagacattgccagttactcgagactcctgagagctgggctaaagaaacctttctgacgcagaagctgagagtgcctgctaaatggatccacgaggccaaagccgtgcgagcccatatggaaagcgacaagcatctggaagctttatgcctgttcaaggccgagcactggaacagatgtcacaagctgatcattagacacttggcaagcgacgccatcataaacgagaactacgattatttgaaaggcttcttggaggacctcgcaccacccgagaggagctctctaatccaggactgggaaacatctggacttgtgtacctggattacatcagagtgatcgagatgcttcggcatatacagcaggttgattgctcggggaacgatctcgaacagttacatattaaggtcacgagtctctgcagccgtatcgaacaaattcagtgttattccgcgaaagataggctcgcccagtcagatatggctaaacgggtggctaacctgctgagggtcgtcctgagtctgcaccaccccccagacagaacaagcgattcaacccccgaccctcagcgggtgcccttgagactgttagccccccacattggccggctccctatgcccgaggactatgccatggatgaactacggagcttgacccagtcttacctgagggagttggccgtgggctcgttgtag

SEQ ID NO: 238166 - DNA, 4917 bp, Artificial Sequence
  derived and/or modified sequence
atgttcaacaagagcttcggcacccccttcggcggcggcaccggcggattcgggaccacctccaccttcgggcaaaatacgggtttcggaacaacatctggcggcgctttcggtacctcagccttcggcagctctaataatactggcggattgtttggcaactcccagacaaagcctggaggccttttcgggacttcttctttcagccagccagcaacaagtaccagtaccgggttcggctttgggactagcaccggcacagcaaacacactgtttggaaccgccagtactggaacaagcctttttagtagccagaataacgcatttgcccaaaacaagccaacaggctttggcaactttggcacctccacatcatccggtggcctctttggcactaccaatacaactagcaatcctttcggctcaacctccggcagtctgttcggaccttcctccttcacagccgccccaaccggaactaccatcaaattcaatccccctactggaaccgataccatggtgaaagccggggtgagcacaaacatctcaactaagcatcagtgtataactgcaatgaaagagtacgaaagcaagtccttggaggaactacgtttagaggactaccaggcaaatagaaaggggccccaaaatcaggtcggggctggcactacaacaggactgtttgggtcttcccctgcgacaagttcagctactggcctgttcagcagcagcacgacgaactccggattcgcctacgggcagaacaagacagcgtttggaacaagtactaccggctttggcacgaatccgggcggcttatttggccagcaaaatcagcagaccacctcgctcttctcaaagccattcgggcaggctacaactactcaaaatacgggatttagttttggcaataccagtactatcggccagccaagcactaacaccatggggctgtttggtgtgactcaggcgtcacagccaggaggcttgtttggaaccgctaccaacacgagcactggcactgcctttggcacgggtaccggactctttgggcagaccaataccgggttcggtgcagttggaagtaccctcttcgggaacaacaaactaactacctttgggtcttccactacttccgctcctagtttcggcacgacaagcggaggcctgtttggtttcgggaccaacaccagcgggaactctatattcggctcaaaaccagcccccggtactttgggaactggactcggtgccggcttcggaactgcacttggagccggccaggcttcgttattcggaaataaccagcctaagatcggcggtcccctggggaccggcgccttcggagctcctggcttcaacactaccacggcaaccctgggctttggagctccgcaggcccctgttgcactgaccgacccaaacgccagcgctgctcagcaagcggtactccagcaacacattaactctcttacctactcacccttcggcgacagtccactgttccggaaccccatgtccgatccaaagaagaaagaggagcggctaaagccaactaatcccgcggctcagaaggcactgacaactcccactcactataaactgacgccaagacctgccacgagggtccggcctaaagcactgcaaacaacgggtactgctaaatctcacctgttcgacgggctggatgacgacgaaccctccttggctaacggggcattcatgccaaagaagtcaatcaagaaactcgtactgaagaatcttaacaattcgaatctgtttagcccagtgaatagagatagcgaaaatctggcatccccatcagaatacccagagaacggggagcggttttcattcctgtccaagcccgtcgatgagaatcaccagcaggacggcgacgaagactcgctggtgagtcatttctacacaaatcccattgctaagcccatccctcagacccctgagtctgccggaaataaacactccaatagcaattctgtcgacgatactatagttgccttgaatatgagagccgcgctacgcaatgggctggagggctcttcagaggagacatcatttcatgatgaatcgctgcaggacgacagggaggaaatagagaacaactcctatcacatgcaccctgccggcatcatactaactaaggtagggtactatactatccctagcatggacgatctggctaagatcacaaacgagaagggggagtgtatcgtcagcgattttactataggaaggaaagggtacggatctatttattttgagggtgatgttaatcttaccaacctgaatctggatgacatcgtgcacatacgccgcaaggaggtcgtggtatatctggacgacaatcagaagccaccagttggcgagggactcaatcgcaaagccgaagtgactttggacggggtgtggcctaccgataagacaagcaggtgcctgatcaagagcccagatagattagccgatatcaactatgaaggcaggctcgaagccgtttcaagaaaacaaggagctcagttcaaggaatacaggcccgagactggctcctgggtattcaaggtgagtcacttcagcaaatacggcctgcaggacagtgacgaggaggaggaagaacacccttctaaaactagcacgaagaaattgaaaacagcccccttgcctcccgcgtcccagaccacacctctccagatggcactcaatgggaagcccgcaccaccacctcagtcacaaagtccagaggttgagcagttagggagggtagtggaactggacagtgacatggtggacatcacacaggaaccagttctggatactatgctggaggagtctatgcccgaggaccaggagcctgtcagtgcctcgacccacatcgctagctcactgggaatcaacccccacgtgcttcagataatgaaagccagcctgctgactgatgaggaggacgtggatatggcattagatcagaggtttagtaggctgcccagtaaggcggacacttcacaggaaatatgcagcccacgcttacccatttctgcaagccactccagcaagactaggagcctcgttggcggactgttgcagtccaaattcacctcaggtgctttcctgtccccatcagtgtcagtgcaagaatgtcgcacacccagggccgcaagtctcatgaatatcccctctacatcgtcatggagcgtgccaccacctctaacttctgtcttcaccatgccttctccagctcccgaagttcctctgaaaacggttggtacccggagacagctgggtttggttcctagagaaaagtctgtaacgtatgggaagggaaagctgctgatggatatggctttgttcatgggccgctccttccgtgtaggatggggacccaattggaccttagccaatagtggggaacaactgaacgggagccatgagctggaaaaccaccagattgcagactccatggagtttgggttcttgcccaaccccgtggccgtgaagccactcactgagtcccctttcaaggtacatttagagaagctgagtctgaggcagcgcaaaccagatgaggacatgaagctgtatcagacacctctagaattgaaacttaagcatagtactgttcacgttgatgagctctgcccattgattgtgcccaatctgggagtggccgtcatccacgattatgccgattgggttaaagaggcatccggcgatctgcccgaggcccaaattgttaagcattggtcgttgacatggaccctttgcgaagctctgtggggtcatctgaaggagctcgattcacagcttaacgagccacgggaatacattcagatcctggaaagaaggcgagctttctcccgttggctgagttgtacagccactcctcagatcgaggaggaggtctctttgacccagaaaaactcacccgtggaagctgtgttttcctacctcacgggtaaaagaatcagcgaggcttgttctctcgcacagcaatctggagaccaccgactagcacttctgctgtctcagtttgtgggaagccaatctgtccgcgagctgctgaccatgcagctggtcgactggcatcagctccaagcagatagctttatccaagacgagcgcttgaggatcttcgctcttttggcaggcaagcctgtgtggcagctgtcagaaaagaagcaaatcaatgtctgtagtcagctcgattggaaacgatccctggcgatccacctctggtacttactccccccgacggcctcaattagtcgggctctgtccatgtatgaagaagcttttcagaatacctcagatagcgacagatatgcatgttctcctctacccagttatttggaaggatctgggtgcgttatcgcagaggagcaaaactcccagacaccgctccgggacgtttgctttcatctcctcaaactctattcagacagtataagggaaaaggccgtgcgcgagctcttgacacggcactgtcaactgctagagactcctgagtcctgggcaaaagagacgttcctgactcagaaactgcgagtaccggcaaagtggatccacgaagctaaggcagttcgcgctcacatggagtctgacaagcatctcgaggccctctgcttattcaaggccgaacactggaatagatgccacaagctcatcattaggcatctggcctccgatgcgatcataaacgagaactacgactacctgaagggctttctcgaggatttagctccccctgagaggtccagtctcattcaggattgggaaacatcaggactagtttatttggattatattcgggtcatagagatgttgagacacattcaacagatcgcactcttttgtgttgaatggattgcgcaagttatgacatggagctcttatacctcgaagtag

SEQ ID NO: 238167 - DNA, 5628 bp, Artificial Sequence
  derived and/or modified sequence
tgtgagcggcgggtggcagcaggggactcctgacacttccccttccccaccgaaccgcgctttctgaaacaaagactcattttgaagatgtttaacaaatcatttggaacaccctttgggggtggcacaggtggctttggcacaacttcaacatttggacagaatactggctttggcactactagtggaggggcatttggaacatctgcatttggttctagcaacaatactggaggcctctttggaaattcacagactaaaccaggaggattgtttggaaccagttcatttagccagccagctacctccacaagcactggctttgggtttggtacgtcaacaggaacagcaaataccttgtttggaactgcaagcacagggaccagtctcttctcatcccaaaacaatgcctttgcacaaaataaaccaactggctttggcaattttggaaccagtactagcagtggaggactctttggaaccacaaataccacctctaatccttttggcagcacatctggctccctctttgggccaagtagttttacagctgctcctactgggactactattaaatttaaccctccaactggtacagatactatggtcaaagctggagttagcactaacataagtaccaagcaccagtgtattactgctatgaaagaatatgaaagcaagtcactagaggaacttcgtttagaggattatcaggctaacaggaagggcccacagaaccaggtgggagcaggtaccacaactggcttgtttgggtcttctccagccacttccagcgcaacaggactcttcagctcctccaccactaattcaggctttgcatatggtcagaacaaaactgcctttggaactagtacaactggatttggaacaaatccaggtggtctctttggccaacagaatcagcagactaccagcctcttcagcaaaccatttggccaggctacaaccacccagaacactggcttttcctttggtaataccagcaccataggacagccaagcaccaacaccatgggattatttggagtaacccaagcctcacagcctggaggtctttttgggacagctacaaacaccagcactgggacagcatttggaacaggaacaggtctctttgggcagaccaatactggatttggtgctgttggttcgaccctgtttggcaataacaagcttactacatttggaagcagcacaaccagtgcaccttcatttggtacaaccagtggcgggctctttggttttggcacaaataccagtgggaatagtatttttggaagtaaaccagcacctgggactcttggaactgggcttggtgcaggatttggaacagctcttggtgctggacaggcatctttgtttgggaacaaccaacctaagattggagggcctcttggtacaggagcctttggggcccctggatttaatactacgacagccactttgggctttggagccccccaggccccagtagctttgacagatccaaatgcttctgctgcccagcaggctgttctccagcagcacatcaatagtctaacatactcaccttttggagactctcctctcttccggaatccgatgtcagaccctaagaagaaggaagagagattgaaaccaacaaatccagcagcccagaaggctcttactacacctactcattataaactgacaccccgccctgccactagagtccggccaaaggctttacaaacaacaggcacagccaagtcacatctctttgatgggctggatgacgatgaaccatccctagccaatggagcattcatgcccaagaagagcattaagaagttggttttgaagaaccttaataatagcaatctcttttctcctgttaatcgtgattcagaaaatctagcttcaccatctgaatatccagaaaatggagagagatttagtttcctaagcaaacctgttgatgagaatcaccagcaggatggagatgaagattcccttgtttcacatttttatactaaccctattgccaaacctattcctcaaaccccagaaagtgctggaaataaacacagcaacagcaacagtgtggatgataccattgttgcattaaacatgcgtgctgctttgcgaaatgggctggaaggaagcagtgaagaaacgtcttttcatgatgagtcacttcaggatgaccgagaagaaatagaaaataattcttaccatatgcacccagcaggtattattctcactaaggttggttactatactattccatctatggatgaccttgctaaaattaccaatgaaaaaggagagtgcattgtctctgatttcactattggtcggaaaggttatggttcaatctattttgaaggagatgtgaatttgacaaatctaaatttggatgatattgtgcatatccggaggaaagaagtagttgtctacttagatgataaccaaaaaccacctgtgggtgaagggctaaataggaaggctgaagttacattggatggagtttggccaacagataaaacatctcgttgtttaataaagagcccagatcgccttgctgatatcaactatgaaggaagattggaagcagtttcaaggaaacagggagctcaattcaaagaataccggcctgaaactggttcttgggtgtttaaggtctcccatttttctaagtatggccttcaggattctgatgaagaggaggaggagcatccgtctaaaactagtacaaagaagttgaagactgctcctttgcctcctgcaagccagactacgcccttgcagatggctcttaatggcaaacctgcacctccacctcagagccagagcccagaggtggagcagttagggagggttgtggaactggacagtgacatggtagatatcacccaggagccagttttggataccatgttagaagagagcatgcctgaggatcaggaacctgtgtctgcctcaacacatattgcatcttcactgggaattaatccacatgtcttacagatcatgaaagcatcattgcttactgatgaagaagatgtagatatggcactggatcaacgcttcagtcgcctgccttccaaagcagatacttctcaagaaatctgttctcccagactccccatttcagcatcccactcgtcgaaaactcgttcactagttggtgggttactacaatcaaaatttacaagtggagcttttctttcaccaagtgtctctgtgcaagaatgtcgtactcccagagcagcatctttaatgaatatcccatccacatcctcttggtctgtccctccacccctgacttctgtgttcacaatgcccagcccagcccctgaggttccgttgaaaacagtgggtacacgtaggcaactaggcctagtccctcgtgaaaagtctgtcacctatggcaagggaaaactcttgatggacatggccctattcatgggacgctcatttcgtgttggttggggccccaactggactcttgctaatagtggagaacagctgaatggctctcatgaactagaaaatcatcagattgccgattccatggagtttggattcctgcccaatccagtagctgttaaacccctaactgagtccccattcaaagttcacttagaaaaactcagtttgagacaaagaaagccagatgaagacatgaaattatatcagacacctctggagctcaaattaaaacacagcactgtccatgtggatgaactgtgtcctctcattgtccccaatctgggagttgctgtcattcatgactatgcagattgggttaaagaagcatcaggagacttaccagaagcacaaattgtgaagcactggagcctgacatggacactatgtgaagccctatggggccacctgaaggagcttgacagccagctaaatgaaccccgtgaatacattcaaattctggagcgaagaagagctttctcccgctggctatcctgtactgccacacctcagattgaagaggaagtctccttaacccaaaaaaacagccctgtggaggctgtattcagctacctcacaggcaaaaggatcagtgaggcctgctctctggcccagcagtcaggggatcatcgtcttgctcttcttttatctcagtttgtgggtagccagtcagtccgggagctgctcaccatgcagttggtggactggcatcagctccaagcagactccttcatccaggatgagagactgcgcatctttgctctgttggctggaaaaccggtgtggcagctctcagaaaagaagcaaataaacgtgtgctcccagttggattggaaacgctccctggctatccatctttggtatttgcttccaccaacagcctccatttctagggcgctcagcatgtatgaagaagcatttcagaatacctctgacagtgacagatatgcctgctccccacttccttcgtatctggagggttctggctgtgtgatagcggaggagcaaaactcacagacaccacttcgagatgtctgctttcaccttctaaaactctacagtgacagcatacgtgagaaggctgttcgagagctgcttacccggcactgccagctgttggagacccctgaatcttgggctaaagagactttccttacccagaagctccgtgtacctgccaaatggatccacgaggccaaagctgtgcgagcacacatggaatctgacaagcacttagaggccctttgcttatttaaggctgagcactggaaccgctgccacaagctcatcatccgacacttagcttctgatgccatcattaatgagaactatgactacctgaaggggttcttggaagacctggcacctccagagcgcagcagcctaattcaggattgggaaacatctgggcttgtttacctggactatattagagtcattgaaatgctccgccatatacagcaggtggattgctcaggtaatgacctggagcagttacacatcaaagtgacttcactgtgcagtcggatagagcagattcagtgttacagtgctaaagatcgcctggctcagtcagacatggccaaacgtgtagccaacctgctgcgcgtggtgctgagtctgcatcatcctcctgatagaacctccgactcaacaccagaccctcagcgagtccctttgcgcctcttggctccccacattggccggcttcccatgcctgaggactatgccatggacgaactgcgcagccttacccagtcctatctgcgagaactggctgttgggagcctgtgagccccaggcactttgcatcacagtcacatgcccattcacaccacacagaggttccctgccttgtttggattggcactgtttgccattctctgggttggctgtggcatctaccctccctccctgctgccagaagcagcatcctccacttgttcagggcttttcttaatactgaacgtagcataagggcttctggaacccagaagaggagacagtttaccatcctcaagatcattcagtgtttttcctttaaaaaaatggtcaataaagctcctttggcagaatcccccaaagaaccagggtattctttttccatccctagccattctggatcttgtgaccctccatgccaaccagcttccc

SEQ ID NO: 238168 - DNA, 6770 bp, Artificial Sequence
  derived and/or modified sequence
aaccgcggcggcgaggggcgggactccacggccctctcaccgctcctaccctgtgcctccccgaactccttctgcccctcctcttccctctcgccccttcccccttcagttcggtttcaaaagacgcgttgcccaatgaataacagggtcgacccagagtggcggccgcgtccaccaattcgcggacggcgagggcggagcgtccgcaacgagcctctgacgccgggcggcgtgtgacgcagtcgggccctctgcgcgctgcgcccgaagcggcggtcggtggcaggggtggtagcggcggcggcgacggtttcgtgggggccgcgcgctgctctgtgagcggcgggtggcagcaggggactcctgacacttccccttccccaccgaaccgcgctttctgaaacaaagactcattttgaagatgtttaacaaatcatttggaacaccctttgggggtggcacaggtggctttggcacaacttcaacatttggacagaatactggctttggcactactagtggaggggcatttggaacatctgcatttggttctagcaacaatactggaggcctctttggaaattcacagactaaaccaggaggattgtttggaaccagttcatttagccagccagctacctccacaagcactggctttgggtttggtacgtcaacaggaacagcaaataccttgtttggaactgcaagcacagggaccagtctcttctcatcccaaaacaatgcctttgcacaaaataaaccaactggctttggcaattttggaaccagtactagcagtggaggactctttggaaccacaaataccacctctaatccttttggcagcacatctggctccctctttgggccaagtagttttacagctgctcctactgggactactattaaatttaaccctccaactggtacagatactatggtcaaagctggagttagcactaacataagtaccaagcaccagtgtattactgctatgaaagaatatgaaagcaagtcactagaggaacttcgtttagaggattatcaggctaacaggaagggcccacagaaccaggtgggagcaggtaccacaactggcttgtttgggtcttctccagccacttccagcgcaacaggactcttcagctcctccaccactaattcaggctttgcatatggtcagaacaaaactgcctttggaactagtacaactggatttggaacaaatccaggtggtctctttggccaacagaatcagcagactaccagcctcttcagcaaaccatttggccaggctacaaccacccagaacactggcttttcctttggtaataccagcaccataggacagccaagcaccaacaccatgggattatttggagtaacccaagcctcacagcctggaggtctttttgggacagctacaaacaccagcactgggacagcatttggaacaggaacaggtctctttgggcagaccaatactggatttggtgctgttggttcgaccctgtttggcaataacaagcttactacatttggaagcagcacaaccagtgcaccttcatttggtacaaccagtggcgggctctttggttttggcacaaataccagtgggaatagtatttttggaagtaaaccagcacctgggactcttggaactgggcttggtgcaggatttggaacagctcttggtgctggacaggcatctttgtttgggaacaaccaacctaagattggagggcctcttggtacaggagcctttggggcccctggatttaatactacgacagccactttgggctttggagccccccaggccccagtagctttgacagatccaaatgcttctgctgcccagcaggctgttctccagcagcacatcaatagtctaacatactcaccttttggagactctcctctcttccggaatccgatgtcagaccctaagaagaaggaagagagattgaaaccaacaaatccagcagcccagaaggctcttactacacctactcattataaactgacaccccgccctgccactagagtccggccaaaggctttacaaacaacaggcacagccaagtcacatctctttgatgggctggatgacgatgaaccatccctagccaatggagcattcatgcccaagaagagcattaagaagttggttttgaagaaccttaataatagcaatctcttttctcctgttaatcgtgattcagaaaatctagcttcaccatctgaatatccagaaaatggagagagatttagtttcctaagcaaacctgttgatgagaatcaccagcaggatggagatgaagattcccttgtttcacatttttatactaaccctattgccaaacctattcctcaaaccccagaaagtgctggaaataaacacagcaacagcaacagtgtggatgataccattgttgcattaaacatgcgtgctgctttgcgaaatgggctggaaggaagcagtgaagaaacgtcttttcatgatgagtcacttcaggatgaccgagaagaaatagaaaataattcttaccatatgcacccagcaggtattattctcactaaggttggttactatactattccatctatggatgaccttgctaaaattaccaatgaaaaaggagagtgcattgtctctgatttcactattggtcggaaaggttatggttcaatctattttgaaggagatgtgaatttgacaaatctaaatttggatgatattgtgcatatccggaggaaagaagtagttgtctacttagatgataaccaaaaaccacctgtgggtgaagggctaaataggaaggctgaagttacattggatggagtttggccaacagataaaacatctcgttgtttaataaagagcccagatcgccttgctgatatcaactatgaaggaagattggaagcagtttcaaggaaacagggagctcaattcaaagaataccggcctgaaactggttcttgggtgtttaaggtctcccatttttctaagtatggccttcaggattctgatgaagaggaggaggagcatccgtctaaaactagtacaaagaagttgaagactgctcctttgcctcctgcaagccagactacgcccttgcagatggctcttaatggcaaacctgcacctccacctcagagccagagcccagaggtggagcagttagggagggttgtggaactggacagtgacatggtagatatcacccaggagccagttttggataccatgttagaagagagcatgcctgaggatcaggaacctgtgtctgcctcaacacatattgcatcttcactgggaattaatccacatgtcttacagatcatgaaagcatcattgcttactgatgaagaagatgtagatatggcactggatcaacgcttcagtcgcctgccttccaaagcagatacttctcaagaaatctgttctcccagactccccatttcagcatcccactcgtcgaaaactcgttcactagttggtgggttactacaatcaaaatttacaagtggagcttttctttcaccaagtgtctctgtgcaagaatgtcgtactcccagagcagcatctttaatgaatatcccatccacatcctcttggtctgtccctccacccctgacttctgtgttcacaatgcccagcccagcccctgaggttccgttgaaaacagtgggtacacgtaggcaactaggcctagtccctcgtgaaaagtctgtcacctatggcaagggaaaactcttgatggacatggccctattcatgggacgctcatttcgtgttggttggggccccaactggactcttgctaatagtggagaacagctgaatggctctcatgaactagaaaatcatcagattgccgattccatggagtttggattcctgcccaatccagtagctgttaaacccctaactgagtccccattcaaagttcacttagaaaaactcagtttgagacaaagaaagccagatgaagacatgaaattatatcagacacctctggagctcaaattaaaacacagcactgtccatgtggatgaactgtgtcctctcattgtccccaatctgggagttgctgtcattcatgactatgcagattgggttaaagaagcatcaggagacttaccagaagcacaaattgtgaagcactggagcctgacatggacactatgtgaagccctatggggccacctgaaggagcttgacagccagctaaatgaaccccgtgaatacattcaaattctggagcgaagaagagctttctcccgctggctatcctgtactgccacacctcagattgaagaggaagtctccttaacccaaaaaaacagccctgtggaggctgtattcagctacctcacaggcaaaaggatcagtgaggcctgctctctggcccagcagtcaggggatcatcgtcttgctcttcttttatctcagtttgtgggtagccagtcagtccgggagctgctcaccatgcagttggtggactggcatcagctccaagcagactccttcatccaggatgagagactgcgcatctttgctctgttggctggaaaaccggtgtggcagctctcagaaaagaagcaaataaacgtgtgctcccagttggattggaaacgctccctggctatccatctttggtatttgcttccaccaacagcctccatttctagggcgctcagcatgtatgaagaagcatttcagaatacctctgacagtgacagatatgcctgctccccacttccttcgtatctggagggttctggctgtgtgatagcggaggagcaaaactcacagacaccacttcgagatgtctgctttcaccttctaaaactctacagtgacagcatacgtgagaaggctgttcgagagctgcttacccggcactgccagctgttggagacccctgaatcttgggctaaagagactttccttacccagaagctccgtgtacctgccaaatggatccacgaggccaaagctgtgcgagcacacatggaatctgacaagcacttagaggccctttgcttatttaaggctgagcactggaaccgctgccacaagctcatcatccgacacttagcttctgatgccatcattaatgagaactatgactacctgaaggggttcttggaagacctggcacctccagagcgcagcagcctaattcaggattgggaaacatctgggcttgtttacctggactatattagagtcattgaaatgctccgccatatacagcagatagcactgttttgtgtagagtggattgctcaggtaatgacctggagcagttacacatcaaagtgacttcactgtgcagtcggatagagcagattcagtgttacagtgctaaagatcgcctggctcagtcagacatggccaaacgtgtagccaacctgctgcgcgtggtgctgagtctgcatcatcctcctgatagaacctccgactcaacaccagaccctcagcgagtccctttgcgcctcttggctccccacattggccggcttcccatgcctgaggactatgccatggacgaactgcgcagccttacccagtcctatctgcgagaactggctgttgggagcctgtgagccccaggcactttgcatcacagtcacatgcccattcacaccacacagaggttccctgccttgtttggattggcactgtttgccattctctgggttggctgtggcatctaccctccctccctgctgccagaagcagcatcctccacttgttcagggcttttcttaatactgaacgtagcataagggcttctggaacccagaagaggagacagtttaccatcctcaagatcattcagtgtttttcctttaaaaaaatggtcaataaagctcctttggcagaatcccccaaagaaccagggtattctttttccatccctagccattctggatcttgtgaccctccatgccaaccagcttccctactcctaccctggcccttttatactaggactccttaggaggagtgagacaggtgataatggatccttaacagatgaactatccacagaaggaagagggatccgtctcttaagtaattggttagttaacactgaattttggaggcaaaggagggttggcctgagttaggaaacaaaatgggatctttctgacacacttagggcagaagtgaatgcctgtcacggagggattgatcttcagggctgtttttgttcctgcctttagagttccatgaacaccatacctttgctactactatgtgcaggaacccttggtcacatgtgacatgtctgtgggaagctcccagagtttggtttggtccctggttttcagtcttgctgagactctgtctggatttgcctgcagagtttggataaaaaatggcaggttgggtaaccctccctgttcatcccatgttagctccaaagcatttcccaccctccatctaccccttccagaagcaaaaacaaaccatgactgaggcaggcatggagttgggcgttaggggcaggcagagggcctttgctacactgctgacagctatagggagccccaggtaatggcatgagatagctggtgttagggctatctcaggcaatatggccacacctgggtctttatgcatgaagataatgtaaaggtttttattaaaaaatatatatatgtataaataaatgatctagatattttcctctttttctgaagctactttcttaaaaaataaataaaatgtttatagcattcctggt

SEQ ID NO: 238169 - DNA, 5180 bp, Artificial Sequence
  derived and/or modified sequence
atgtttaataagtctttcgggaccccattcggcggagggaccggaggcttcgggaccacttcaacctttggtcaaaacactggtttcggaactacttcagggggagcctttggcacatcagcctttggaagctctaacaacactgggggtctcttcgggaattcgcaaaccaagcccggagggctcttcggaacatctagtttctcacagccggcaacttcaactagcacaggctttgggtttggaacctccaccggcaccgctaatacgctgtttggaaccgcttcaactggaacctcccttttctcaagccaaaataacgctttcgctcagaataagccaaccggatttggcaacttcgggactagcacttctagtggtgggttattcggtactaccaataccacttctaatccatttggcagtacaagcggcagccttttcggtcctagtagtttcaccgctgcgccaaccggaacgacaattaaatttaatccacctacgggcactgataccatggtcaaagccggtgtgagtacgaacatctcaacaaagcatcagtgcattacggccatgaaggagtatgaatccaagagtctggaggagttacgtctcgaagattatcaggctaatcgcaaaggaccacagaatcaggtgggggctggtacgaccacaggcctgtttgggtcatctccagcaactagttctgccacaggcctcttttcctcctctacgactaacagtggattcgcttacgggcagaataagaccgccttcggtacctccactactggctttgggaccaatcccggtggcctctttggccagcagaatcagcagaccacttctctgttctccaagcctttcggacaggcaactactacccagaataccggtttctcattcggcaatacaagcaccattgggcagcctagtacaaacaccatggggttattcggggtgacacaggcctctcagccaggtggactctttggtactgcgactaatacaagcacaggtactgctttcggcacgggaacgggactattcggtcagaccaatactgggtttggtgccgttggctctaccctgtttggcaacaacaagcttacaacatttgggtcctccacgacttcagctccaagcttcggaaccacttccggagggctgttcggattcggtaccaataccagcggaaacagcatcttcgggtccaagccggcacctggcaccctgggcaccggactgggggcaggctttggcactgccctaggggcagggcaggcctcactgtttggtaacaaccaacctaagatcggcggacctctgggcaccggagcattcggtgccccaggtttcaataccacaaccgccactctcggctttggggctcctcaggcaccggtcgcactcactgatccaaatgcctcggctgctcagcaggctgtgttacaacagcacataaactcactcacatacagtccctttggagacagtccactgttccgtaatcccatgtcggatcccaagaaaaaggaggagaggctcaaacccaccaatcctgccgcacagaaagcactgaccacgcccactcactataagttaacacctaggcccgcaactcgcgtccggcctaaggccctccagaccaccgggaccgccaagtcgcacctcttcgatggacttgacgacgatgagccttccctggccaatggcgcatttatgccaaagaagagtatcaagaaactcgtcctaaagaatctgaacaactccaatctcttcagtcctgtgaatcgggattccgaaaatctggccagtcccagtgagtaccccgaaaatggcgagcggttctcctttctatcaaagcccgtcgacgagaaccatcaacaggatggggatgaagactcactggtgtcacatttttacactaatccaatagcaaagccaatcccgcaaacccccgagtccgccggtaataaacacagcaatagcaattcagtggatgatactattgtcgctcttaatatgcgtgccgctctccgaaatggcctggaaggtagtagtgaagagacctccttccacgacgagagcctgcaggatgaccgggaggaaatcgagaataactcttaccatatgcaccccgctgggattatcctgactaaggtaggatattatactatcccatcgatggacgacttagctaaaattaccaatgagaaaggcgagtgtattgtatccgattttaccataggacgcaaggggtatggctcgatctacttcgaaggggacgttaatctcaccaatctgaatcttgacgacattgtgcatatcagaagaaaggaagtggtagtgtatctcgatgacaatcagaagccgccagtcggtgaaggactcaaccggaaagcagaagtgacactggatggagtatggcccacagataagacaagtcgctgtctgatcaaatcgcccgacaggcttgccgatattaattacgaaggccgattggaggcagtcagccggaaacagggcgctcaatttaaggagtatcgccctgagacaggcagttgggtctttaaggtctcccatttctctaagtacggactccaggattcagacgaagaggaagaggagcacccatcaaagacttctacaaaaaagctgaagacggccccactcccacctgcctctcagaccacaccactgcaaatggctctcaatgggaaacccgcaccaccaccccaatcccagagtcctgaagtagagcaattgggtcgggtagtcgagctcgactcagacatggttgatatcactcaggagccagtgcttgatacaatgttggaggagtcaatgccagaggatcaagaacccgtgtcagcttccacccacatcgcttcctctctaggcattaaccctcacgtcctgcagattatgaaggcttctctcctaaccgatgaagaggacgtggacatggcattggatcagcgcttctcccggctgccctctaaagctgacactagccaggagatttgttcacctaggctgcccatctccgctagccactccagcaagaccaggagccttgtgggcggattgctgcagagcaaattcacgagcggagccttcttgagtccctccgtcagcgtgcaagagtgtaggacccctagagccgcatcactcatgaacatcccctctactagttcctggtcagtgcccccacccttgacctctgtatttaccatgccatccccggcacccgaggttcccctgaagactgtgggcactcgcagacagttagggctggtgcccagggagaaatctgtgacctacggcaaggggaagctcttgatggacatggcactgtttatgggacggtctttccgggtcggttggggccctaactggactctagccaatagcggtgaacagcttaacggctctcacgagctcgaaaatcatcaaattgcagacagcatggaatttgggttcctgcccaatccggtagccgtcaagccactgacggagagcccattcaaggtccatctcgagaagttgtcactgcgccaaaggaagccagatgaggatatgaaactgtaccaaactccattggagctgaagctgaagcacagcacagttcacgttgacgagctgtgcccactcatcgtgcccaacttaggcgtggccgtgatccatgactacgctgattgggtcaaggaagccagcggcgacctgccagaagcccagattgtgaaacattggagcctgacatggacgttatgtgaagccctgtgggggcaccttaaggaactcgacagtcaactcaatgagcctcgcgaatacatccagattttggagcggcgaagggccttctcgcgctggctgtcttgcaccgcgaccccacagattgaagaagaggtctcactgactcagaaaaactcacctgtggaggcagtgttctcctaccttaccggcaaacgaatttcagaagcctgtagtctagctcagcagtctggggaccatcggctggcccttctactctcgcagttcgtaggttcacagtcagtaagagagcttttgacaatgcagctcgtggactggcaccagctccaggctgatagttttattcaggacgagagactgaggatttttgctctcttggctggcaagcccgtgtggcagttaagtgaaaagaagcagataaacgtgtgtagccagctcgattggaaacgatcattagctatccacttgtggtacctcctgccacccacagcctccatcagcagggctctgtccatgtatgaggaagcattccaaaatacctcggacagcgaccgatatgcctgctctccccttccatcctaccttgagggttccggctgcgtgatcgcagaagagcagaattcccagacgcccctgcgggatgtttgttttcatctccttaagctttatagcgacagtattagagaaaaggcagttcgcgagctgctgacccgacattgtcagttgctggaaacaccagaatcctgggctaaagaaacgtttctcacccagaagctgcgcgttcccgcaaagtggatacatgaagccaaggctgtccgagcacatatggaaagcgacaaacacctcgaggcactctgcctattcaaggccgagcactggaaccgatgccataaactaatcattaggcatctggccagcgatgccatcatcaacgagaattacgattatctaaagggtttcctggaggatcttgctccaccagaacgatcttctctaatacaagattgggaaacatccggacttgtctatctcgattatattcgggtgattgagatgctaaggcacattcagcaggtggactgctctggaaacgacctggaacaattgcacattaaggtcacatctctgtgctctcgcattgagcagatccaatgctattccgctaaagacagacttgcccagtcagatatggctaagcgggtggcaaacctgctcagagttgttttgagccttcaccatcctccagatagaacctcagacagcacacctgacccacagcgggtacctctccggttactggccccacacattggccgactgccaatgcctgaggattatgctatggacgaattgagaagcctgacccaatcctatctcagagaactggctgtgggaagtttata

SEQ ID NO: 238170 - DNA, 4916 bp, Artificial Sequence
  derived and/or modified sequence
atgttcaacaagtccttcggcacaccatttggtgggggtaccggaggattcgggacgacctccacttttggacagaatactggcttcggaactactagcggcggagccttcggaacctctgcattcggcagcagtaacaatacaggagggttgttcgggaacagccagacgaagcctggcggtctgtttggaacaagcagctttagccagcctgcaacttctacctctacaggcttcggattcgggaccagcaccggcacagcgaatactcttttcggcacggctagcactgggaccagcctcttctcatctcagaacaatgcattcgcccagaataaaccgacgggattcggaaattttggcacttctacctcatctggcggactattcgggacaacaaacactacatctaatccattcgggtccacctccggctcacttttcggtccgtctagcttcacagccgcacctaccgggactaccattaaattcaacccaccaaccgggactgacaccatggtcaaagccggagtgtcaactaatataagcaccaagcaccagtgtataacagccatgaaggagtacgagagtaagagcctggaagaattacggttagaggattatcaggccaacagaaagggcccacagaatcaggtgggagccggaaccacaaccggcttatttggatcctctcctgcgacttcaagcgccaccggtctgttcagttcctctacaaccaattcaggatttgcttatggccagaataagacggcattcggcacatcaaccacaggctttggtacaaacccgggtggtttattcggtcaacaaaaccaacagaccacaagtctttttagtaagccctttggccaggccacgaccacgcagaatactggattttctttcggcaacactagcaccattggccagcctagcaccaatacaatgggactatttggcgtgacacaggccagccagcctggaggactattcggcacagctacaaacacatccaccggcaccgcattcggaaccgggactggcctgttcggccagacaaacaccggatttggtgctgtcggaagcaccctatttggcaacaacaaactgaccactttcggcagcagtactacgtcagcaccaagtttcggtactacctccgggggtctgtttggcttcggaacgaacacgagtgggaacagcatattcggtagtaagccagcaccaggaaccttgggaactgggctcggggctggttttggcaccgctctgggagctggacaggcttcactgtttggcaataaccagccaaaaataggcggaccactcgggacaggcgcattcggcgctccaggctttaacacgacaactgctaccctgggcttcggggcaccccaggcccctgtcgccctcaccgatcccaacgccagcgctgcacagcaagccgtactgcagcagcatatcaactcgttgacgtatagtccgtttggggattccccccttttccggaatcccatgtcggatcccaaaaagaaggaagagcgactgaaaccaacgaaccctgctgcacagaaggccctgacaacacccactcactacaagctaacaccaaggcctgccacccgtgtgaggcctaaggctttgcagaccacaggaactgccaaatcccatcttttcgacggactggacgacgacgagccaagccttgcaaatggagcatttatgccgaagaagtcaatcaagaaactcgtactgaagaacctgaataattccaatttattttctcccgtcaatagagactcagaaaatctggcatcaccttcagagtacccagaaaacggtgagcgtttttcttttctgtcaaagccagtggacgagaatcaccagcaggacggcgatgaggattcattagtttctcatttttatacaaaccccatcgcaaaaccaatcccacagactccagagagcgctgggaacaaacattctaacagcaatagcgtggacgacacaattgtcgcactcaatatgagagccgcactgcgaaatgggctcgagggatcttcagaggagacatccttccacgatgaaagtctccaagatgatagagaagagatcgaaaacaactcctaccatatgcatcctgcgggtatcatccttacaaaagtggggtactacacaataccctctatggacgaccttgcaaaaataaccaacgaaaaaggcgaatgtattgtatcagatttcactatcggtcgtaaaggctacggttcaatttacttcgagggagacgtcaacctcaccaatctaaacctggacgatatcgtgcacatcaggagaaaggaggtagtagtgtatctcgacgacaatcaaaagccgcctgtgggtgaggggttgaatcgcaaggctgaggtgactctggatggcgtgtggccgacggacaagacgagtcgttgccttatcaaaagcccggacagactggcggatatcaactatgaaggacggctcgaagctgtgtctcgtaaacagggtgcccaatttaaagagtatcgccctgaaacaggcagctgggtcttcaaggtcagtcacttctcgaagtacggactgcaagacagtgatgaggaggaagaagaacaccctagtaagacgagtaccaagaagcttaagaccgctccccttccccctgcgtcccagacaacgcctttgcagatggcactgaatggtaaaccagcccctccgcctcagtctcagagtccagaagtcgaacaacttgggagggtagtggaactcgattcagacatggtcgacattacacaggaacctgtcctggacactatgttggaggagtccatgccagaagaccaggaaccggtgtccgcttccacacacatagcctctagtctgggcatcaacccacacgtcttacagatcatgaaggcttctcttctgacagatgaggaagacgtagacatggctctagatcaaagatttagtaggctgccctccaaagctgacacatcgcaggaaatctgtagccctcgattgcccatttccgcatcccattcctcaaagactagaagtctggtaggcggactgctccaaagcaagttcacgtctggtgcctttctgtccccatcagtatcggtacaggagtgtaggaccccaagagcggcttcactgatgaatattcctagtacctccagctggagtgtccctccccctctgacttcagtgtttactatgccttctcccgcaccagaggttcctctgaaaactgtgggaacaagacgtcagttaggcttggtgccacgagagaaatcagtgacttacggtaagggaaagcttctgatggacatggcactgtttatgggaagatcctttagggtcggctgggggccaaactggaccttagcaaacagtggtgaacaactgaacggttcgcatgagttggagaaccaccagattgcggacagtatggagtttggattcctcccgaacccggtcgcagtcaaaccactcacagaatcgccatttaaagtgcacttggagaagctgtctctgagacagagaaagcctgatgaagatatgaaactttatcaaaccccactcgaactcaagttgaagcacagcactgtgcacgtggacgagctgtgccccctgatcgtgcctaatttgggcgtcgcagtcatacacgattacgccgactgggtcaaggaagcttccggggatctcccagaagctcagattgtcaaacactggtcactaacctggaccctctgtgaagcactgtggggtcacttgaaagaacttgattcccaactgaatgaaccacgcgagtacatccagatactggaaagacggagggctttttcccgctggctgtcatgtaccgcaaccccccaaatagaggaagaggtatccttgactcagaaaaatagtccagttgaagccgtgttttcatatctgacaggcaagcgcatcagtgaagcttgctctcttgctcagcaatcgggcgatcatcgactcgctctcttgctgagtcagttcgttggatctcagtcggtgcgtgagctcctgactatgcagctggttgactggcatcagctgcaggcagatagcttcatccaggatgagagactgcgaatctttgctctgctggccggtaagccagtctggcagctgtccgagaagaagcagataaatgtctgcagccaactcgattggaagagaagcttggctattcacttatggtaccttttgcccccaactgcatctatctcaagagccctttccatgtatgaagaggcatttcaaaatacctcggattcagaccggtatgcctgcagtccattgccatcttacctggaagggagtggatgtgtcatcgcagaagagcagaacagccaaacgccactgcgggacgtatgcttccacctcctcaagctctacagtgacagcattagagagaaagccgtgagggagctgttgacacgacactgtcagttgttagagacacccgagtcctgggcgaaggaaacattcctgactcagaagttgagagtgccagccaagtggatccacgaagcaaaggcagtgcgggcacacatggaaagtgacaagcatctcgaagctctgtgcctgtttaaggccgagcactggaacagatgccataagctcattattagacacctggcttccgacgccatcatcaatgagaactatgattacctgaagggtttcctcgaggacctggcacccccagagagatcaagtttgatccaggattgggagaccagcggcttggtttacttagattatattcgggtcattgagatgctcaggcacatccagcaaatagctttgttttgcgtggagtggattgctcaggtgatgacttggagttcatacacatcaaagta

SEQ ID NO: 238171 - DNA, 5181 bp, Artificial Sequence
  derived and/or modified sequence
atgttcaacaagagcttcggcacccccttcggcggcggcaccggcggcttcggcaccaccagcaccttcggccagaacaccggcttcggcaccaccagcggcggcgccttcggcaccagcgccttcggcagcagcaacaacaccggcggcctgttcggcaacagccagaccaagcccggcggcctgttcggcaccagcagcttcagccagcccgccaccagcaccagcaccggcttcggcttcggcaccagcaccggcaccgccaacaccctgttcggcaccgccagcaccggcaccagcctgttcagcagccagaacaacgccttcgcccagaacaagcccaccggcttcggcaacttcggcaccagcaccagcagcggcggcctgttcggcaccaccaacaccaccagcaaccccttcggcagcaccagcggcagcctgttcggccccagcagcttcaccgccgcccccaccggcaccaccatcaagttcaacccccccaccggcaccgacaccatggtgaaggccggcgtgagcaccaacatcagcaccaagcaccagtgcatcaccgccatgaaggagtacgagagcaagagcctggaggagctgagactggaggactaccaggccaacagaaagggcccccagaaccaggtgggcgccggcaccaccaccggcctgttcggcagcagccccgccaccagcagcgccaccggcctgttcagcagcagcaccaccaacagcggcttcgcctacggccagaacaagaccgccttcggcaccagcaccaccggcttcggcaccaaccccggcggcctgttcggccagcagaaccagcagaccaccagcctgttcagcaagcccttcggccaggccaccaccacccagaacaccggcttcagcttcggcaacaccagcaccatcggccagcccagcaccaacaccatgggcctgttcggcgtgacccaggccagccagcccggcggcctgttcggcaccgccaccaacaccagcaccggcaccgccttcggcaccggcaccggcctgttcggccagaccaacaccggcttcggcgccgtgggcagcaccctgttcggcaacaacaagctgaccaccttcggcagcagcaccaccagcgcccccagcttcggcaccaccagcggcggcctgttcggcttcggcaccaacaccagcggcaacagcatcttcggcagcaagcccgcccccggcaccctgggcaccggcctgggcgccggcttcggcaccgccctgggcgccggccaggccagcctgttcggcaacaaccagcccaagatcggcggccccctgggcaccggcgccttcggcgcccccggcttcaacaccaccaccgccaccctgggcttcggcgccccccaggcccccgtggccctgaccgaccccaacgccagcgccgcccagcaggccgtgctgcagcagcacatcaacagcctgacctacagccccttcggcgacagccccctgttcagaaaccccatgagcgaccccaagaagaaggaggagagactgaagcccaccaaccccgccgcccagaaggccctgaccacccccacccactacaagctgacccccagacccgccaccagagtgagacccaaggccctgcagaccaccggcaccgccaagagccacctgttcgacggcctggacgacgacgagcccagcctggccaacggcgccttcatgcccaagaagagcatcaagaagctggtgctgaagaacctgaacaacagcaacctgttcagccccgtgaacagagacagcgagaacctggccagccccagcgagtaccccgagaacggcgagagattcagcttcctgagcaagcccgtggacgagaaccaccagcaggacggcgacgaggacagcctggtgagccacttctacaccaaccccatcgccaagcccatcccccagacccccgagagcgccggcaacaagcacagcaacagcaacagcgtggacgacaccatcgtggccctgaacatgagagccgccctgagaaacggcctggagggcagcagcgaggagaccagcttccacgacgagagcctgcaggacgacagagaggagatcgagaacaacagctaccacatgcaccccgccggcatcatcctgaccaaggtgggctactacaccatccccagcatggacgacctggccaagatcaccaacgagaagggcgagtgcatcgtgagcgacttcaccatcggcagaaagggctacggcagcatctacttcgagggcgacgtgaacctgaccaacctgaacctggacgacatcgtgcacatcagaagaaaggaggtggtggtgtacctggacgacaaccagaagccccccgtgggcgagggcctgaacagaaaggccgaggtgaccctggacggcgtgtggcccaccgacaagaccagcagatgcctgatcaagagccccgacagactggccgacatcaactacgagggcagactggaggccgtgagcagaaagcagggcgcccagttcaaggagtacagacccgagaccggcagctgggtgttcaaggtgagccacttcagcaagtacggcctgcaggacagcgacgaggaggaggaggagcaccccagcaagaccagcaccaagaagctgaagaccgcccccctgccccccgccagccagaccacccccctgcagatggccctgaacggcaagcccgccccccccccccagagccagagccccgaggtggagcagctgggcagagtggtggagctggacagcgacatggtggacatcacccaggagcccgtgctggacaccatgctggaggagagcatgcccgaggaccaggagcccgtgagcgccagcacccacatcgccagcagcctgggcatcaacccccacgtgctgcagatcatgaaggccagcctgctgaccgacgaggaggacgtggacatggccctggaccagagattcagcagactgcccagcaaggccgacaccagccaggagatctgcagccccagactgcccatcagcgccagccacagcagcaagaccagaagcctggtgggcggcctgctgcagagcaagttcaccagcggcgccttcctgagccccagcgtgagcgtgcaggagtgcagaacccccagagccgccagcctgatgaacatccccagcaccagcagctggagcgtgcccccccccctgaccagcgtgttcaccatgcccagccccgcccccgaggtgcccctgaagaccgtgggcaccagaagacagctgggcctggtgcccagagagaagagcgtgacctacggcaagggcaagctgctgatggacatggccctgttcatgggcagaagcttcagagtgggctggggccccaactggaccctggccaacagcggcgagcagctgaacggcagccacgagctggagaaccaccagatcgccgacagcatggagttcggcttcctgcccaaccccgtggccgtgaagcccctgaccgagagccccttcaaggtgcacctggagaagctgagcctgagacagagaaagcccgacgaggacatgaagctgtaccagacccccctggagctgaagctgaagcacagcaccgtgcacgtggacgagctgtgccccctgatcgtgcccaacctgggcgtggccgtgatccacgactacgccgactgggtgaaggaggccagcggcgacctgcccgaggcccagatcgtgaagcactggagcctgacctggaccctgtgcgaggccctgtggggccacctgaaggagctggacagccagctgaacgagcccagagagtacatccagatcctggagagaagaagagccttcagcagatggctgagctgcaccgccaccccccagatcgaggaggaggtgagcctgacccagaagaacagccccgtggaggccgtgttcagctacctgaccggcaagagaatcagcgaggcctgcagcctggcccagcagagcggcgaccacagactggccctgctgctgagccagttcgtgggcagccagagcgtgagagagctgctgaccatgcagctggtggactggcaccagctgcaggccgacagcttcatccaggacgagagactgagaatcttcgccctgctggccggcaagcccgtgtggcagctgagcgagaagaagcagatcaacgtgtgcagccagctggactggaagagaagcctggccatccacctgtggtacctgctgccccccaccgccagcatcagcagagccctgagcatgtacgaggaggccttccagaacaccagcgacagcgacagatacgcctgcagccccctgcccagctacctggagggcagcggctgcgtgatcgccgaggagcagaacagccagacccccctgagagacgtgtgcttccacctgctgaagctgtacagcgacagcatcagagagaaggccgtgagagagctgctgaccagacactgccagctgctggagacccccgagagctgggccaaggagaccttcctgacccagaagctgagagtgcccgccaagtggatccacgaggccaaggccgtgagagcccacatggagagcgacaagcacctggaggccctgtgcctgttcaaggccgagcactggaacagatgccacaagctgatcatcagacacctggccagcgacgccatcatcaacgagaactacgactacctgaagggcttcctggaggacctggccccccccgagagaagcagcctgatccaggactgggagaccagcggcctggtgtacctggactacatcagagtgatcgagatgctgagacacatccagcaggtggactgcagcggcaacgacctggagcagctgcacatcaaggtgaccagcctgtgcagcagaatcgagcagatccagtgctacagcgccaaggacagactggcccagagcgacatggccaagagagtggccaacctgctgagagtggtgctgagcctgcaccacccccccgacagaaccagcgacagcacccccgacccccagagagtgcccctgagactgctggccccccacatcggcagactgcccatgcccgaggactacgccatggacgagctgagaagcctgacccagagctacctgagagagctggccgtgggcagcctgtag

SEQ ID NO: 238172 - DNA, 4917 bp, Artificial Sequence
  derived and/or modified sequence
atgttcaacaagagcttcggcacccccttcggcggcggcaccggcggcttcggcaccaccagcaccttcggccagaacaccggcttcggcaccaccagcggcggcgccttcggcaccagcgccttcggcagcagcaacaacaccggcggcctgttcggcaacagccagaccaagcccggcggcctgttcggcaccagcagcttcagccagcccgccaccagcaccagcaccggcttcggcttcggcaccagcaccggcaccgccaacaccctgttcggcaccgccagcaccggcaccagcctgttcagcagccagaacaacgccttcgcccagaacaagcccaccggcttcggcaacttcggcaccagcaccagcagcggcggcctgttcggcaccaccaacaccaccagcaaccccttcggcagcaccagcggcagcctgttcggccccagcagcttcaccgccgcccccaccggcaccaccatcaagttcaacccccccaccggcaccgacaccatggtgaaggccggcgtgagcaccaacatcagcaccaagcaccagtgcatcaccgccatgaaggagtacgagagcaagagcctggaggagctgagactggaggactaccaggccaacagaaagggcccccagaaccaggtgggcgccggcaccaccaccggcctgttcggcagcagccccgccaccagcagcgccaccggcctgttcagcagcagcaccaccaacagcggcttcgcctacggccagaacaagaccgccttcggcaccagcaccaccggcttcggcaccaaccccggcggcctgttcggccagcagaaccagcagaccaccagcctgttcagcaagcccttcggccaggccaccaccacccagaacaccggcttcagcttcggcaacaccagcaccatcggccagcccagcaccaacaccatgggcctgttcggcgtgacccaggccagccagcccggcggcctgttcggcaccgccaccaacaccagcaccggcaccgccttcggcaccggcaccggcctgttcggccagaccaacaccggcttcggcgccgtgggcagcaccctgttcggcaacaacaagctgaccaccttcggcagcagcaccaccagcgcccccagcttcggcaccaccagcggcggcctgttcggcttcggcaccaacaccagcggcaacagcatcttcggcagcaagcccgcccccggcaccctgggcaccggcctgggcgccggcttcggcaccgccctgggcgccggccaggccagcctgttcggcaacaaccagcccaagatcggcggccccctgggcaccggcgccttcggcgcccccggcttcaacaccaccaccgccaccctgggcttcggcgccccccaggcccccgtggccctgaccgaccccaacgccagcgccgcccagcaggccgtgctgcagcagcacatcaacagcctgacctacagccccttcggcgacagccccctgttcagaaaccccatgagcgaccccaagaagaaggaggagagactgaagcccaccaaccccgccgcccagaaggccctgaccacccccacccactacaagctgacccccagacccgccaccagagtgagacccaaggccctgcagaccaccggcaccgccaagagccacctgttcgacggcctggacgacgacgagcccagcctggccaacggcgccttcatgcccaagaagagcatcaagaagctggtgctgaagaacctgaacaacagcaacctgttcagccccgtgaacagagacagcgagaacctggccagccccagcgagtaccccgagaacggcgagagattcagcttcctgagcaagcccgtggacgagaaccaccagcaggacggcgacgaggacagcctggtgagccacttctacaccaaccccatcgccaagcccatcccccagacccccgagagcgccggcaacaagcacagcaacagcaacagcgtggacgacaccatcgtggccctgaacatgagagccgccctgagaaacggcctggagggcagcagcgaggagaccagcttccacgacgagagcctgcaggacgacagagaggagatcgagaacaacagctaccacatgcaccccgccggcatcatcctgaccaaggtgggctactacaccatccccagcatggacgacctggccaagatcaccaacgagaagggcgagtgcatcgtgagcgacttcaccatcggcagaaagggctacggcagcatctacttcgagggcgacgtgaacctgaccaacctgaacctggacgacatcgtgcacatcagaagaaaggaggtggtggtgtacctggacgacaaccagaagccccccgtgggcgagggcctgaacagaaaggccgaggtgaccctggacggcgtgtggcccaccgacaagaccagcagatgcctgatcaagagccccgacagactggccgacatcaactacgagggcagactggaggccgtgagcagaaagcagggcgcccagttcaaggagtacagacccgagaccggcagctgggtgttcaaggtgagccacttcagcaagtacggcctgcaggacagcgacgaggaggaggaggagcaccccagcaagaccagcaccaagaagctgaagaccgcccccctgccccccgccagccagaccacccccctgcagatggccctgaacggcaagcccgccccccccccccagagccagagccccgaggtggagcagctgggcagagtggtggagctggacagcgacatggtggacatcacccaggagcccgtgctggacaccatgctggaggagagcatgcccgaggaccaggagcccgtgagcgccagcacccacatcgccagcagcctgggcatcaacccccacgtgctgcagatcatgaaggccagcctgctgaccgacgaggaggacgtggacatggccctggaccagagattcagcagactgcccagcaaggccgacaccagccaggagatctgcagccccagactgcccatcagcgccagccacagcagcaagaccagaagcctggtgggcggcctgctgcagagcaagttcaccagcggcgccttcctgagccccagcgtgagcgtgcaggagtgcagaacccccagagccgccagcctgatgaacatccccagcaccagcagctggagcgtgcccccccccctgaccagcgtgttcaccatgcccagccccgcccccgaggtgcccctgaagaccgtgggcaccagaagacagctgggcctggtgcccagagagaagagcgtgacctacggcaagggcaagctgctgatggacatggccctgttcatgggcagaagcttcagagtgggctggggccccaactggaccctggccaacagcggcgagcagctgaacggcagccacgagctggagaaccaccagatcgccgacagcatggagttcggcttcctgcccaaccccgtggccgtgaagcccctgaccgagagccccttcaaggtgcacctggagaagctgagcctgagacagagaaagcccgacgaggacatgaagctgtaccagacccccctggagctgaagctgaagcacagcaccgtgcacgtggacgagctgtgccccctgatcgtgcccaacctgggcgtggccgtgatccacgactacgccgactgggtgaaggaggccagcggcgacctgcccgaggcccagatcgtgaagcactggagcctgacctggaccctgtgcgaggccctgtggggccacctgaaggagctggacagccagctgaacgagcccagagagtacatccagatcctggagagaagaagagccttcagcagatggctgagctgcaccgccaccccccagatcgaggaggaggtgagcctgacccagaagaacagccccgtggaggccgtgttcagctacctgaccggcaagagaatcagcgaggcctgcagcctggcccagcagagcggcgaccacagactggccctgctgctgagccagttcgtgggcagccagagcgtgagagagctgctgaccatgcagctggtggactggcaccagctgcaggccgacagcttcatccaggacgagagactgagaatcttcgccctgctggccggcaagcccgtgtggcagctgagcgagaagaagcagatcaacgtgtgcagccagctggactggaagagaagcctggccatccacctgtggtacctgctgccccccaccgccagcatcagcagagccctgagcatgtacgaggaggccttccagaacaccagcgacagcgacagatacgcctgcagccccctgcccagctacctggagggcagcggctgcgtgatcgccgaggagcagaacagccagacccccctgagagacgtgtgcttccacctgctgaagctgtacagcgacagcatcagagagaaggccgtgagagagctgctgaccagacactgccagctgctggagacccccgagagctgggccaaggagaccttcctgacccagaagctgagagtgcccgccaagtggatccacgaggccaaggccgtgagagcccacatggagagcgacaagcacctggaggccctgtgcctgttcaaggccgagcactggaacagatgccacaagctgatcatcagacacctggccagcgacgccatcatcaacgagaactacgactacctgaagggcttcctggaggacctggccccccccgagagaagcagcctgatccaggactgggagaccagcggcctggtgtacctggactacatcagagtgatcgagatgctgagacacatccagcagatcgccctgttctgcgtggagtggatcgcccaggtgatgacctggagcagctacaccagcaagtag

SEQ ID NO: 238173 - protein, 613 aa, Artificial Sequence
  derived and/or modified sequence
MGKIENNERVILNVGGTRHETYRSTLKTLPGTRLALLASSEPPGDCLTTAGDKLQPSPPPLSPPPRAPPLSPGPGGCFEGGAGNCSSRGGRASDHPGGGREFFFDRHPGVFAYVLNYYRTGKLHCPADVCGPLFEEELAFWGIDETDVEPCCWMTYRQHRDAEEALDIFETPDLIGGDPGDDEDLAAKRLGIEDAAGLGGPDGKSGRWRRLQPRMWALFEDPYSSRAARFIAFASLFFILVSITTFCLETHEAFNIVKNKTEPVINGTSVVLQYEIETDPALTYVEGVCVVWFTFEFLVRIVFSPNKLEFIKNLLNIIDFVAILPFYLEVGLSGLSSKAAKDVLGFLRVVRFVRILRIFKLTRHFVGLRVLGHTLRASTNEFLLLIIFLALGVLIFATMIYYAERVGAQPNDPSASEHTQFKNIPIGFWWAVVTMTTLGYGDMYPQTWSGMLVGALCALAGVLTIAMPVPVIVNNFGMYYSLAMAKQKLPRKRKKHIPPAPQASSPTFCKTELNMACNSTQSDTCLGKDNRLLEHNRSVLSGDDSTGSEPPLSPPERLPIRRSSTRDKNRRGETCFLLTTGDYTCASDGGIRKDNCKEVVITGYTQAEARSLT

SEQ ID NO: 238174 - DNA, 1842 bp, Artificial Sequence
  derived and/or modified sequence
atggggaaaatcgagaacaatgaaagggtgatactgaacgtgggcggcaccaggcacgagacctatagatccaccctgaagaccctgcctggaaccagactggccttgttagcaagcagcgagccacccggggactgcctgactacagcaggagacaaattgcagccctcccccccccccctgtccccaccaccacgcgcacccccgctatctccgggaccaggggggtgcttcgaagggggcgccggaaattgctcttcccgtgggggccgagcctctgaccaccccggcggaggaagagagttcttttttgatcgacatccgggagtatttgcttatgtattgaattattatcggaccgggaaactgcattgccctgccgatgtgtgcggtcctctgtttgaggaggaactggctttttggggcatagacgagacagacgtggaaccatgttgctggatgacctacaggcagcatagagacgcagaggaagctctcgacatatttgaaactcctgaccttattggcggggatccaggcgacgacgaggacttagctgctaagcggctcggcatcgaggacgccgccggcctcggcggccccgatggaaagtctggacgttggagacgtctccagcctcgtatgtgggcattgttcgaggatccttacagcagccgggcagcacggtttatcgcgttcgcctccctgtttttcatactcgtgagtattaccaccttttgtcttgagacccacgaagccttcaatatcgtcaaaaataagacagaacctgtcatcaatggcacatctgtcgttctgcaatatgagattgaaactgaccctgctctgacttatgtggaaggcgtttgtgtggtttggttcactttcgaatttctagtaaggatcgtgttctctcctaataaattagaatttatcaaaaatctcttgaacatcatcgacttcgtagcaatcttgcccttctaccttgaagtgggactctccgggttatctagcaaggccgcaaaggacgttctgggctttctcagagtagtgcgctttgtcagaatcctcaggatttttaaacttactcgacactttgtgggtttaagggtgcttggccacactttgagggcatccaccaatgagttcctgcttctgatcatattcctggcattaggtgtgctgatctttgcaacaatgatatattacgcggagagggtcggagcacagcccaacgacccctcagccagcgaacacacccagttcaaaaatattccaattggtttctggtgggccgtcgtaactatgacgacccttgggtatggcgacatgtatcctcagacctggtcaggtatgctggtgggggccctctgcgcactggcgggggtgctgaccatcgcaatgcccgtgccagttattgttaacaattttggcatgtattactcactggccatggccaaacagaagctgccaagaaagaggaagaagcacataccacccgccccccaggcttctagtcctaccttctgcaagactgaactcaatatggcctgtaacagtacccagtccgatacatgtcttggcaaagacaaccgccttctcgaacacaaccggagtgtgttgtccggggacgattcaactggtagtgagcctcctcttagtccccctgaacgactccctatacggagaagttccacacgggacaaaaatcgaagaggcgagacttgtttcttactgacaaccggcgattatacctgcgcttccgatggaggcattcgtaaagataactgcaaggaggtcgtgatcacggggtacacacaggccgaagctcggagccttacctag

SEQ ID NO: 238175 - DNA, 1842 bp, Artificial Sequence
  derived and/or modified sequence
atgggaaaaattgaaaacaatgaacgggtgattctaaacgtcggggggactcgccatgaaacttatcggagcacactgaagacgttgccgggcacaaggctggccctgctcgcttcgagtgagccacccggagactgtttgaccacagctggagataagttgcagccgtccccccctcccctctctccccccccacgagcacctcccttaagcccggggccagggggttgcttcgagggcggggccgggaactgctcaagccgaggcggacgggcctcggaccatccgggaggcggacgcgagttcttctttgatcgacatcccggggttttcgcatatgtcctcaattactataggactggcaaactgcattgccccgctgacgtgtgcggacctctctttgaagaggagcttgctttctggggcattgatgaaacagatgtagagccttgctgctggatgacttaccgtcaacaccgtgatgcggaggaagccctggatatcttcgagactccggaccttatcggaggagacccgggcgacgatgaggatctggcagctaagcggcttggcattgaggatgcagcggggctgggaggtcctgacgggaagtccggtcgctggcgtcggctgcagccccggatgtgggcattatttgaagatccctacagtagcagagctgccaggttcatcgcttttgcttcattgttttttattctggtcagtatcaccacattctgcttagaaactcacgaggcattcaacatcgtgaaaaacaaaaccgaacctgtaatcaacggcacatccgtcgttctccaatatgaaattgaaactgaccccgctcttacttatgtcgaaggcgtgtgcgttgtttggttcacatttgagtttcttgtgcgcatcgttttctctccaaacaagctcgagtttatcaagaacctactcaacatcattgatttcgtggccatcctgccattttacctggaagtcgggttgtcgggactgtcaagcaaggccgccaaggatgtcctgggattcctgagggtagtcagattcgtacggatattaagaatcttcaagttgacgcgtcactttgtcggattgcgtgtcctgggccacactctcagggcctcaactaatgagttcctcttactgatcatttttctagccctgggggtgcttatcttcgctaccatgatttactacgccgaacgggtaggcgcacaacctaatgaccctagtgctagtgagcatacacagtttaaaaacattcccatcggtttttggtgggccgtggtcaccatgaccaccctgggttacggcgatatgtatcctcagacgtggagcggtatgcttgtaggggctctttgcgctctggcgggcgtgctcacgatagctatgcccgtccccgtcattgttaataattttggaatgtattactccttagcaatggcaaaacagaagctgccaagaaagagaaaaaagcacatccctcccgctccgcaggctagctcaccgacattctgcaagactgagctaaacatggcatgtaattccacgcagagtgatacctgccttggcaaagataaccgcctcttagagcacaaccggagtgtgctgtctggcgatgacagcactggctcagagcctcccctctctcctcctgagagactgccaattcgccgctcctccacaagggataagaacagaaggggtgagacatgctttttgcttaccacaggcgactatacttgcgcctctgatggcggtatacgtaaagacaactgtaaagaggtggtgattacaggatacacgcaggcagaggccaggtcattaacatag

SEQ ID NO: 238176 - DNA, 1842 bp, Artificial Sequence
  derived and/or modified sequence
atgggcaagattgaaaataatgaaagagtcatcctgaatgtgggcggcaccaggcatgagacctaccgcagcaccctgaagaccctgcccggcacccggctggccctgctggccagcagcgagcccccaggggactgcctgaccacagctggggacaagctgcagcccagccccccacccctgagccccccaccccgggccccacccctgagccctggccctgggggctgctttgagggcggggccggcaactgcagcagcagaggaggccgggccagtgaccaccctgggggcggccgggagttcttctttgacagacaccctggggtgtttgcctacgtgctgaactactacagaacaggcaagctgcactgcccagcagatgtgtgtggccccctgtttgaggaggagctggccttctggggcattgatgaaacagatgtggagccctgctgctggatgacctaccggcagcacagagatgctgaggaggccctggacatctttgagaccccagacctgattggaggagaccctggagatgatgaggacctggccgccaagaggctgggcattgaagatgctgctggcctgggcggcccagatggcaagagcggccgctggaggcggctgcagcccaggatgtgggccctgtttgaggacccctacagcagcagagctgcccgcttcatcgcctttgccagcctcttcttcatcctggtgtccatcaccaccttctgcctggagacccatgaggccttcaacatcgtgaagaacaagacagagcctgtgatcaatggcacctctgtggtgctgcagtatgaaattgaaacagatcctgccctgacctacgtggagggcgtgtgtgtggtgtggttcacctttgagttcctggtgagaattgtgttcagccccaacaagctggagttcatcaagaacctgctgaacatcatcgactttgtggccatcctgcccttctacctggaggtgggcctgagcggcctgagcagcaaggccgccaaggatgtgctgggcttcctgcgggtggtgcgctttgtgcgcatcctgcgcatcttcaagctgaccaggcactttgtgggcctgcgggtgctgggccacaccctgcgggccagcaccaatgagttcctgctgctgatcatcttcctggccctgggcgtgctgatctttgccaccatgatctactatgcagagcgggtgggcgcccagcccaatgaccccagcgccagcgagcacacccagttcaagaacatccccatcggcttctggtgggccgtggtgaccatgaccaccctgggctacggggacatgtacccccagacctggagcggcatgctggtgggcgccctgtgtgccctggccggcgtgctgaccatcgccatgcctgtgcctgtgattgtgaacaactttggcatgtactacagcctggccatggccaagcagaagctgcccaggaagaggaagaagcacatccccccagccccccaggccagcagccccaccttctgcaagacagagctgaacatggcctgcaacagcacccagagcgacacctgcctgggcaaggacaaccggctgctggagcacaacagatctgtgctgtctggagatgacagcacaggcagcgagccccccctgagccccccagagcggctgcccatcagaagaagcagcacccgggacaagaacagaagaggagagacctgcttcctgctgaccaccggggactacacctgtgccagtgatggcggcatcaggaaggacaactgcaaggaggtggtgatcaccggctacacccaggccgaggcccggagcctgacctag

SEQ ID NO: 238177 - DNA, 1842 bp, Artificial Sequence
  derived and/or modified sequence
atgggcaagatcgagaacaacgagcgggtgatcctgaacgtgggcggcacccgccatgagacctataggagcactctgaaaaccctacctgggacgaggctcgccctgctcgccagcagcgagccaccaggggattgtttgacaaccgccggcgacaagctgcaaccaagcccacccccactcagtccacccccaagagctcctcccctgtctccaggccccggagggtgtttcgagggtggcgccggaaattgctctagcagaggtggtcgtgcgtctgatcatccaggtggcggtagggaattcttttttgaccgacatcccggggtcttcgcttatgtcctgaattactatagaacaggaaagcttcactgcccggccgatgtttgcggtcctctattcgaggaagagttggctttttgggggattgacgagacagacgttgagccttgctgttggatgacataccgacaacatcgtgatgctgaggaggccttggatatattcgaaacaccagacctgatcgggggcgatccaggcgacgacgaagacctcgcagccaagcgccttggcatagaggacgccgcaggtcttgggggccccgatggaaagtccgggcgttggcgtaggctccagccgcggatgtgggctctgttcgaagacccctactcttccagggcagctcgattcatagcatttgcatcactgttttttatactcgtgagcattacaaccttttgcttggaaacgcacgaggcctttaacatagtgaagaacaagacagaacccgtcatcaatggcacgagtgtggtactgcagtatgagatagaaaccgaccctgccctgacatacgtggaaggggtttgcgtcgtgtggttcactttcgaatttctcgtgcgtatcgtgtttagtccaaataaacttgaattcatcaagaacctactgaacattattgattttgtggccatcctccccttctatctcgaagttggtctaagtggtctcagttccaaagccgctaaggacgtgctggggttccttcgagtggtgcgctttgtgcgtattctgcggatcttcaaactaactaggcacttcgtgggcctgagagtgctcggccatacgctgcgcgccagtaccaacgaatttctgctcctgatcatatttctggccctcggcgtcctcattttcgccactatgatctattatgctgaacgggtcggggcacaacctaacgacccgagcgcttccgaacacactcagtttaagaatattcccatcgggttctggtgggccgtcgtaacaatgacaacactaggttatggggatatgtatccccagacatggtctggcatgttggtgggcgctctgtgtgctctggccggagtcttgactattgccatgcccgtgcccgtgatcgtgaataacttcggtatgtactactctctggcaatggccaaacagaaactgccgaggaagcggaagaagcatattccccctgcaccccaagcctcctcgccaacgttttgtaagacagaactgaacatggcttgcaattcaacacagtcagatacctgcctgggaaaagataacaggctgctggagcataatagatctgtactatccggggacgattccaccggaagcgaaccgcctctttctcctcctgagaggctccccattcggaggagctctactcgggataagaatcgccggggcgaaacttgctttctcctaaccacaggagactacacttgtgcaagcgacggaggaatccgaaaggataactgcaaggaggttgtcattactggatacacgcaggcagaagctaggtccctgacctag

SEQ ID NO: 238178 - DNA, 1842 bp, Artificial Sequence
  derived and/or modified sequence
atgggcaagatcgagaacaacgagcgggtgatcctgaacgtgggcgggactcggcatgaaacttatcggtctaccttgaaaactcttcctggcactcggttagccctgctggcttcttccgaacctcctggagactgcctgaccaccgctggggacaaactccagcctagcccaccccccttgtcgcccccccctagggcaccacctctgtctccaggcccagggggttgctttgaaggcggggcaggtaattgttccagcagaggtggaagggcctctgaccaccccggcgggggacgtgagtttttttttgaccgccacccgggcgtgttcgcctatgtccttaattattatagaacaggaaagctgcactgtccagccgacgtttgtggacccctctttgaggaggagttggccttctggggcatcgatgagacggatgtcgagccttgctgttggatgacctaccggcagcatcgcgatgcagaagaagccctagatatttttgagactccggatctgatcgggggggaccccggagacgatgaggacttagccgcaaagcgattaggaattgaggatgcagccggcttgggaggtcccgacggaaaatctggccggtggcgacggctccagccccggatgtgggccctctttgaagacccctactcaagccgtgcagctcgctttatagcattcgcatcccttttcttcatcttggtaagtatcaccaccttctgcttggaaacgcacgaggctttcaacatcgtgaaaaacaagactgagccagtcatcaacgggactagtgttgtgctgcagtacgagatagagacagatccagccctgacatatgtggaaggtgtctgtgtcgtctggtttacattcgaatttttagtgcgaattgtgttttcacccaataaacttgagtttatcaagaatctcttaaatatcattgattttgtagccattcttcccttttacttggaagttggtttaagtggactgtcctccaaggcagccaaggacgtgctgggtttcctgcgcgtggttcgttttgtaaggattctgcgcattttcaagctgaccagacatttcgtgggtctgagggtgctcggtcacacattgcgagcttccactaatgagtttttactgctcataatcttcttagccctcggcgttctgatctttgccaccatgatatattatgcagagcgcgtgggggcccaacctaacgatccatcggcgagcgagcacacccaattcaagaacatcccaattggattttggtgggcagtggtgactatgactacactcggatacggcgatatgtatcctcaaacatggtctgggatgctggtcggtgctctgtgcgcactggcaggggtccttacgatcgccatgccagtgcccgtgatcgtgaataacttcgggatgtattattcactggccatggcgaagcagaagttgcccaggaaaagaaagaaacatatcccacccgcgccccaggcaagcagcccaacattctgtaagacagagctgaacatggcgtgtaacagcacccagtctgatacgtgtctagggaaggacaacagactgcttgaacacaatcgctcagtgttgtctggagatgattctaccgggagcgagccacctctgtccccaccggagaggcttccaatcaggcggtctagtacacgtgacaagaacagacgaggcgagacgtgcttcttgctgacaactggagactatacctgtgcgtccgatggaggaatccggaaggacaactgtaaagaagttgttatcactggttacactcaggcggaggcccgttctttgacgtag

SEQ ID NO: 238179 - DNA, 3510 bp, Artificial Sequence
  derived and/or modified sequence
gtgcttcggatggcggcgggaggttgatggcgagtggtgctgaagggacagctccagcagtggctgatttgggggagaaacaaaatctgcagatggaatccgagcagggcgacttcaccttcaagtggtgagctctcctgacctgcggccagtctccactccattcacggccagccgatctgcccgctcccggaggggtcgggcagtgccggctggacccgccccgagctccatggtttgcccaaccctgcgcgatggtgactctgggcgcggaggttggcgactggcaaatccgcagatcacagaatgaaggcggggagcgcggccggcggccggcgggggctttctcccccaccccagcgcccagggaagcggctcaaccacctgaatccggaaaacgccaacaagtagtttctcgtcggagaagggcggctcacctgggcgccaagactcagtcccgctgcccagagaacctcgtccactcggaaaccaaagcagaaccacttttctctcggtctcgttaagtcatgtctgagtcacagagatgggcaagatcgagaacaacgagagggtgatcctcaatgtcgggggcacccggcacgaaacctaccgcagcaccctcaagaccctgcctggaacacgcctggcccttcttgcctcctccgagcccccaggcgactgcttgaccacggcgggcgacaagctgcagccgtcgccgcctccactgtcgccgccgccgagagcgcccccgctgtcccccgggccaggcggctgcttcgagggcggcgcgggcaactgcagttcccgcggcggcagggccagcgaccatcccggtggcggccgcgagttcttcttcgaccggcacccgggcgtcttcgcctatgtgctcaattactaccgcaccggcaagctgcactgccccgcagacgtgtgcgggccgctcttcgaggaggagctggccttctggggcatcgacgagaccgacgtggagccctgctgctggatgacctaccggcagcaccgcgacgccgaggaggcgctggacatcttcgagacccccgacctcattggcggcgaccccggcgacgacgaggacctggcggccaagaggctgggcatcgaggacgcggcggggctcgggggccccgacggcaaatctggccgctggaggaggctgcagccccgcatgtgggccctcttcgaagacccctactcgtccagagccgccaggtttattgcttttgcttctttattcttcatcctggtttcaattacaactttttgcctggaaacacatgaagctttcaatattgttaaaaacaagacagaaccagtcatcaatggcacaagtgttgttctacagtatgaaattgaaacggatcctgccttgacgtatgtagaaggagtgtgtgtggtgtggtttacttttgaatttttagtccgtattgttttttcacccaataaacttgaattcatcaaaaatctcttgaatatcattgactttgtggccatcctacctttctacttagaggtgggactcagtgggctgtcatccaaagctgctaaagatgtgcttggcttcctcagggtggtaaggtttgtgaggatcctgagaattttcaagctcacccgccattttgtaggtctgagggtgcttggacatactcttcgagctagtactaatgaatttttgctgctgataattttcctggctctaggagttttgatatttgctaccatgatctactatgccgagagagtgggagctcaacctaacgacccttcagctagtgagcacacacagttcaaaaacattcccattgggttctggtgggctgtagtgaccatgactaccctgggttatggggatatgtacccccaaacatggtcaggcatgctggtgggagccctgtgtgctctggctggagtgctgacaatagccatgccagtgcctgtcattgtcaataattttggaatgtactactccttggcaatggcaaagcagaaacttccaaggaaaagaaagaagcacatccctcctgctcctcaggcaagctcacctactttttgcaagacagaattaaatatggcctgcaatagtacacagagtgacacatgtctgggcaaagacaatcgacttctggaacataacagatcagtgttatcaggtgacgacagtacaggaagtgagccgccactatcacccccagaaaggctccccatcagacgctctagtaccagagacaaaaacagaagaggggaaacatgtttcctactgacgacaggtgattacacgtgtgcttctgatggagggatcaggaaagataactgcaaagaggttgtcattactggttacacgcaagccgaggccagatctcttacttaatgacttggggaaggcacaaaacatgagagaaagtgttgtacagaatttatcatggattattgactgctgagaaagggacagtggaatttagccataccaaggactatactggaaacagacttctgctgctgaatgtgccctgatgtgaccaggttgcacttggaagagatcctcgcgtcttcatgaggcacttaaagcttataaaagaactgcggctggaactcatctggtgctccccatgagagtgctctgcttgtagactggccagtgtccatgaaacaactgtaaataccaacatgtgtgcatgggtcaacagtcttggccatttctcatcaaaagaagccaaattcatgatcaacatctctgaagtttcaagtaaggcccacacttctttgaattactcttcatgggcccacattaggttgtgctgtgaattacttaaggcagtgatactgatgtagtatagttttgtcttaatttcccttatttctacttctttggttgaatctatgaacttgattgtataattttcttataaattactgatgtaatcagcttgtcaattatgttgtgaaattgttagtattcatttatcaaaaatgacctatgtttagtcacatatttgtttagttctgggaaattgttatagcttaaatggaactcaccaacattattcatagtttaagtcttttatcattattacctcaattataaatattacaaaaacataattctggcaatgagagtatttttttattcaatgatcaaggagcaatgtcagtatatagtagaatatcaattaaattatatcctaaaatgtatattttgcataaaagagatattctttaatcaattacttttttgtgagttttgtggcaaatgaagcttgtacgtgtctttaaaactgttgtagatgaaactgtataagatttttacatcttgcttaatcaatattttcagagtctattagttcccctgggattctgaatataacatatagcctattataaatccctgtatcgtggaccttttgtgaacatttcaaggcgcatgcacaaccttgatgataaccagtggaaatgtaactaactgaaatgaagaataaaaggcaaatgagctgggga

SEQ ID NO: 238180 - DNA, 3026 bp, Artificial Sequence
  derived and/or modified sequence
agtcatgtctgagtcacagagatgggcaagatcgagaacaacgagagggtgatcctcaatgtcgggggcacccggcacgaaacctaccgcagcaccctcaagaccctgcctggaacacgcctggcccttcttgcctcctccgagcccccaggcgactgcttgaccacggcgggcgacaagctgcagccgtcgccgcctccactgtcgccgccgccgagagcgcccccgctgtcccccgggccaggcggctgcttcgagggcggcgcgggcaactgcagttcccgcggcggcagggccagcgaccatcccggtggcggccgcgagttcttcttcgaccggcacccgggcgtcttcgcctatgtgctcaattactaccgcaccggcaagctgcactgccccgcagacgtgtgcgggccgctcttcgaggaggagctggccttctggggcatcgacgagaccgacgtggagccctgctgctggatgacctaccggcagcaccgcgacgccgaggaggcgctggacatcttcgagacccccgacctcattggcggcgaccccggcgacgacgaggacctggcggccaagaggctgggcatcgaggacgcggcggggctcgggggccccgacggcaaatctggccgctggaggaggctgcagccccgcatgtgggccctcttcgaagacccctactcgtccagagccgccaggtttattgcttttgcttctttattcttcatcctggtttcaattacaactttttgcctggaaacacatgaagctttcaatattgttaaaaacaagacagaaccagtcatcaatggcacaagtgttgttctacagtatgaaattgaaacggatcctgccttgacgtatgtagaaggagtgtgtgtggtgtggtttacttttgaatttttagtccgtattgttttttcacccaataaacttgaattcatcaaaaatctcttgaatatcattgactttgtggccatcctacctttctacttagaggtgggactcagtgggctgtcatccaaagctgctaaagatgtgcttggcttcctcagggtggtaaggtttgtgaggatcctgagaattttcaagctcacccgccattttgtaggtctgagggtgcttggacatactcttcgagctagtactaatgaatttttgctgctgataattttcctggctctaggagttttgatatttgctaccatgatctactatgccgagagagtgggagctcaacctaacgacccttcagctagtgagcacacacagttcaaaaacattcccattgggttctggtgggctgtagtgaccatgactaccctgggttatggggatatgtacccccaaacatggtcaggcatgctggtgggagccctgtgtgctctggctggagtgctgacaatagccatgccagtgcctgtcattgtcaataattttggaatgtactactccttggcaatggcaaagcagaaacttccaaggaaaagaaagaagcacatccctcctgctcctcaggcaagctcacctactttttgcaagacagaattaaatatggcctgcaatagtacacagagtgacacatgtctgggcaaagacaatcgacttctggaacataacagatcagtgttatcaggtgacgacagtacaggaagtgagccgccactatcacccccagaaaggctccccatcagacgctctagtaccagagacaaaaacagaagaggggaaacatgtttcctactgacgacaggtgattacacgtgtgcttctgatggagggatcaggaaagataactgcaaagaggttgtcattactggttacacgcaagccgaggccagatctcttacttaatgacttggggaaggcacaaaacatgagagaaagtgttgtacagaatttatcatggattattgactgctgagaaagggacagtggaatttagccataccaaggactatactggaaacagacttctgctgctgaatgtgccctgatgtgaccaggttgcacttggaagagatcctcgcgtcttcatgaggcacttaaagcttataaaagaactgcggctggaactcatctggtgctccccatgagagtgctctgcttgtagactggccagtgtccatgaaacaactgtaaataccaacatgtgtgcatgggtcaacagtcttggccatttctcatcaaaagaagccaaattcatgatcaacatctctgaagtttcaagtaaggcccacacttctttgaattactcttcatgggcccacattaggttgtgctgtgaattacttaaggcagtgatactgatgtagtatagttttgtcttaatttcccttatttctacttctttggttgaatctatgaacttgattgtataattttcttataaattactgatgtaatcagcttgtcaattatgttgtgaaattgttagtattcatttatcaaaaatgacctatgtttagtcacatatttgtttagttctgggaaattgttatagcttaaatggaactcaccaacattattcatagtttaagtcttttatcattattacctcaattataaatattacaaaaacataattctggcaatgagagtatttttttattcaatgatcaaggagcaatgtcagtatatagtagaatatcaattaaattatatcctaaaatgtatattttgcataaaagagatattctttaatcaattacttttttgtgagttttgtggcaaatgaagcttgtacgtgtctttaaaactgttgtagatgaaactgtataagatttttacatcttgcttaatcaatattttcagagtctattagttcccctgggattctgaatataacatatagcctattataaatccctgtatcgtggaccttttgtgaacatttcaaggcgcatgcacaaccttgatgataaccagtggaaatgtaactaactgaaatgaagaataaaaggcaaatgagctggggataaacttgaatgttatctgattaaattactcaaattatt

SEQ ID NO: 238181 - DNA, 1842 bp, Artificial Sequence
  derived and/or modified sequence
atgggaaagattgaaaacaacgaaagggttattctaaacgtgggtggcacacgacacgaaacatacagatctacactgaaaactcttccgggaactcgacttgctctactggcctcttccgagcctcccggtgattgcctcaccaccgccggagacaaactacaaccctctccccctccactttctccccctccgcgtgctccccctctctctcccggaccaggaggctgtttcgagggaggagccggtaattgttctagtcgcggagggagagcatctgaccatccgggtggcggacgggaattcttctttgaccggcatccgggtgttttcgcgtacgtacttaactactatcggactggtaagctacactgtccagctgatgtctgtggccctctgttcgaggaggaactggccttctggggcattgacgaaacagacgtcgaaccctgctgttggatgacctatcgccagcaccgcgatgcagaggaggctctcgacattttcgagactccggatcttatcggaggcgacccaggcgacgatgaggaccttgcagcaaaacggttggggatagaggacgcagcgggtcttggcggtcctgatggcaaatccggcaggtggcgcagactgcaaccaagaatgtgggccctcttcgaagatccctatagcagccgtgcggctcgctttatcgctttcgcctctctgttcttcatccttgtgtccatcacaaccttttgtctggagacgcatgaggcattcaacattgtgaagaataaaactgagcctgtgatcaatggcactagtgtcgttctgcaatatgagatcgagactgatcccgctctcacctacgtagaaggtgtgtgtgtggtgtggtttaccttcgaattcttggtccgcattgtgttctcacccaataagcttgagttcatcaagaatctcctcaacatcattgatttcgtcgcgatcctgcctttctacctggaagttggtttgtctggcctttctagtaaggcggcaaaagacgttctgggattcctccgggttgtgcgattcgtacgtattctgcggatattcaagcttacccggcattttgtaggactgagagtcctgggacacactcttcgagcgtctacgaatgagttcttgctgttaattattttccttgccctcggcgtcctgattttcgcaactatgatttactacgccgagcgagttggtgcccagcctaacgacccctccgcttctgaacatactcagtttaagaatattcctatcggattctggtgggctgtagtgacgatgacaacgcttgggtacggtgatatgtatccccagacttggtccggtatgctggttggggctctgtgtgctctcgcaggcgtgttgaccatcgcaatgccggtacctgtgatcgtgaataacttcggtatgtattattccctggctatggccaagcaaaaactccccagaaagcgcaaaaagcacattcctcccgcaccacaggcctccagcccaaccttttgtaaaaccgaactgaacatggcctgtaatagtacccagtctgatacctgtctcggaaaggacaaccgcctgttggaacacaataggtccgtgctgagtggagatgactcaaccggtagcgagcccccattatcacctcctgagcgcttaccgatccgcagatcatccacacgggataagaataggagaggtgaaacttgttttttgcttacgacgggcgactacacttgcgcatccgacggcggaattcggaaagacaactgcaaggaagtcgtgatcactggctacacccaggccgaggcacgcagcctaacttag

SEQ ID NO: 238182 - DNA, 1842 bp, Artificial Sequence
  derived and/or modified sequence
atggggaaaatcgaaaataatgagagggtgatcctcaacgtggggggaacaaggcatgaaacataccggtcaacgttgaaaaccctcccaggcactcggcttgccctcctggcatcaagtgagcccccaggcgattgcctgaccacggcaggggacaaattgcaacccagcccgccaccactgtcccctccccctagagctccccctctatcccccggtcccggaggttgctttgagggaggggcagggaattgtagcagccgagggggtagagcttccgaccatccaggcggaggcagggaattcttctttgacaggcaccccggtgtttttgcctatgtgctaaattactacaggacaggtaaactgcactgtcctgctgatgtctgtggcccactctttgaagaggaactggcgttttggggaatcgatgaaactgatgttgagccgtgttgttggatgacatatcgccaacatcgcgacgccgaagaggctctcgacattttcgagacaccagaccttatcgggggagatccaggcgatgatgaggacttggccgctaaacgacttggaatcgaggatgcagcaggactgggtggccctgacggtaaaagcggacgatggcgcagactacaacccaggatgtgggccctctttgaagacccctattcctctcgggcagctaggtttattgccttcgcttccttgttctttattctggtttctatcacaacgttctgcttggaaacccacgaggcctttaacatcgttaaaaataagaccgaacccgtgattaacggcacctccgtggttctccagtacgagattgaaacggatcccgctcttacttacgtggagggggtttgtgttgtgtggtttacctttgaattcctggtgcggatcgtgtttagccctaataagcttgaatttataaaaaatctgctgaacatcatagacttcgtggccattctgcccttttacctggaagtaggcttgagcggcctgagctccaaagcagctaaagacgtcctggggttcttgagagtggtgcgatttgtgcgcattttaaggatttttaagctcacacgccactttgtgggactgcgggtgctggggcatacattgcgagctagtacaaatgaattcctcttacttattattttcttagcactcggagtgcttatatttgcgaccatgatatattacgcggaacgggtaggcgctcaacccaacgatccttcggcttccgaacacactcagtttaaaaatattcctataggtttttggtgggccgtggtcaccatgactacacttggatacggagatatgtacccgcagacctggagcggaatgctggttggggcattgtgtgcattggctggagtcctcaccattgccatgcctgtccctgtgatcgtgaataacttcgggatgtattattctctggctatggccaaacagaagctgccccgaaagcggaaaaaacacataccacctgcaccacaagcttcatctcccacgttttgcaaaactgaattgaatatggcctgcaacagcacacagagcgacacctgccttggcaaagataatcggcttctggaacacaaccgttcagtgttgtctggcgatgactctacaggctctgagcccccactgtctcctcctgagagactgcccataagaagatcctctacccgagataaaaaccgcaggggcgaaacttgcttcttgttaacaaccggagattacacatgcgcctcggatggaggaattcgaaaggacaactgtaaggaggtggtcatcacgggatacactcaggctgaagccaggagtctcacttag

SEQ ID NO: 238183 - DNA, 1842 bp, Artificial Sequence
  derived and/or modified sequence
atgggcaagatcgagaacaacgagagagtgatcctgaacgtgggcggcaccagacacgagacctacagaagcaccctgaagaccctgcccggcaccagactggccctgctggccagcagcgagccccccggcgactgcctgaccaccgccggcgacaagctgcagcccagccccccccccctgagccccccccccagagccccccccctgagccccggccccggcggctgcttcgagggcggcgccggcaactgcagcagcagaggcggcagagccagcgaccaccccggcggcggcagagagttcttcttcgacagacaccccggcgtgttcgcctacgtgctgaactactacagaaccggcaagctgcactgccccgccgacgtgtgcggccccctgttcgaggaggagctggccttctggggcatcgacgagaccgacgtggagccctgctgctggatgacctacagacagcacagagacgccgaggaggccctggacatcttcgagacccccgacctgatcggcggcgaccccggcgacgacgaggacctggccgccaagagactgggcatcgaggacgccgccggcctgggcggccccgacggcaagagcggcagatggagaagactgcagcccagaatgtgggccctgttcgaggacccctacagcagcagagccgccagattcatcgccttcgccagcctgttcttcatcctggtgagcatcaccaccttctgcctggagacccacgaggccttcaacatcgtgaagaacaagaccgagcccgtgatcaacggcaccagcgtggtgctgcagtacgagatcgagaccgaccccgccctgacctacgtggagggcgtgtgcgtggtgtggttcaccttcgagttcctggtgagaatcgtgttcagccccaacaagctggagttcatcaagaacctgctgaacatcatcgacttcgtggccatcctgcccttctacctggaggtgggcctgagcggcctgagcagcaaggccgccaaggacgtgctgggcttcctgagagtggtgagattcgtgagaatcctgagaatcttcaagctgaccagacacttcgtgggcctgagagtgctgggccacaccctgagagccagcaccaacgagttcctgctgctgatcatcttcctggccctgggcgtgctgatcttcgccaccatgatctactacgccgagagagtgggcgcccagcccaacgaccccagcgccagcgagcacacccagttcaagaacatccccatcggcttctggtgggccgtggtgaccatgaccaccctgggctacggcgacatgtacccccagacctggagcggcatgctggtgggcgccctgtgcgccctggccggcgtgctgaccatcgccatgcccgtgcccgtgatcgtgaacaacttcggcatgtactacagcctggccatggccaagcagaagctgcccagaaagagaaagaagcacatcccccccgccccccaggccagcagccccaccttctgcaagaccgagctgaacatggcctgcaacagcacccagagcgacacctgcctgggcaaggacaacagactgctggagcacaacagaagcgtgctgagcggcgacgacagcaccggcagcgagccccccctgagcccccccgagagactgcccatcagaagaagcagcaccagagacaagaacagaagaggcgagacctgcttcctgctgaccaccggcgactacacctgcgccagcgacggcggcatcagaaaggacaactgcaaggaggtggtgatcaccggctacacccaggccgaggccagaagcctgacctag

SEQ ID NO: 238184 - protein, 638 aa, Artificial Sequence
  derived and/or modified sequence
MGKIENNERVILNVGGTRHETYRSTLKTLPGTRLALLASSEPPGDCLTTAGDKLQPSPPPLSPPPRAPPLSPGPGGCFEGGAGNCSSRGGRASDHPGGGREFFFDRHPGVFAYVLNYYRTGKLHCPADVCGPLFEEELAFWGIDETDVEPCCWMTYRQHRDAEEALDIFETPDLIGGDPGDDEDLAAKRLGIEDAAGLGGPDGKSGRWRRLQPRMWALFEDPYSSRAARFIAFASLFFILVSITTFCLETHEAFNIVKNKTEPVINGTSVVLQYEIETDPALTYVEGVCVVWFTFEFLVRIVFSPNKLEFIKNLLNIIDFVAILPFYLEVGLSGLSSKAAKDVLGFLRVVRFVRILRIFKLTRHFVGLRVLGHTLRASTNEFLLLIIFLALGVLIFATMIYYAERVGAQPNDPSASEHTQFKNIPIGFWWAVVTMTTLGYGDMYPQTWSGMLVGALCALAGVLTIAMPVPVIVNNFGMYYSLAMAKQKLPRKRKKHIPPAPQASSPTFCKTELNMACNSTQSDTCLGKDNRLLEHNRSVLSGDDSTGSEPPLSPPERLPIRRSSTRDKNRRGETCFLLTTGDYTCASDGGIRKGYEKSRSLNNIAGLAGNALRLSPVTSPYNSPCPLRRSRSPIPSIL

SEQ ID NO: 238185 - DNA, 1917 bp, Artificial Sequence
  derived and/or modified sequence
atgggtaaaatcgagaacaatgagcgggtgatactaaacgtggggggcaccagacacgagacatacaggtcaacactgaaaactctccctggtaccagactggccctgctcgccagttccgaacctccaggcgattgcctgaccactgccggcgataaactgcagccctcacccccacctctgtctcctccaccccgcgcaccccccttgtctcctggtccaggaggatgctttgagggaggcgctggtaactgttcctcccgtggcggacgagccagtgatcacccaggtggcgggcgcgagttcttctttgatagacatcccggcgtgtttgcttacgtcctgaactactataggaccggaaagttacactgtcccgcagatgtctgcggccccctgtttgaggaagaactggctttttggggaatcgacgaaactgacgtggaaccgtgctgttggatgacctaccggcagcatcgtgacgcagaggaagcactagacattttcgagactcccgatttgatcggaggcgatccaggagacgatgaggatcttgcagcgaaacgcctgggcattgaggacgctgcaggactcggcggtcctgatgggaaaagcgggaggtggcgccgcctgcagcctcgcatgtgggcactgtttgaggacccctactcctcccgtgctgcacgctttatcgcctttgctagtctctttttcatactagtgtccattacaaccttttgcttggagactcatgaggcttttaatatcgtcaagaataaaacggaacctgtgattaatggaacctctgttgtgctgcagtacgagatcgagactgacccagctttgacctacgtcgaaggcgtgtgcgtggtctggtttacgtttgaatttctcgtgaggattgtgttctcccctaataagctcgagtttatcaagaacttgctgaacatcatagatttcgtggctattctccccttttatttggaggtggggctgtcggggttgtcctcgaaagccgctaaggatgtcttgggatttctgcgcgttgtgaggtttgtacggatcctgaggatattcaaactgacacgacattttgtaggattacgtgtgctaggacacaccctgcgggccagtactaacgaattcttgttgttaatcatattcctagcattgggggtgctgatctttgctacgatgatctactacgcggagagagtgggcgctcaacccaacgacccctctgcttcagaacacacacagtttaaaaacattccgattgggttctggtgggctgtggtcaccatgacaactctcggttacggtgacatgtacccccagacttggtccggaatgttagtgggggctctctgtgccctggccggagtcctcacaatagctatgccagttcccgtcattgtaaataactttggaatgtactattcgttagctatggctaagcagaaacttcccagaaagcgcaaaaagcacattccgcccgcgccccaggctagcagtcctacattctgtaaaactgaattgaacatggcatgcaacagcacccagagtgatacgtgtctgggaaaagacaatcgtcttttggagcacaatcgctccgtcctcagcggggatgattcgacaggcagcgagccacccttgtcaccccccgagaggctgcccatacggaggtctagcacccgcgataagaaccgcagaggagaaacctgcttcctgttgaccacgggcgactacacctgcgcttcggacggcggtatccggaagggctacgaaaaaagcagatcattgaacaacattgctggcctcgctggaaacgctctccgcctgagtcctgtgacgtcaccttacaactcaccatgccctctgcggagaagtagaagccccataccatccatactttag

SEQ ID NO: 238186 - DNA, 1917 bp, Artificial Sequence
  derived and/or modified sequence
atgggcaagattgaaaataatgaaagagtcatcctgaatgtgggcggcaccaggcatgagacctaccgcagcaccctgaagaccctgcccggcacccggctggccctgctggccagcagcgagcccccaggggactgcctgaccacagctggggacaagctgcagcccagccccccacccctgagccccccaccccgggccccacccctgagccctggccctgggggctgctttgagggcggggccggcaactgcagcagcagaggaggccgggccagtgaccaccctgggggcggccgggagttcttctttgacagacaccctggggtgtttgcctacgtgctgaactactacagaacaggcaagctgcactgcccagcagatgtgtgtggccccctgtttgaggaggagctggccttctggggcattgatgaaacagatgtggagccctgctgctggatgacctaccggcagcacagagatgctgaggaggccctggacatctttgagaccccagacctgattggaggagaccctggagatgatgaggacctggccgccaagaggctgggcattgaagatgctgctggcctgggcggcccagatggcaagagcggccgctggaggcggctgcagcccaggatgtgggccctgtttgaggacccctacagcagcagagctgcccgcttcatcgcctttgccagcctcttcttcatcctggtgtccatcaccaccttctgcctggagacccatgaggccttcaacatcgtgaagaacaagacagagcctgtgatcaatggcacctctgtggtgctgcagtatgaaattgaaacagatcctgccctgacctacgtggagggcgtgtgtgtggtgtggttcacctttgagttcctggtgagaattgtgttcagccccaacaagctggagttcatcaagaacctgctgaacatcatcgactttgtggccatcctgcccttctacctggaggtgggcctgagcggcctgagcagcaaggccgccaaggatgtgctgggcttcctgcgggtggtgcgctttgtgcgcatcctgcgcatcttcaagctgaccaggcactttgtgggcctgcgggtgctgggccacaccctgcgggccagcaccaatgagttcctgctgctgatcatcttcctggccctgggcgtgctgatctttgccaccatgatctactatgcagagcgggtgggcgcccagcccaatgaccccagcgccagcgagcacacccagttcaagaacatccccatcggcttctggtgggccgtggtgaccatgaccaccctgggctacggggacatgtacccccagacctggagcggcatgctggtgggcgccctgtgtgccctggccggcgtgctgaccatcgccatgcctgtgcctgtgattgtgaacaactttggcatgtactacagcctggccatggccaagcagaagctgcccaggaagaggaagaagcacatccccccagccccccaggccagcagccccaccttctgcaagacagagctgaacatggcctgcaacagcacccagagcgacacctgcctgggcaaggacaaccggctgctggagcacaacagatctgtgctgtctggagatgacagcacaggcagcgagccccccctgagccccccagagcggctgcccatcagaagaagcagcacccgggacaagaacagaagaggagagacctgcttcctgctgaccaccggggactacacctgtgccagtgatggcggcatcaggaagggctatgagaagagccgcagcctgaacaacattgctggcctggccggaaatgccctgcggctgagccctgtgaccagcccctacaacagcccctgccccctgcggcgcagccgcagccccatccccagcatcctgtag

SEQ ID NO: 238187 - DNA, 1917 bp, Artificial Sequence
  derived and/or modified sequence
atgggcaagatcgagaacaacgagcgggtgatcctgaacgtgggcggcacaaggcacgagacctaccggtccactctcaaaaccctgccaggaacgcggctggcactgcttgcctcaagcgagccccccggcgattgcctcacgacagccggtgataaactgcaaccgtcgccaccccccctgagccctcctccgcgggctcccccacttagtccaggccccggtggttgctttgaaggtggggcaggcaactgcagcagccgcggcggacgcgcctccgaccatcccgggggcggccgggaattcttttttgaccggcaccccggagttttcgcctacgtactgaattattaccgcactgggaagctgcactgtcctgctgacgtgtgtgggccgctcttcgaggaggaactggccttctggggaatcgacgagacagacgtggagccctgttgctggatgacttaccgacagcaccgcgacgccgaagaggctctggatatcttcgagactccagatttaattggtggggatcccggcgatgacgaagacctcgcagccaagcgtttggggatcgaagacgcagccggactgggagggcctgacggtaagagcggacggtggcgaagactgcagcctcggatgtgggctctctttgaagacccatacagttctcgggctgcccgcttcattgcttttgctagtctgttttttatcctggtaagcatcacaaccttctgcttggaaacacacgaggcgtttaacatcgtgaagaacaagactgaacctgtcatcaatggcacgtccgtggtgttgcagtatgaaatcgaaactgacccagcccttacatatgtcgaaggggtgtgcgtggtgtggttcacttttgagttcttagtacgaatagtgttcagccctaataaactggaattcatcaagaatttgctcaacatcattgactttgtcgccattcttccattttatctggaggtgggcctaagtgggttgtcatcaaaggccgctaaagatgttctcggattcttaagggtggtgcgctttgtcagaattcttcgtatatttaagctcacccgtcacttcgtcggcttgcgtgtgttgggccacacactgcgagccagtacgaatgagtttttgttgctcattatctttttggctcttggtgtgcttatcttcgccacgatgatttactatgcagagagagtgggggcccagcccaacgaccccagcgcatcagagcatacccagtttaaaaatatccccatcggtttttggtgggcagtagtcacgatgactaccctgggctacggcgacatgtaccctcagacatggtccgggatgctggttggagctctgtgtgcgttggcaggggtgctcacgatcgcaatgccagtgcctgttattgtgaataatttcggcatgtattactccctggccatggcaaagcaaaagctgcctcgaaaacgaaaaaaacacatcccccctgctccccaggccagctcccccactttttgtaaaacagagttaaacatggcttgtaacagtacacagtccgatacgtgtttgggcaaagacaataggctactggaacacaatagatcagtgcttagcggagatgactccacaggatccgaaccgcctctgagcccccccgagcggctacctatacggagatctagcactcgggataagaacagacggggggaaacttgtttcttactgactaccggtgactacacatgtgcttcagatggggggatccgtaagggctacgaaaaaagccggtctttgaacaacatcgcagggctagctggaaacgccctcaggctaagcccagtgacgtctccttacaattcaccttgtcctttaaggcggtctcgtagtccaatccctagcattttgtag

SEQ ID NO: 238188 - DNA, 5625 bp, Artificial Sequence
  derived and/or modified sequence
gtggagagtggggtgtaaataaggcaggcagaagctccagagagggtggagacagagcttcacggaagaaaaatatgtgaacctggttggtacacatagcttctccagacccacccacccactctttcctgagccctgtgcttcggatggcggcgggaggttgatggcgagtggtgctgaagggacagctccagcagtggctgatttgggggagaaacaaaatctgcagatggaatccgagcagggcgacttcaccttcaagtggtgagctctcctgacctgcggccagtctccactccattcacggccagccgatctgcccgctcccggaggggtcgggcagtgccggctggacccgccccgagctccatggtttgcccaaccctgcgcgatggtgactctgggcgcggaggttggcgactggcaaatccgcagatcacagaatgaaggcggggagcgcggccggcggccggcgggggctttctcccccaccccagcgcccagggaagcggctcaaccacctgaatccggaaaacgccaacaagtagtttctcgtcggagaagggcggctcacctgggcgccaagactcagtcccgctgcccagagaacctcgtccactcggaaaccaaagcagaaccacttttctctcggtctcgttaagtcatgtctgagtcacagagatgggcaagatcgagaacaacgagagggtgatcctcaatgtcgggggcacccggcacgaaacctaccgcagcaccctcaagaccctgcctggaacacgcctggcccttcttgcctcctccgagcccccaggcgactgcttgaccacggcgggcgacaagctgcagccgtcgccgcctccactgtcgccgccgccgagagcgcccccgctgtcccccgggccaggcggctgcttcgagggcggcgcgggcaactgcagttcccgcggcggcagggccagcgaccatcccggtggcggccgcgagttcttcttcgaccggcacccgggcgtcttcgcctatgtgctcaattactaccgcaccggcaagctgcactgccccgcagacgtgtgcgggccgctcttcgaggaggagctggccttctggggcatcgacgagaccgacgtggagccctgctgctggatgacctaccggcagcaccgcgacgccgaggaggcgctggacatcttcgagacccccgacctcattggcggcgaccccggcgacgacgaggacctggcggccaagaggctgggcatcgaggacgcggcggggctcgggggccccgacggcaaatctggccgctggaggaggctgcagccccgcatgtgggccctcttcgaagacccctactcgtccagagccgccaggtttattgcttttgcttctttattcttcatcctggtttcaattacaactttttgcctggaaacacatgaagctttcaatattgttaaaaacaagacagaaccagtcatcaatggcacaagtgttgttctacagtatgaaattgaaacggatcctgccttgacgtatgtagaaggagtgtgtgtggtgtggtttacttttgaatttttagtccgtattgttttttcacccaataaacttgaattcatcaaaaatctcttgaatatcattgactttgtggccatcctacctttctacttagaggtgggactcagtgggctgtcatccaaagctgctaaagatgtgcttggcttcctcagggtggtaaggtttgtgaggatcctgagaattttcaagctcacccgccattttgtaggtctgagggtgcttggacatactcttcgagctagtactaatgaatttttgctgctgataattttcctggctctaggagttttgatatttgctaccatgatctactatgccgagagagtgggagctcaacctaacgacccttcagctagtgagcacacacagttcaaaaacattcccattgggttctggtgggctgtagtgaccatgactaccctgggttatggggatatgtacccccaaacatggtcaggcatgctggtgggagccctgtgtgctctggctggagtgctgacaatagccatgccagtgcctgtcattgtcaataattttggaatgtactactccttggcaatggcaaagcagaaacttccaaggaaaagaaagaagcacatccctcctgctcctcaggcaagctcacctactttttgcaagacagaattaaatatggcctgcaatagtacacagagtgacacatgtctgggcaaagacaatcgacttctggaacataacagatcagtgttatcaggtgacgacagtacaggaagtgagccgccactatcacccccagaaaggctccccatcagacgctctagtaccagagacaaaaacagaagaggggaaacatgtttcctactgacgacaggtgattacacgtgtgcttctgatggagggatcaggaaaggatatgaaaaatcccgaagcttaaacaacatagcgggcttggcaggcaatgctctgaggctctctccagtaacatcaccctacaactctccttgtcctctgaggcgctctcgatctcccatcccatctatcttgtaaaccaaacaaccaaactgcatcagtcggctaaattgtattaattcaagtgctgtttaccccataatggaaataattaaatgtagagttactccaggctccattaatacagtataaatcttgcatgatactacaatttgaagtcagaaatgccacttgggtagctaatgaatcttacccaggctttaaagattgtctaaagtagtgctaagatccctcctattaattgccctgatatccttttgcaataaaatgacagatagtgtcagatattgaccagtgcactaatatataaacataccttcagggagatatatttaaaacagtgtgcttccaaatgccaaccacttcattggaactttatttcttgtgactgtaaaccattctgaagatgtctgggatcctatcttgattgcacacgacatgacttgtgtcagctcatttgcatggaccatcttgtctctatcacctgaaagcaatgttgcagagttcggggactgtggatagctcaggatatgtgtacttgcatcgaaccatcctgctgatatgaaagcattggtcgactgttctgcatgttgaattgtggggcagggagggcacttttctccttgacatttttttcttattatttgaaagaaatatatgttttaaatagtttaatttcttgattgatttacttttcttcaaaaatgctgtattggagttctgaatgtctctggttgtttgcacacagataactgcaaagaggttgtcattactggttacacgcaagccgaggccagatctcttacttaatgacttggggaaggcacaaaacatgagagaaaggtaactgccagccaggcttgcattgtttagccagaaattgctgcttggttctagactctttaaaaaaaaaaaatacccagggtttgtcatcattttcagaggcagagtgccaaatatcacccaaagctcttgtgtcttttttttacccccttattttatttttatttattaattttttgtgcaaacatcaaatgtcactggtgttcacagaaggcttttttgactagccttaaattcctgagtcaaaagattaatcagattttcaggcagtgtttaatcaggtgctttgtcctgtatgttgttcttgtctgtcttagctccctgtctttcctgtatatgccatctgtctccatgaagcacagaaatgcctctgtaagatgtttatgattttaatatttactccctccaaacccgactccataccattttttgctatttggagcagcctctctgctttgtgtataaattaatgatgctctgtagactacctaagttaatcggcactgtgaatctttttgataagcagggtttaagcagcaatttcaccattgcacttggttgcctgctgcagtgtcagtttctactacctagcaaccagcattcattactacactccaacaaaatccttagggagtcatattcagtctgagtggaagaaagtctatttatgcattcctatgaattcaacagcaatagcgtgtctcatgtattgagcatgtgagggaagaaaaagaccgtaatataaatagagggataaataatatcactaaggcatttgggagccttgagactgctgattaattcctatttctcatgtttattttttgttaggaagacaattgtcacttttattattggccacgaaacatgtattactctatatccccaagtcctagagcatgacctgcatgttggagatgttgtacagcaatgtatttatccagacatacatatatgatatttagagacacagtgattcttttgataacaccacacatagaacattataattacacacaaatttatggtaaaagaattaatatgctgtctggtgctgctgttattgactacagtgttgtacagaatttatcatggattattgactgctgagaaagggacagtggaatttagccataccaaggactatactggaaacagacttctgctgctgaatgtgccctgatgtgaccaggttgcacttggaagagatcctcgcgtcttcatgaggcacttaaagcttataaaagaactgcggctggaactcatctggtgctccccatgagagtgctctgcttgtagactggccagtgtccatgaaacaactgtaaataccaacatgtgtgcatgggtcaacagtcttggccatttctcatcaaaagaagccaaattcatgatcaacatctctgaagtttcaagtaaggcccacacttctttgaattactcttcatgggcccacattaggttgtgctgtgaattacttaaggcagtgatactgatgtagtatagttttgtcttaatttcccttatttctacttctttggttgaatctatgaacttgattgtataattttcttataaattactgatgtaatcagcttgtcaattatgttgtgaaattgttagtattcatttatcaaaaatgacctatgtttagtcacatatttgtttagttctgggaaattgttatagcttaaatggaactcaccaacattattcatagtttaagtcttttatcattattacctcaattataaatattacaaaaacataattctggcaatgagagtatttttttattcaatgatcaaggagcaatgtcagtatatagtagaatatcaattaaattatatcctaaaatgtatattttgcataaaagagatattctttaatcaattacttttttgtgagttttgtggcaaatgaagcttgtacgtgtctttaaaactgttgtagatgaaactgtataagatttttacatcttgcttaatcaatattttcagagtctattagttcccctgggattctgaatataacatatagcctattataaatccctgtatcgtggaccttttgtgaacatttcaaggcgcatgcacaaccttgatgataaccagtggaaatgtaactaactgaaatgaagaataaaaggcaaatgagctggggataaacttgaatgttatctgattaaattactcaaattat

SEQ ID NO: 238189 - DNA, 1917 bp, Artificial Sequence
  derived and/or modified sequence
atgggtaagatcgaaaacaacgaacgggtgatcttgaacgtcggagggacccggcacgagacatatcgctcaacacttaaaaccctgcctggtacacgcctggctctgctcgcttcttccgaacctcctggggattgcttgaccacagctggcgacaagctgcagccgagcccacctcctttgtccccaccccctagggcacccccactgagtcccggacctggtgggtgcttcgaagggggtgccggtaattgctcttctcgagggggaagggccagcgatcatcctggcggaggcagagagttctttttcgacaggcatccgggagtgtttgcctacgtgttgaattattatagaacagggaagctgcattgtcctgcggatgtttgtggtcccttgtttgaagaggagctggctttttggggtatcgatgaaaccgatgttgagccctgttgctggatgacttaccggcaacatcgggatgctgaagaagctttagatatcttcgagactcccgacctaattgggggtgaccctggagatgacgaagaccttgctgccaagcggctgggcatcgaggatgccgcagggctcggtggacctgacgggaagtctggccgatggagacgcttgcagccgagaatgtgggccctcttcgaagatccatactcctctagggccgctcgctttatcgccttcgcctcgctgttcttcatcctcgtctcaattacaaccttctgcctggagacccacgaggcctttaacattgtgaagaacaagactgaacctgtgatcaatgggaccagcgttgtgctacagtacgaaattgaaacagaccctgctctgacgtacgtggagggggtctgcgtcgtctggttcaccttcgaattcctggtgcgcatagtcttctccccgaataagctggagtttatcaagaatttgttaaacatcattgacttcgtggctatcttaccattctacctcgaagttggcttatccgggctgagcagtaaggccgctaaagatgttctcgggtttttacgcgtagtcaggtttgtcagaatcctcagaatcttcaaattaaccaggcatttcgtgggactgagggtgctcggacacacgctccgagcctccacaaacgaattccttctgcttatcatcttcctcgcattaggcgttctaatctttgccaccatgatctattacgcggagagggttggcgctcagccaaacgacccctccgcgagcgaacacactcagttcaaaaacattcctattggcttttggtgggctgtagtaaccatgactaccttgggatacggtgatatgtacccccaaacctggagcggtatgctggtcggcgctctatgcgctctcgcaggcgttctcacaatcgccatgccagtccctgttattgtgaacaacttcgggatgtattattctctagccatggccaagcagaaactacccagaaaacgcaagaagcatattccccctgctccacaggcttcttcacccaccttctgcaagactgagcttaatatggcttgtaattccacacaaagcgacacctgtctcggaaaagataatagattgcttgagcataataggtccgtgctttctggtgacgattcaactggcagcgagccaccactgtcaccgcctgagcgcttgcccattcggaggagcagcaccagggacaaaaatcgacggggtgagacttgtttcctgctcaccaccggagactacacatgcgcttctgacgggggaatacggaaagggtacgaaaagtcccggtcactgaacaatattgctgggctggccggaaacgccctcaggctgagccctgtcacgtcaccatataactcgccttgcccactgagaaggtctcggtcccctataccgtccatcctctag

SEQ ID NO: 238190 - DNA, 1917 bp, Artificial Sequence
  derived and/or modified sequence
atgggcaagatcgagaacaacgagagagtgatcctgaacgtgggcggcaccagacacgagacctacagaagcaccctgaagaccctgcccggcaccagactggccctgctggccagcagcgagccccccggcgactgcctgaccaccgccggcgacaagctgcagcccagccccccccccctgagccccccccccagagccccccccctgagccccggccccggcggctgcttcgagggcggcgccggcaactgcagcagcagaggcggcagagccagcgaccaccccggcggcggcagagagttcttcttcgacagacaccccggcgtgttcgcctacgtgctgaactactacagaaccggcaagctgcactgccccgccgacgtgtgcggccccctgttcgaggaggagctggccttctggggcatcgacgagaccgacgtggagccctgctgctggatgacctacagacagcacagagacgccgaggaggccctggacatcttcgagacccccgacctgatcggcggcgaccccggcgacgacgaggacctggccgccaagagactgggcatcgaggacgccgccggcctgggcggccccgacggcaagagcggcagatggagaagactgcagcccagaatgtgggccctgttcgaggacccctacagcagcagagccgccagattcatcgccttcgccagcctgttcttcatcctggtgagcatcaccaccttctgcctggagacccacgaggccttcaacatcgtgaagaacaagaccgagcccgtgatcaacggcaccagcgtggtgctgcagtacgagatcgagaccgaccccgccctgacctacgtggagggcgtgtgcgtggtgtggttcaccttcgagttcctggtgagaatcgtgttcagccccaacaagctggagttcatcaagaacctgctgaacatcatcgacttcgtggccatcctgcccttctacctggaggtgggcctgagcggcctgagcagcaaggccgccaaggacgtgctgggcttcctgagagtggtgagattcgtgagaatcctgagaatcttcaagctgaccagacacttcgtgggcctgagagtgctgggccacaccctgagagccagcaccaacgagttcctgctgctgatcatcttcctggccctgggcgtgctgatcttcgccaccatgatctactacgccgagagagtgggcgcccagcccaacgaccccagcgccagcgagcacacccagttcaagaacatccccatcggcttctggtgggccgtggtgaccatgaccaccctgggctacggcgacatgtacccccagacctggagcggcatgctggtgggcgccctgtgcgccctggccggcgtgctgaccatcgccatgcccgtgcccgtgatcgtgaacaacttcggcatgtactacagcctggccatggccaagcagaagctgcccagaaagagaaagaagcacatcccccccgccccccaggccagcagccccaccttctgcaagaccgagctgaacatggcctgcaacagcacccagagcgacacctgcctgggcaaggacaacagactgctggagcacaacagaagcgtgctgagcggcgacgacagcaccggcagcgagccccccctgagcccccccgagagactgcccatcagaagaagcagcaccagagacaagaacagaagaggcgagacctgcttcctgctgaccaccggcgactacacctgcgccagcgacggcggcatcagaaagggctacgagaagagcagaagcctgaacaacatcgccggcctggccggcaacgccctgagactgagccccgtgaccagcccctacaacagcccctgccccctgagaagaagcagaagccccatccccagcatcctgtag

SEQ ID NO: 238191 - protein, 1226 aa, Artificial Sequence
  derived and/or modified sequence
MAPLRALLSYLLPLHCALCAAAGSRTPELHLSGKLSDYGVTVPCSTDFRGRFLSHVVSGPAAASAGSMVVDTPPTLPRHSSHLRVARSPLHPGGTLWPGRVGRHSLYFNVTVFGKELHLRLRPNRRLVVPGSSVEWQEDFRELFRQPLRQECVYTGGVTGMPGAAVAISNCDGLAGLIRTDSTDFFIEPLERGQQEKEASGRTHVVYRREAVQQEWAEPDGDLHNEAFGLGDLPNLLGLVGDQLGDTERKRRHAKPGSYSIEVLLVVDDSVVRFHGKEHVQNYVLTLMNIVDEIYHDESLGVHINIALVRLIMVGYRQSLSLIERGNPSRSLEQVCRWAHSQQRQDPSHAEHHDHVVFLTRQDFGPSGMQGYAPVTGMCHPLRSCALNHEDGFSSAFVIAHETGHVLGMEHDGQGNGCADETSLGSVMAPLVQAAFHRFHWSRCSKLELSRYLPSYDCLLDDPFDPAWPQPPELPGINYSMDEQCRFDFGSGYQTCLAFRTFEPCKQLWCSHPDNPYFCKTKKGPPLDGTECAPGKWCFKGHCIWKSPEQTYGQDGGWSSWTKFGSCSRSCGGGVRSRSRSCNNPSPAYGGRLCLGPMFEYQVCNSEECPGTYEDFRAQQCAKRNSYYVHQNAKHSWVPYEPDDDAQKCELICQSADTGDVVFMNQVVHDGTRCSYRDPYSVCARGECVPVGCDKEVGSMKADDKCGVCGGDNSHCRTVKGTLGKASKQAGALKLVQIPAGARHIQIEALEKSPHRIVVKNQVTGSFILNPKGKEATSRTFTAMGLEWEDAVEDAKESLKTSGPLPEAIAILALPPTEGGPRSSLAYKYVIHEDLLPLIGSNNVLLEEMDTYEWALKSWAPCSKACGGGIQFTKYGCRRRRDHHMVQRHLCDHKKRPKPIRRRCNQHPCSQPVWVTEEWGACSRSCGKLGVQTRGIQCLLPLSNGTHKVMPAKACAGDRPEARRPCLRVPCPAQWRLGAWSQCSATCGEGIQQRQVVCRTNANSLGHCEGDRPDTVQVCSLPACGGNHQNSTVRADVWELGTPEGQWVPQSEPLHPINKISSTEPCTGDRSVFCQMEVLDRYCSIPGYHRLCCVSCIKKASGPNPGPDPGPTSLPPFSTPGSPLPGPQDPADAAEPPGKPTGSEDHQHGRATQLPGALDTSSPGTQHPFAPETPIPGASWSISPTTPGGLPWGWTQTPTPVPEDKGQPGEDLRHPGTSLPAASPVT

SEQ ID NO: 238192 - DNA, 3681 bp, Artificial Sequence
  derived and/or modified sequence
atggctcctctgcgcgctctgctctcgtaccttctccccctgcactgcgcgttatgcgccgctgccggtagccggacccccgagctccacctctcgggtaagctttctgattacggggtgacggtcccttgctcaaccgatttccgtgggagattcctgagtcatgtcgtctccgggcctgctgccgcttccgcagggtcaatggtggtcgatacaccccctacactgccccgacactcatctcatcttcgcgtggcgaggagtcctctccatccaggtgggaccctgtggcccggtcgcgtcggtagacattccctctacttcaacgttacagtcttcggcaaggagctgcacctgaggctcaggcccaaccgcaggttggtggtgccaggatcttccgtggagtggcaggaggatttccgcgagctcttccgccagccactgagacaggagtgtgtctacaccgggggagtgacggggatgcccggagccgcagtggccatctctaactgcgacggactcgctgggctcattcgaacggactctaccgatttttttatagagccactcgagcgcggacagcaggagaaggaagcgagtggtagaacccatgtcgtttatcggagagaggctgttcagcaggaatgggcagaaccagatggggacctccataatgaagctttcggtctaggcgaccttcctaacctcctgggccttgttggggatcaactcggagataccgagaggaagcgtcggcatgctaaacccggatcatattctatcgaagttctcctggtggtcgatgacagtgtggtccgttttcatggtaaagaacacgttcaaaattacgtgctcacccttatgaacatcgtggatgagatttaccatgacgaatcccttggggtgcacataaatatcgctctggtccggcttattatggtgggctatagacagtccctgagcttaatcgagcgcggaaacccatcacgtagcctcgagcaggtgtgtcggtgggcacacagccagcaacgacaggatcccagtcacgcagaacatcacgatcatgtggtttttttgactcggcaggattttggaccttctggtatgcaaggttacgcccctgtcaccggtatgtgccaccctctgcggtcttgcgcactaaatcacgaggatggattttcctcagcgttcgtaatcgcccatgagacaggccacgtgctgggcatggagcacgatggccagggcaacgggtgtgccgatgaaacctccctgggctccgtgatggcgccacttgtgcaggcagctttccaccggtttcattggtcccgctgtagcaaactcgagctgtctcgatacttgccttcatatgactgtttgctggatgaccctttcgaccctgcctggcctcagcctcccgagttgcccggtatcaactactctatggacgagcagtgtcgcttcgatttcgggtctggctaccagacttgcctggcttttagaacgtttgagccatgtaaacagctgtggtgttctcaccctgataacccttacttttgcaaaactaaaaaaggaccaccactggatggcaccgaatgcgctcccggtaagtggtgtttcaagggccactgtatttggaagtctcccgagcaaacttacgggcaagatggcggttggtcatcttggactaagttcgggtcctgttcccgttcatgtggaggcggagtacggtctagatcccgcagttgcaacaatccttcaccagcctatggagggaggctgtgcctcggaccaatgttcgaataccaggtttgtaatagtgaggagtgtccgggtacttacgaggattttagagctcagcagtgcgctaagcgcaactcatattatgtgcatcagaatgccaagcattcatgggtcccctacgaacccgatgatgacgctcagaaatgtgagctgatttgccagagcgccgatactggcgacgtggtgtttatgaatcaggtggtgcacgatggcacccggtgctcataccgcgacccttattctgtctgcgcgcgaggggagtgcgtgcctgtgggctgcgataaggaagtcggctctatgaaggctgacgataaatgcggtgtctgcgggggagataatagtcactgtcggacagtaaagggcacactgggaaaggctagcaagcaggccggtgccttaaaattggttcaaatacctgccggtgcaaggcatattcaaatagaggcattagaaaaaagccctcatagaatcgtagttaaaaaccaggtcactggcagcttcatcctcaacccaaaaggtaaggaagccacttcaagaacctttactgccatgggcctggaatgggaagatgcagtcgaggacgctaaggagtctctgaagacgagtggcccactccctgaagccatagccatactagcattgccgcctacggaaggagggcctcggtcgagcctcgcctacaagtacgtgatccatgaggacttactcccacttatcgggtcaaataacgtcttactagaggaaatggatacatacgagtgggcccttaaatcttgggccccatgcagtaaggcgtgtggtggtggtattcagttcacaaagtacggttgccgcagaaggcgagatcatcacatggtacaaaggcatctgtgcgaccacaagaaacggccaaaacctattcgccgtcggtgtaaccagcacccctgtagccagcccgtgtgggtgactgaggagtggggtgcatgttctcggtcatgtggaaaactgggcgttcagacaaggggcatccaatgcttactaccattgtcaaacgggactcacaaggtgatgcctgccaaggcgtgtgccggtgaccgacccgaggctagacggccatgtctgagggtcccctgtcctgcccaatggagattaggcgcttggagtcagtgctccgcgacttgtggcgaggggattcaacagaggcaagtcgtgtgtcgcaccaatgccaattctctgggccattgcgaaggagatcgccctgacaccgtccaagtctgctctttgcccgcatgcggtggaaaccaccaaaactcgaccgtgcgagccgacgtgtgggaactcggaacgcccgaagggcagtgggtcccccagtcggagccactccaccccattaacaagatatcatctaccgaaccctgcacaggcgaccgctctgtgttctgccagatggaggtgcttgatcgctactgttccatcccagggtaccaccgcctgtgctgtgtgtcatgtataaagaaagctagcggaccaaatcctggcccagatccaggtccgacctctctgccccctttctccacaccgggatcaccacttcccggaccccaagacccagcagacgcagctgaacctcccggaaagccaacagggtctgaggaccatcagcatggacgcgcaactcagctccctggcgcactggatacatcaagtcccggaacccagcatcccttcgcacctgaaactcccatacctggcgctagctggtccatcagcccaacaactcctggtggcttgccttgggggtggactcagacacctactcctgttcctgaagacaaaggtcaacccggtgaggatcttagacatcccggaacatcactgcccgctgccagccctgtgacatag

SEQ ID NO: 238193 - DNA, 3681 bp, Artificial Sequence
  derived and/or modified sequence
atggcccccttgcgcgctctgctgtcctatctcttgcccctacactgtgctctatgcgcagccgccggttcccgtaccccggagttgcacctgtccggcaagttgtcagactacggtgtcacagttccatgctctacagattttagagggcggtttctcagccacgtcgtttcaggtcctgcagctgcctcggctggatcaatggttgttgacaccccaccaactctgcctcgtcactcttcccacctgagagtggcgagaagcccacttcatccaggcggcaccctgtggccaggtcgggtgggacgacatagcctgtactttaacgtgaccgtgttcggcaaagagctgcacctgcgcctacgtcctaatcgtcgactagtcgtgcccggcagttccgtcgagtggcaagaggatttcagggagctatttcgacagcctttacgtcaggagtgtgtatatactgggggggtcaccggaatgcctggagctgccgtcgccatatccaactgcgatgggctggcaggcctgatccgcaccgactctaccgactttttcattgagccactcgagcgcggtcaacaggaaaaagaagctagcggtcggacccatgtggtgtatcgtagggaggctgtgcagcaggaatgggcagaaccggatggagatctccacaatgaggcattcggacttggcgatctgcccaacctgcttggtctcgtgggagaccaacttggagacacggagcgaaaaagaaggcacgcaaagcccggtagctatagcattgaagtcctgttagtagtggacgacagcgttgtgcgcttccatggcaaagagcacgttcaaaattatgtgcttaccttgatgaatatcgttgacgagatctatcatgatgaaagcctaggcgtgcatatcaatatagcgctcgttaggctgataatggtgggctatcggcaatctttgtcattaatcgaacgtggtaatccctccagaagcttagaacaggtgtgtaggtgggcacattctcaacagagacaggaccctagccatgcagagcaccacgaccacgtcgtttttttaacaaggcaggacttcggaccgagcggaatgcagggttacgctccggtgactgggatgtgccacccgctgcgctcttgtgctttgaatcatgaagatggttttagttcagccttcgttatcgctcatgagaccgggcacgtcctgggcatggagcacgatggacaggggaatggatgtgccgacgagacgagcctgggaagtgttatggccccactcgtgcaagccgcgttccatcggttccattggtcccggtgctcgaagctggagctgagcaggtaccttcctagctacgattgcttgttggacgatcctttcgaccccgcctggcctcagccccccgagttacctggcatcaactatagtatggacgaacagtgtcggttcgacttcggctcaggctaccagacatgtctcgcttttagaacttttgaaccttgcaaacagctttggtgcagtcaccctgataacccctatttctgcaaaaccaaaaaaggccctcctctggatgggacagagtgcgccccgggtaagtggtgcttcaagggacattgcatatggaaaagccctgaacagacttacggccaggacggcggctggagtagctggactaaatttggctcttgcagtaggtcttgcgggggcggagtaaggagcaggagcaggagctgcaacaatccctcccccgcctacggcggcagattgtgccttggccctatgttcgagtaccaagtgtgcaatagcgaagaatgcccagggacatacgaggactttagagcccagcaatgcgcaaagagaaatagttactacgtgcatcagaacgcgaaacattcatgggtcccatacgagcctgacgatgatgcacaaaaatgtgagttgatctgtcagtccgccgataccggcgatgtcgtctttatgaaccaggtggttcacgacggtaccaggtgcagttatcgagacccctactctgtttgcgctagaggtgagtgtgtgcccgtgggctgcgataaagaagtcggttctatgaaggcggacgacaagtgcggcgtgtgtggcggcgacaattcacattgccgcaccgtaaagggcacacttggtaaggctagcaaacaggccggcgccttgaaattagtgcagattccagccggcgcaagacatatccagatcgaggcacttgagaaatctcctcacagaatcgtggttaagaatcaggtcaccggctccttcattttgaatcccaagggcaaggaagccacatccagaaccttcacggcgatggggctcgagtgggaggatgccgtggaggatgccaaagagtcccttaagacgtcaggccctttacccgaagctatcgctatcctggcactccccccaacagagggaggcccaagaagcagccttgcatataagtacgttatccacgaagatcttttgcccttgataggctccaataacgtactcttggaggaaatggacacttatgaatgggctctcaagagttgggctccttgctctaaggcctgtggaggcggcatccaattcacgaagtatggttgtcgtagacggcgcgatcaccacatggtgcagagacatctctgtgatcacaagaagcgtcctaaaccaatcagacgcaggtgtaaccagcacccttgctcacagcccgtgtgggtaaccgaagagtggggcgcttgttcccggtcatgcggaaaattgggcgtgcagactcggggtatccagtgtctcctgccattgtccaacggaacccataaggtcatgccggccaaggcctgcgctggggataggccggaagctcgtagaccttgtctcagggtcccatgtcctgcccaatggaggctgggcgcttggtctcaatgttctgccacatgtggagaaggcatccagcaacgtcaggttgtgtgtaggaccaatgctaatagcctgggtcactgcgaaggggaccggccagatacagtccaggtctgcagcttacccgcctgtggcgggaaccaccagaatagcactgtcagggccgatgtttgggagctcggtactccagagggacagtgggtgcctcagtcagagcctctgcaccccattaataaaataagtagcaccgaaccatgcaccggcgatcgctcagttttttgccagatggaagtcttagatcgatattgttccattccaggataccacagactgtgttgcgtgtcttgtatcaaaaaggcttctggccccaatccaggtcccgaccccggacctacgtctctacctcccttcagtaccccaggctcacccttgccgggtccacaggatcccgctgacgcagctgaaccccccgggaagcccaccggaagtgaagatcatcagcacggcagagccactcaactcccaggagcactggacacttccagccccggcacccagcatccttttgctcccgagacccccatccccggcgccagttggtccattagtccaacaacccccggggggttaccatggggttggactcagacacctaccccagtgcccgaggacaaggggcaaccaggcgaggatctgagacaccccgggaccagtttaccagctgcttcgcccgtcacctag

SEQ ID NO: 238194 - DNA, 3681 bp, Artificial Sequence
  derived and/or modified sequence
atggcaccgctgagagccctgctttcatacctactcccattgcattgcgccttatgtgccgctgctggctcccgcactcccgagttgcacctctctggcaaactctcggactacggtgtaaccgtaccttgtagtactgatttcagaggaaggttcttgtcccacgttgtgtccggtcccgctgccgcatcagcgggctccatggttgtggacaccccccccaccctccccagacatagttcacacctccgagtcgcacggtctccgctccaccccggcggaacgttgtggccaggccgggtgggacgccatagcttatactttaacgtaaccgtgtttggaaaggagctgcacctccgtcttagacctaaccgaaggttagttgtgccgggtagcagtgtcgagtggcaagaggattttcgggagttgtttcggcagcccctgaggcaggagtgcgtgtacacaggaggcgtaactggaatgcctggtgccgcggttgcaatctcaaactgtgatggactggccggcctaatccgcactgacagcaccgacttttttatcgagcctttagagcgtggacagcaggagaaggaagcgtcgggccggacccacgtggtttaccgccgcgaagctgtgcagcaagaatgggctgaaccagatggagaccttcacaatgaggcattcggactcggggatcttcctaatctgctaggattggtgggcgatcagctcggcgacacagaacgtaaaagaagacacgcaaagccaggctcctacagcatcgaagtattattagtggtggatgattccgtcgtgaggtttcatgggaaagagcatgtccagaactacgttttaactctgatgaacatagtggatgagatataccacgacgagagcctgggcgtgcatatcaatatagcgctcgttaggctgataatggtgggctatcggcaatctttgtcattaatcgaacgtggtaatccctccagaagcttagaacaggtgtgtaggtgggcacattctcaacagagacaggaccctagccatgcagagcaccacgaccacgtcgtttttttaacaaggcaggacttcggaccgagcggaatgcagggttacgctccggtgactgggatgtgccacccgctgcgctcttgtgctttgaatcatgaagatggttttagttcagccttcgttatcgctcatgagaccggccacgtgctcgggatggaacatgatggccagggcaacggatgtgcagatgagacgtctcttggttcagtgatggcaccccttgttcaagcggctttccatagatttcattggtcacgatgttccaaactggagctttctagatacctcccctcttacgactgtctgttagatgacccattcgacccagcatggccacagcctcctgagctcccaggaataaactactcaatggacgaacagtgtcgcttcgacttcggatctggataccagacctgcttggcattccgcacttttgagccgtgtaaacaactttggtgttcacatcccgataatccttatttctgtaagaccaagaaaggccctcccctggacggcacagaatgcgcacctggtaagtggtgtttcaaagggcattgtatctggaaatctcccgaacagacgtatggccaggatgggggctggtctagctggactaaatttggttcttgttcaagaagttgtggagggggcgttcgatctaggagcaggtcttgcaacaatccctctccagcctacggcgggcgtctgtgcttgggacccatgtttgagtaccaagtttgcaattctgaagaatgtcctggcacttatgaagattttagggcccaacagtgtgccaaaaggaactcttattatgttcaccagaacgccaaacactcatgggtaccctatgagccagacgatgacgctcaaaaatgtgaactaatttgtcaatcggccgacactggtgatgtggtgtttatgaatcaggtggtgcacgacggcacccgctgcagctaccgcgacccttactcagtatgtgcccgcggagaatgtgtgcccgtcggatgcgacaaagaagtcggttctatgaaagccgatgataaatgcggtgtgtgcggcggcgacaacagtcattgcagaactgtgaaaggaacactggggaaggcatctaagcaagccggagctcttaaactcgtgcaaattccggccggggcacggcatatacaaatcgaggctctcgaaaagtcccctcataggattgtggtaaagaatcaggttaccgggagctttattctgaacccgaagggcaaagaagcaacatccagaacattcaccgctatgggcctcgagtgggaggacgccgtggaggacgcaaaggaaagcctgaaaacgtcaggccctttacccgaagctatcgctatcctggcactccccccaacagagggaggcccaagaagcagccttgcatataagtacgttatccacgaagatcttttgcccttgataggctccaataacgtactcttggaggaaatggacacttatgaatgggctctcaagagttgggctccttgctctaaggcctgtggaggcggcatccaattcacgaagtatggttgtcgtagacggcgcgatcaccacatggtgcagagacatctctgtgatcacaagaagcgtcctaaaccaatcaggagaagatgcaatcaacacccttgttcccaaccagtgtgggttaccgaagaatggggagcctgctcaagaagctgcggtaagcttggagtgcagacacgcggaatccagtgcctcttacccttatcaaacgggactcataaagttatgcccgctaaggcctgtgcgggagataggcccgaggcacggaggccgtgccttcgagtcccatgcccggctcagtggagactaggtgcgtggtcccaatgctctgccacttgcggtgaagggattcagcaaagacaggtcgtatgtcgcacaaatgcgaattcgctcggacactgcgaaggcgaccgacctgataccgtccaagtttgctcactacccgcctgcggaggcaaccaccagaactctaccgtacgagcagacgtgtgggagctgggcacacccgagggtcaatgggtgccccagtctgaaccgttacaccccattaacaagatttcatccaccgagccctgcacaggcgacagatccgtgttttgtcaaatggaagttttggaccggtactgcagcataccaggctatcatcgactctgctgcgtgtcatgtatcaagaaagccagtgggcccaatcctggacctgaccccggccccaccagcctgcctcctttctcgactccgggctctcccctcccaggacctcaagatcccgctgatgccgcagagcctccaggaaagccaacaggatcagaagaccatcagcatggcagggcaacacaactgccaggagccctggatacctcatctccggggacccagcaccctttcgcccccgaaactccaatccccggtgcctcctggtccatttcccctacaacacctggcggactcccctggggatggacacagacaccaactcctgtacccgaggataagggccaacccggtgaagatctccgacacccaggaacctctctgcctgccgctagccccgtaacatag

SEQ ID NO: 238195 - DNA, 3681 bp, Artificial Sequence
  derived and/or modified sequence
atggcccccctgagagccctgctgagctacctgctgcccctgcactgcgccctgtgcgccgccgccggcagcagaacccccgagctgcacctgagcggcaagctgagcgactacggcgtgaccgtgccctgcagcaccgacttcagaggcagattcctgagccacgtggtgagcggccccgccgccgccagcgccggcagcatggtggtggacaccccccccaccctgcccagacacagcagccacctgagagtggccagaagccccctgcaccccggcggcaccctgtggcccggcagagtgggcagacacagcctgtacttcaacgtgaccgtgttcggcaaggagctgcacctgagactgagacccaacagaagactggtggtgcccggcagcagcgtggagtggcaggaggacttcagagagctgttcagacagcccctgagacaggagtgcgtgtacaccggcggcgtgaccggcatgcccggcgccgccgtggccatcagcaactgcgacggcctggccggcctgatcagaaccgacagcaccgacttcttcatcgagcccctggagagaggccagcaggagaaggaggccagcggcagaacccacgtggtgtacagaagagaggccgtgcagcaggagtgggccgagcccgacggcgacctgcacaacgaggccttcggcctgggcgacctgcccaacctgctgggcctggtgggcgaccagctgggcgacaccgagagaaagagaagacacgccaagcccggcagctacagcatcgaggtgctgctggtggtggacgacagcgtggtgagattccacggcaaggagcacgtgcagaactacgtgctgaccctgatgaacatcgtggacgagatctaccacgacgagagcctgggcgtgcacatcaacatcgccctggtgagactgatcatggtgggctacagacagagcctgagcctgatcgagagaggcaaccccagcagaagcctggagcaggtgtgcagatgggcccacagccagcagagacaggaccccagccacgccgagcaccacgaccacgtggtgttcctgaccagacaggacttcggccccagcggcatgcagggctacgcccccgtgaccggcatgtgccaccccctgagaagctgcgccctgaaccacgaggacggcttcagcagcgccttcgtgatcgcccacgagaccggccacgtgctgggcatggagcacgacggccagggcaacggctgcgccgacgagaccagcctgggcagcgtgatggcccccctggtgcaggccgccttccacagattccactggagcagatgcagcaagctggagctgagcagatacctgcccagctacgactgcctgctggacgaccccttcgaccccgcctggccccagccccccgagctgcccggcatcaactacagcatggacgagcagtgcagattcgacttcggcagcggctaccagacctgcctggccttcagaaccttcgagccctgcaagcagctgtggtgcagccaccccgacaacccctacttctgcaagaccaagaagggcccccccctggacggcaccgagtgcgcccccggcaagtggtgcttcaagggccactgcatctggaagagccccgagcagacctacggccaggacggcggctggagcagctggaccaagttcggcagctgcagcagaagctgcggcggcggcgtgagaagcagaagcagaagctgcaacaaccccagccccgcctacggcggcagactgtgcctgggccccatgttcgagtaccaggtgtgcaacagcgaggagtgccccggcacctacgaggacttcagagcccagcagtgcgccaagagaaacagctactacgtgcaccagaacgccaagcacagctgggtgccctacgagcccgacgacgacgcccagaagtgcgagctgatctgccagagcgccgacaccggcgacgtggtgttcatgaaccaggtggtgcacgacggcaccagatgcagctacagagacccctacagcgtgtgcgccagaggcgagtgcgtgcccgtgggctgcgacaaggaggtgggcagcatgaaggccgacgacaagtgcggcgtgtgcggcggcgacaacagccactgcagaaccgtgaagggcaccctgggcaaggccagcaagcaggccggcgccctgaagctggtgcagatccccgccggcgccagacacatccagatcgaggccctggagaagagcccccacagaatcgtggtgaagaaccaggtgaccggcagcttcatcctgaaccccaagggcaaggaggccaccagcagaaccttcaccgccatgggcctggagtgggaggacgccgtggaggacgccaaggagagcctgaagaccagcggccccctgcccgaggccatcgccatcctggccctgccccccaccgagggcggccccagaagcagcctggcctacaagtacgtgatccacgaggacctgctgcccctgatcggcagcaacaacgtgctgctggaggagatggacacctacgagtgggccctgaagagctgggccccctgcagcaaggcctgcggcggcggcatccagttcaccaagtacggctgcagaagaagaagagaccaccacatggtgcagagacacctgtgcgaccacaagaagagacccaagcccatcagaagaagatgcaaccagcacccctgcagccagcccgtgtgggtgaccgaggagtggggcgcctgcagcagaagctgcggcaagctgggcgtgcagaccagaggcatccagtgcctgctgcccctgagcaacggcacccacaaggtgatgcccgccaaggcctgcgccggcgacagacccgaggccagaagaccctgcctgagagtgccctgccccgcccagtggagactgggcgcctggagccagtgcagcgccacctgcggcgagggcatccagcagagacaggtggtgtgcagaaccaacgccaacagcctgggccactgcgagggcgacagacccgacaccgtgcaggtgtgcagcctgcccgcctgcggcggcaaccaccagaacagcaccgtgagagccgacgtgtgggagctgggcacccccgagggccagtgggtgccccagagcgagcccctgcaccccatcaacaagatcagcagcaccgagccctgcaccggcgacagaagcgtgttctgccagatggaggtgctggacagatactgcagcatccccggctaccacagactgtgctgcgtgagctgcatcaagaaggccagcggccccaaccccggccccgaccccggccccaccagcctgccccccttcagcacccccggcagccccctgcccggcccccaggaccccgccgacgccgccgagccccccggcaagcccaccggcagcgaggaccaccagcacggcagagccacccagctgcccggcgccctggacaccagcagccccggcacccagcaccccttcgcccccgagacccccatccccggcgccagctggagcatcagccccaccacccccggcggcctgccctggggctggacccagacccccacccccgtgcccgaggacaagggccagcccggcgaggacctgagacaccccggcaccagcctgcccgccgccagccccgtgacctag

SEQ ID NO: 238196 - DNA, 3681 bp, Artificial Sequence
  derived and/or modified sequence
atggcacccctgcgagccctgctgagttatctgctcccactgcactgcgctctgtgtgccgccgccggtagcaggacgccggagctccatctcagtggcaaactgagcgactatggtgtaacagtcccatgctctacagattttcgggggcgatttctgtcacacgtggtgagtggtccagccgccgcctcagccggatcgatggttgtcgataccccacccacgctacctcgtcattccagtcatttaagagtggctaggagtccactccacccaggaggaactttgtggcctgggcgcgtaggacggcattcactgtatttcaatgtcacagtgtttggcaaggaactccacctcagattgagacccaaccgtcgtcttgtggtgcctggctcttccgtggagtggcaggaagatttccgagaactgtttagacaaccactacggcaggagtgcgtttacaccggcggtgtcaccggtatgcccggcgcggcagttgctatttccaactgcgatggcctggcaggcttaatccgtactgactccactgacttttttattgaaccactagagcgcgggcagcaggagaaggaagcctccgggcgaacccatgtcgtgtaccggcgcgaagccgttcagcaagagtgggctgagccggacggcgacctacataacgaggctttcggacttggtgacctcccaaatttgcttggtctggtcggggaccagctcggagacaccgaaaggaaacgcagacacgcaaagcctggatcttactccatagaagttctgctcgtggttgatgattctgtcgtacggttccatggaaaggagcacgtacaaaactatgtgctcacacttatgaacatagtagacgaaatttaccatgacgaatccctaggcgttcatataaacatcgccctcgtgcggttaattatggtgggttaccgtcagagcttgagtttaatcgaaagggggaacccaagtcgctccctggaacaggtttgccgatgggctcacagtcagcagcggcaggatcccagtcatgccgagcaccatgaccacgtggtgttccttacgcgacaggactttggcccctccggtatgcagggatacgcgccagttacagggatgtgccacccactccgctcttgtgctctgaatcatgaggatggcttttccagcgcttttgtcatagcacacgagacaggtcatgtcttagggatggaacatgacggacaaggcaatgggtgcgccgatgagacctcattgggctctgtcatggccccactcgtccaggctgccttccacagatttcactggagcagatgcagcaaactggaactcagtcgctacctgccctcctacgattgtctgctggatgacccattcgatcccgcttggccccaaccccccgagctccccggcatcaactattctatggacgaacagtgccggttcgattttggttcaggctaccagacttgcctcgctttccggacattcgaaccatgcaaacagctctggtgcagtcatcctgataacccctacttttgcaaaaccaagaaaggaccacctcttgatggaaccgaatgcgctcccggtaagtggtgcttcaaaggccattgtatctggaaaagcccagagcaaacttacggtcaggatggaggatggtcatcctggacaaaattcggctcctgttcccgcagttgtggtggaggggtgcgttcaaggagccgctcttgtaacaatccttcacctgcttacggtggcagattgtgtctaggcccaatgttcgagtatcaggtgtgcaattcagaggaatgtccgggcacatacgaagattttcgcgctcagcagtgcgcgaaacggaatagctattacgttcatcagaacgctaaacattcttgggtcccgtacgaaccggacgacgatgcccagaaatgcgaactcatctgtcaaagtgcagatactggggacgtcgtatttatgaatcaggtggttcacgacggtacccggtgtagttaccgagatccttatagtgtgtgcgcaagaggcgaatgcgttcccgtgggctgtgataaggaggtgggatccatgaaagctgacgataaatgtggcgtctgtggcggagacaatagccattgccgaaccgtaaaggggactctcgggaaggcctccaagcaagccggcgccctgaagctcgttcagatcccagccggggcacgccacatccagatcgaagcactggaaaagagcccacatcggatcgttgtgaaaaaccaggtcaccggcagtttcatactgaacccgaaaggcaaggaagccacttcaaggactttcaccgcaatggggctggagtgggaggacgccgttgaggatgcaaaagaaagcctgaagactagtgggcccctaccagaggcaatagccatcctggctctccccccaaccgagggtggaccgcgatcaagtctggcgtacaaatatgtgatacatgaagatttgttacctctgattggctccaacaatgtgcttctagaggaaatggatacctatgaatgggctctgaagtcttgggctccgtgctccaaagcatgcggcggcggcatccagttcaccaagtatggttgtcggcgccgccgcgaccatcacatggtgcagaggcacttatgcgaccacaagaaaaggccgaagcctataaggcgcaggtgtaaccagcatccctgttcccaaccagtgtgggttacagaggagtggggggcctgcagtcgcagctgcggcaagctgggcgtgcagactcgcggaatacagtgtctcctgcccctcagcaatggtacccacaaagtgatgccagccaaagcctgtgctggtgataggcccgaggcgcgacggccctgcctgcgggtcccctgtcctgcgcagtggcgattgggcgcctggagtcagtgctccgccacgtgtggcgagggcattcagcaacgtcaggtggtgtgcagaaccaatgctaactctcttggacattgcgaaggggaccgtccagatacagtgcaggtgtgttccctacccgcctgtggcggcaaccaccagaattctacagtaagagccgacgtctgggaactgggaacgcctgagggacagtgggtgccccagtccgaacctttgcaccccataaacaagatcagtagcaccgagccttgcactggcgatcggtccgtgttctgccaaatggaagtattagatcggtactgtagcattcctgggtatcaccgactgtgttgtgtttcatgtatcaaaaaggcctccgggcctaatcctggacctgatcctggaccaacctcactgccccctttcagtacgcccggcagtcctctgccagggccacaagatccagctgatgccgccgaacctcccggcaagcctacagggtccgaggatcatcagcacgggagagcgactcagctgcccggcgctctggacacaagcagcccgggcactcagcatcccttcgcccctgaaaccccaatccccggagccagttggagcatctctcccaccacacctggcggcctgccttggggctggactcagaccccgacgcccgtccctgaggataagggccaaccaggcgaggacctgagacacccagggacatctctccccgccgcctcaccggtgacctag

SEQ ID NO: 238197 - DNA, 3681 bp, Artificial Sequence
  derived and/or modified sequence
atggcccccctgcgggccctgctgagctacctgctgcccctgcactgtgccctgtgtgccgccgccggcagcaggaccccagagctgcacctgagcggcaagctgagtgactatggagtgacagtgccctgcagcacagacttccggggccgcttcctgagccacgtggtgtctggccctgctgctgccagcgctggctccatggtggtggacaccccacccaccctgcccaggcacagcagccacctgcgggtggcccggagccccctgcaccctgggggcaccctgtggccaggccgggtgggccgccacagcctgtacttcaacgtgacagtgtttgggaaggagctgcacctgcggctgcggcccaacagaaggctggtggtgcccggcagctctgtggagtggcaggaggacttccgggagctgttccggcagcccctgcggcaggagtgtgtgtacacaggaggagtgacaggcatgcctggagctgctgtggccatcagcaactgtgatggcctggccggcctcatcagaacagacagcacagacttcttcatcgagcccctggagcggggccagcaggagaaggaggccagcggccgcacccacgtggtgtaccgccgggaggccgtgcagcaggagtgggccgagccagatggagacctgcacaatgaggccttcggcctgggggacctgcccaacctgctgggcctggtgggggaccagctgggggacacagagaggaagagaagacatgccaagccaggcagctacagcattgaggtgctgctggtggtggatgacagcgtggtgcgcttccacggcaaggagcacgtgcagaactacgtgctgaccctgatgaacatcgtggatgagatctaccatgatgagagcctgggcgtgcacatcaacatcgccctggtgcggctcatcatggtgggctaccggcagagcctgagcctgattgagcggggcaaccccagccgcagcctggagcaggtgtgccgctgggcccacagccagcagaggcaggaccccagccacgccgagcaccacgaccacgtggtgttcctgacccggcaggactttggccccagcggcatgcagggctacgcccctgtgacaggcatgtgccaccccctgcggagctgtgccctgaaccatgaagatggcttcagcagcgcctttgtgattgcccatgaaacaggccacgtgctgggcatggagcatgatggccagggcaatggctgtgctgatgagaccagcctgggctctgtgatggcccccctggtgcaggccgccttccaccgcttccactggagccgctgcagcaagctggagctgagccgctacctgcccagctatgactgcctgctggatgacccctttgatcctgcctggccccagcccccagagctgcccggcatcaactacagcatggatgagcagtgccgctttgattttggaagtggctaccagacctgcctggccttccgcacctttgagccctgcaagcagctgtggtgcagccacccagacaacccctacttctgcaagaccaagaagggcccccccctggatggaacagaatgtgcccctgggaagtggtgcttcaagggccactgcatctggaagagccctgagcagacctacggccaggacggcggctggagctcctggaccaagtttggcagctgcagccgcagctgtggcggcggcgtgcgcagccgcagccgcagctgcaacaaccccagccctgcctatggaggccgcctgtgcctgggccccatgtttgagtaccaggtgtgcaacagcgaggagtgccccggcacctatgaggacttccgggcccagcagtgtgccaagaggaacagctactacgtgcaccagaatgccaagcacagctgggtgccctatgagccagatgatgatgcccagaagtgtgagctgatctgccagagcgctgacacaggagatgtggtgttcatgaaccaggtggtgcatgatggcacccgctgcagctacagagacccctacagcgtgtgtgcccggggagaatgtgtgcctgtgggctgtgacaaggaggtgggctccatgaaggcagatgacaagtgtggggtgtgtggcggggacaacagccactgcaggacagtgaagggcaccctgggcaaggccagcaagcaggccggggccctgaagctggtgcagatcccagctggggcccggcacatccagatcgaggccctggagaagagcccccacagaattgtggtgaagaaccaggtgacaggcagcttcatcctgaaccccaagggcaaggaggccaccagcaggaccttcaccgccatgggcctggagtgggaggatgctgtggaggatgccaaggagagcctgaagaccagcggccccctgcctgaggccatcgccatcctggccctgcccccaacagaaggaggccccaggagcagcctggcctacaagtatgtgattcatgaggacctgctgcccctgattggcagcaacaacgtgctgctggaggagatggacacctatgagtgggccctgaagtcctgggccccctgcagcaaggcctgtggcggcggcatccagttcaccaagtatggctgcagaagaagaagagaccaccacatggtgcagaggcacctgtgtgaccacaagaagaggcccaagcccatcagaagacgctgcaaccagcacccctgcagccagcctgtgtgggtgacagaggagtggggcgcctgcagccgcagctgtgggaagctgggcgtgcagacccggggcatccagtgcctgctgcccctgagcaatggcacccacaaggtgatgcctgccaaggcctgtgccggggacaggcctgaggcccggcggccctgcctgcgggtgccctgcccagcccagtggaggctgggcgcctggagccagtgcagcgccacctgtggggagggcatccagcagaggcaggtggtgtgcaggaccaatgccaacagcctgggccactgtgagggggacagaccagacacagtgcaggtgtgcagcctgcctgcctgtggcggcaaccaccagaacagcacagtgcgggcagatgtgtgggagctgggcaccccagagggccagtgggtgccccagagcgagcccctgcaccccatcaacaagatcagcagcacagagccctgcacaggagacagatctgtgttctgccagatggaggtgctggaccgctactgcagcatccctggctaccaccggctgtgctgcgtgtcctgcatcaagaaggccagcggccccaaccctggccctgaccccggccccaccagcctgccccccttcagcaccccaggcagccccctgcccggcccccaggaccctgcagatgctgctgagcccccaggcaagcccactggaagtgaggaccaccagcacggccgggccacccagctgcccggggccctggacaccagcagccctggcacccagcacccctttgcccctgagacccccatccctggggcctcctggagcatcagccccaccaccccaggcggcctgccctggggctggacccagacccccacccctgtgcctgaagataaaggccagcccggggaggacctgcggcaccctggcaccagcctgcctgctgccagccctgtgacctag

SEQ ID NO: 238198 - DNA, 5269 bp, Artificial Sequence
  derived and/or modified sequence
atggctccactccgcgcgctgctgtcctacctgctgcctttgcactgtgcgctctgcgccgccgcgggcagccggaccccagagctgcacctctctggaaagctcagtgactatggtgtgacagtgccctgcagcacagactttcggggacgcttcctctcccacgtggtgtctggcccagcagcagcctctgcagggagcatggtagtggacacgccacccacactaccacgacactccagtcacctccgggtggctcgcagccctctgcacccaggagggaccctgtggcctggcagggtggggcgccactccctctacttcaatgtcactgttttcgggaaggaactgcacttgcgcctgcggcccaatcggaggttggtagtgccaggatcctcagtggagtggcaggaggattttcgggagctgttccggcagcccttacggcaggagtgtgtgtacactggaggtgtcactggaatgcctggggcagctgttgccatcagcaactgtgacggattggcgggcctcatccgcacagacagcaccgacttcttcattgagcctctggagcggggccagcaggagaaggaggccagcgggaggacacatgtggtgtaccgccgggaggccgtccagcaggagtgggcagaacctgacggggacctgcacaatgaagcctttggcctgggagaccttcccaacctgctgggcctggtgggggaccagctgggcgacacagagcggaagcggcggcatgccaagccaggcagctacagcatcgaggtgctgctggtggtggacgactcggtggttcgcttccatggcaaggagcatgtgcagaactatgtcctcaccctcatgaatatcgtagatgagatttaccacgatgagtccctgggggttcatataaatattgccctcgtccgcttgatcatggttggctaccgacagtccctgagcctgatcgagcgcgggaacccctcacgcagcctggagcaggtgtgtcgctgggcacactcccagcagcgccaggaccccagccacgctgagcaccatgaccacgttgtgttcctcacccggcaggactttgggccctcaggtatgcaagggtatgcacccgtcactggcatgtgtcaccccctgaggagctgtgccctcaaccatgaggatggcttctcctcagccttcgtgatagctcatgagaccggccacgtgctcggcatggagcatgacggtcaggggaatggctgtgcagatgagaccagcctgggcagcgtcatggcgcccctggtgcaggctgccttccaccgcttccattggtcccgctgcagcaagctggagctcagccgctacctcccctcctacgactgcctcctcgatgacccctttgatcctgcctggccccagcccccagagctgcctgggatcaactactcaatggatgagcagtgccgctttgactttggcagtggctaccagacctgcttggcattcaggacctttgagccctgcaagcagctgtggtgcagccatcctgacaacccgtacttctgcaagaccaagaaggggcccccgctggatgggactgagtgtgcacccggcaagtggtgcttcaaaggtcactgcatctggaagtcgccggagcagacatatggccaggatggaggctggagctcctggaccaagtttgggtcatgttcgcggtcatgtgggggcggggtgcgatcccgcagccggagctgcaacaacccctccccagcctatggaggccgcctgtgcttagggcccatgttcgagtaccaggtctgcaacagcgaggagtgccctgggacctacgaggacttccgggcccagcagtgtgccaagcgcaactcctactatgtgcaccagaatgccaagcacagctgggtgccctacgagcctgacgatgacgcccagaagtgtgagctgatctgccagtcggcggacacgggggacgtggtgttcatgaaccaggtggttcacgatgggacacgctgcagctaccgggacccatacagcgtctgtgcgcgtggcgagtgtgtgcctgtcggctgtgacaaggaggtggggtccatgaaggcggatgacaagtgtggagtctgcgggggtgacaactcccactgcaggactgtgaaggggacgctgggcaaggcctccaagcaggcaggagctctcaagctggtgcagatcccagcaggtgccaggcacatccagattgaggcactggagaagtccccccaccgcattgtggtgaagaaccaggtcaccggcagcttcatcctcaaccccaagggcaaggaagccacaagccggaccttcaccgccatgggcctggagtgggaggatgcggtggaggatgccaaggaaagcctcaagaccagcgggcccctgcctgaagccattgccatcctggctctccccccaactgagggtggcccccgcagcagcctggcctacaagtacgtcatccatgaggacctgctgccccttatcgggagcaacaatgtgctcctggaggagatggacacctatgagtgggcgctcaagagctgggccccctgcagcaaggcctgtggaggagggatccagttcaccaaatacggctgccggcgcagacgagaccaccacatggtgcagcgacacctgtgtgaccacaagaagaggcccaagcccatccgccggcgctgcaaccagcacccgtgctctcagcctgtgtgggtgacggaggagtggggtgcctgcagccggagctgtgggaagctgggggtgcagacacgggggatacagtgcctgctgcccctctccaatggaacccacaaggtcatgccggccaaagcctgcgccggggaccggcctgaggcccgacggccctgtctccgagtgccctgcccagcccagtggaggctgggagcctggtcccagtgctctgccacctgtggagagggcatccagcagcggcaggtggtgtgcaggaccaacgccaacagcctcgggcattgcgagggggataggccagacactgtccaggtctgcagcctgcccgcctgtggaggaaatcaccagaactccacggtgagggccgatgtctgggaacttgggacgccagaggggcagtgggtgccacaatctgaacccctacatcccattaacaagatatcatcaacggagccctgcacgggagacaggtctgtcttctgccagatggaagtgctcgatcgctactgctccattcccggctaccaccggctctgctgtgtgtcctgcatcaagaaggcctcgggccccaaccctggcccagaccctggcccaacctcactgccccccttctccactcctggaagccccttaccaggaccccaggaccctgcagatgctgcagagcctcctggaaagccaacgggatcagaggaccatcagcatggccgagccacacagctcccaggagctctggatacaagctccccagggacccagcatccctttgcccctgagacaccaatccctggagcatcctggagcatctcccctaccacccccggggggctgccttggggctggactcagacacctacgccagtccctgaggacaaagggcaacctggagaagacctgagacatcccggcaccagcctccctgctgcctccccggtgacatgagctgtgccctgccatcccactggcacgtttacactctgtgtactgccccgtgactcccagctcagaggacacacatagcagggcaggcgcaagcacagacttcattttaaatcattcgccttcttctcgtttggggctgtgatgctctttaccccacaaagcggggtgggaggaagacaaagatcagggaaagccctaatcggagatacctcagcaagctgcccccggcgggactgaccctctcagggcccctgttggtctcccctgccaagaccagggtcaactattgctccctcctcacagaccctgggcctgggcaggtctgaatcccggctggtctgtagctagaagctgtcagggctgcctgccttcccggaactgtgaggacccctgtggaggccctgcatatttggcccctctccccagaaaggcaaagcagggccagggtaggtgggggactgttcacagccaggccgagaggaggggggcctgggaatgtggcatgaggcttcccagctgcagggctggagggggtggaacacaaggtgatcgcaggcccagctcctggaagccaagagctccatgcagttccaccagctgaggccaggcagcagaggccagtttgtctttgctggccagaagatggtgctcatggccatactctggccttgcagatgtcactagtgttacttctagtgactccagattacagactggccccccaatctcaccccagcccaccagagaagggggctcaggacaccctggaccccaagtcctcagcatccagggatttccaaactggcgctcactccctgactccaccaggatggcaacttcaattatcactctcagcctggaaggggactctgtgggacacagagggaacacgatttctcaggctgtcccttcaatcattgcccttctccgaagatcgctcctgctggagtcggacatcttcatcttctacctggctcaagctgggccagagtgtgtggttctcccaggggtggttggaccccaggactgaggaccagagtccactcatagcctggccctggagatgacaagggccacccaggccaagtgccccagggcagggtgccagcccctggcctggtgctggagtggggaagacacactcacccacggtgctgtaagggcctgagctgtgctcagctgccggccatgctacctccaagggacaggtaacagtcttagatcctctggctctcaggaagtggcagggggtcccaggacacctccggggtcttggaggatgtctcctaaactcctgccaggtgatagaggtgcttctcacttcttccttccccaaggcaaaggggctgttctgagccagcctggaggaacatgagtagtgggcccctggcctgcaacccctttggagagtggaggtcctggggggctccccgccctccccctgttgccctcccctccctgggatgctggggcacacgcggagtcattcctgtgagaaccagcctggcctgtgttaaactcttgtgccttggaaatccagatctttaaaattttatgtatttattaacatcgccattggaccccaaaa

SEQ ID NO: 238199 - DNA, 3681 bp, Artificial Sequence
  derived and/or modified sequence
atggcccccctgcgggccctgctgagctacctgctgcccctgcactgtgccctgtgcgcggctgctgggtcccggacaccagagctgcatctgtccggcaagctttcagactacggagtgacggtaccctgtagcactgacttccgcggtagattcctttcgcatgtggtgtctggtcccgccgccgcgtctgccggatcaatggtcgttgacaccccacccaccctcccgagacacagctcccatctgcgggtggctcgcagtccactgcaccccggtggcaccctgtggccaggaagggttggccgacacagtttatatttcaacgttacagttttcggcaaagagctgcacctgcggctgaggcccaacaggcggcttgttgtacctgggagctctgtggagtggcaggaagattttagagaactgtttcggcagccactgcggcaggaatgtgtgtacaccggtggcgtaactggaatgcccggcgccgctgtcgccatttcaaactgcgatggactcgccggactgatcaggaccgactccacagatttcttcattgagccactggagcggggccagcaggaaaaggaggcctcggggcggacacatgtggtctaccgaagggaggccgtgcagcaggaatgggcggagccagatggggatcttcacaatgaagcatttgggttaggtgatcttcctaacttactgggcttggtgggcgaccagctcggggacacagaacggaaaagaaggcacgcgaaacctgggtcctacagcatcgaggtgttgctcgtcgttgacgactccgtcgtccgcttccatgggaaggaacacgttcagaactacgtcctcaccctgatgaacattgtcgatgaaatctaccatgacgagagtttgggagtccatattaacatcgcactggtgcgcctgatcatggtcgggtaccggcagtctctctctctgattgagaggggtaacccctccaggtcattggaacaggtgtgcaggtgggcccatagccaacagcggcaggacccctcccatgccgagcaccacgaccacgtagttttcctgaccaggcaagactttggtccgagcgggatgcaaggatatgcccccgttactggaatgtgccatcccctgaggtcttgcgctctaaaccacgaagacgggttctcttccgcatttgttatcgcccacgaaaccggccatgtgttgggtatggaacatgacggccagggaaatggctgtgctgatgagactagccttggctccgtgatggccccccttgtgcaggccgcttttcacagatttcactggagcaggtgctcaaaacttgagctgtctagatatctgccttcatatgattgtctgctggacgatccgtttgacccagcatggccccaacctccagagcttcctgggattaattacagcatggacgagcagtgcaggttcgactttggctccggctatcaaacctgtcttgccttccggacattcgagccgtgtaaacaactgtggtgctctcaccccgataatccatatttctgcaagacaaaaaaggggcccccactggacgggactgagtgcgctcccggcaaatggtgctttaaaggacattgcatctggaaaagtcccgagcagacctatggccaggatggtggctggtcgtcttggacaaagttcggatcgtgctccagatcctgtggagggggagtacggtcacgatcccgatcatgcaacaacccgtctccggcctatggcggaagactgtgcttgggccccatgtttgagtatcaagtctgcaactcagaagaatgtccaggcacatatgaggattttcgcgctcagcagtgtgccaaacgcaacagctattatgtccatcagaacgccaagcacagttgggtcccttatgagcccgacgatgatgcccagaaatgtgagctaatttgccagagtgctgataccggagacgtggttttcatgaatcaggttgtgcatgatggcacccgatgttcatatcgcgacccttactcggtctgcgcccggggagagtgtgtgcctgtgggttgcgataaggaagtggggtcaatgaaggctgacgacaaatgtggagtgtgtggaggagacaacagtcactgtcgtaccgtgaaaggcaccctgggcaaagcaagcaagcaggctggagccctcaaattggtgcagataccagccggcgccagacacatccaaattgaggccctggaaaagagtccccacagaatagtagttaaaaaccaagtgactggctctttcattctgaatcccaagggaaaagaggcaacatctcggacttttacagcaatgggcctagagtgggaggacgccgtggaggatgcgaaagaaagtctgaaaacttccggtcccctgcccgaagctatagccattctggcattgccacccacagaaggcggtccgagaagctccctcgcgtacaagtatgtgattcacgaggatctcttgccactgatcggctccaataacgttctacttgaagagatggacacctacgaatgggccctaaagtcttgggctccatgttctaaagcctgtggaggcggtattcagttcactaagtatgggtgccgacggcgacgtgaccaccacatggtgcagcgtcatttgtgcgaccataaaaaacgtccaaaaccgatccggcgccgatgcaaccagcatccctgctcccagccagtatgggtaactgaagaatggggagcttgtagccggtcctgcgggaaactcggcgtgcagacccgtggtattcaatgcttactgcctctgtcaaacgggactcataaagttatgcccgctaaagcctgcgcgggcgatagacctgaggctcgcaggccctgcctcagagtaccgtgtcccgcccaatggaggctgggagcttggagccagtgcagcgcgacgtgcggagaggggatacagcagcgacaagtggtgtgcagaacaaatgccaacagtctgggacactgtgagggggataggccagacactgtccaggtctgcagtcttccagcctgtggtgggaaccaccagaactcaacagttagggctgacgtgtgggagcttggcacgcccgaagggcagtgggttccacaaagtgaacctctccaccccattaacaaaatcagttctactgagccctgtacaggcgaccggtccgtgttctgccagatggaggttctcgacagatattgttcaatcccaggataccacagactgtgttgcgtctcatgtatcaagaaggcatcaggtcccaatcctgggccggatccgggtcccacaagcctgccccccttttctaccccagggtcacccctgcccggtccccaggatcccgcagacgccgctgaacccccaggcaagccaacgggcagcgaggaccaccagcacggacgggctacccagctcccaggcgccttggatactagctcacctggaacacaacaccccttcgccccagaaacccccattccaggcgcctcttggtctataagccccactaccccaggaggccttccatggggctggacacagacccctactccagtaccggaagacaaaggacagccgggggaggaccttagacatcccgggacatctcttccagccgcctctccagtgacttag

SEQ ID NO: 238200 - RNA, 3681 nt, Artificial Sequence
  derived and/or modified sequence
auggcccccuugcgcgcucugcuguccuaucucuugccccuacacugugcucuaugcgcagccgccgguucccguaccccggaguugcaccuguccggcaaguugucagacuacggugucacaguuccaugcucuacagauuuuagagggcgguuucucagccacgucguuucagguccugcagcugccucggcuggaucaaugguuguugacaccccaccaacucugccucgucacucuucccaccugagaguggcgagaagcccacuucauccaggcggcacccuguggccaggucgggugggacgacauagccuguacuuuaacgugaccguguucggcaaagagcugcaccugcgccuacguccuaaucgucgacuagucgugcccggcaguuccgucgaguggcaagaggauuucagggagcuauuucgacagccuuuacgucaggaguguguauauacugggggggucaccggaaugccuggagcugccgucgccauauccaacugcgaugggcuggcaggccugauccgcaccgacucuaccgacuuuuucauugagccacucgagcgcggucaacaggaaaaagaagcuagcggucggacccaugugguguaucguagggaggcugugcagcaggaaugggcagaaccggauggagaucuccacaaugaggcauucggacuuggcgaucugcccaaccugcuuggucucgugggagaccaacuuggagacacggagcgaaaaagaaggcacgcaaagcccgguagcuauagcauugaaguccuguuaguaguggacgacagcguugugcgcuuccauggcaaagagcacguucaaaauuaugugcuuaccuugaugaauaucguugacgagaucuaucaugaugaaagccuaggcgugcauaucaauauagcgcucguuaggcugauaauggugggcuaucggcaaucuuugucauuaaucgaacgugguaaucccuccagaagcuuagaacagguguguaggugggcacauucucaacagagacaggacccuagccaugcagagcaccacgaccacgucguuuuuuuaacaaggcaggacuucggaccgagcggaaugcaggguuacgcuccggugacugggaugugccacccgcugcgcucuugugcuuugaaucaugaagaugguuuuaguucagccuucguuaucgcucaugagaccgggcacguccugggcauggagcacgauggacaggggaauggaugugccgacgagacgagccugggaaguguuauggccccacucgugcaagccgcguuccaucgguuccauuggucccggugcucgaagcuggagcugagcagguaccuuccuagcuacgauugcuuguuggacgauccuuucgaccccgccuggccucagccccccgaguuaccuggcaucaacuauaguauggacgaacagugucgguucgacuucggcucaggcuaccagacaugucucgcuuuuagaacuuuugaaccuugcaaacagcuuuggugcagucacccugauaaccccuauuucugcaaaaccaaaaaaggcccuccucuggaugggacagagugcgccccggguaaguggugcuucaagggacauugcauauggaaaagcccugaacagacuuacggccaggacggcggcuggaguagcuggacuaaauuuggcucuugcaguaggucuugcgggggcggaguaaggagcaggagcaggagcugcaacaaucccucccccgccuacggcggcagauugugccuuggcccuauguucgaguaccaagugugcaauagcgaagaaugcccagggacauacgaggacuuuagagcccagcaaugcgcaaagagaaauaguuacuacgugcaucagaacgcgaaacauucaugggucccauacgagccugacgaugaugcacaaaaaugugaguugaucugucaguccgccgauaccggcgaugucgucuuuaugaaccaggugguucacgacgguaccaggugcaguuaucgagaccccuacucuguuugcgcuagaggugagugugugcccgugggcugcgauaaagaagucgguucuaugaaggcggacgacaagugcggcguguguggcggcgacaauucacauugccgcaccguaaagggcacacuugguaaggcuagcaaacaggccggcgccuugaaauuagugcagauuccagccggcgcaagacauauccagaucgaggcacuugagaaaucuccucacagaaucgugguuaagaaucaggucaccggcuccuucauuuugaaucccaagggcaaggaagccacauccagaaccuucacggcgauggggcucgagugggaggaugccguggaggaugccaaagagucccuuaagacgucaggcccuuuacccgaagcuaucgcuauccuggcacuccccccaacagagggaggcccaagaagcagccuugcauauaaguacguuauccacgaagaucuuuugcccuugauaggcuccaauaacguacucuuggaggaaauggacacuuaugaaugggcucucaagaguugggcuccuugcucuaaggccuguggaggcggcauccaauucacgaaguaugguugucguagacggcgcgaucaccacauggugcagagacaucucugugaucacaagaagcguccuaaaccaaucagacgcagguguaaccagcacccuugcucacagcccguguggguaaccgaagaguggggcgcuuguucccggucaugcggaaaauugggcgugcagacucgggguauccagugucuccugccauuguccaacggaacccauaaggucaugccggccaaggccugcgcuggggauaggccggaagcucguagaccuugucucagggucccauguccugcccaauggaggcugggcgcuuggucucaauguucugccacauguggagaaggcauccagcaacgucagguuguguguaggaccaaugcuaauagccugggucacugcgaaggggaccggccagauacaguccaggucugcagcuuacccgccuguggcgggaaccaccagaauagcacugucagggccgauguuugggagcucgguacuccagagggacagugggugccucagucagagccucugcaccccauuaauaaaauaaguagcaccgaaccaugcaccggcgaucgcucaguuuuuugccagauggaagucuuagaucgauauuguuccauuccaggauaccacagacuguguugcgugucuuguaucaaaaaggcuucuggccccaauccaggucccgaccccggaccuacgucucuaccucccuucaguaccccaggcucacccuugccggguccacaggaucccgcugacgcagcugaaccccccgggaagcccaccggaagugaagaucaucagcacggcagagccacucaacucccaggagcacuggacacuuccagccccggcacccagcauccuuuugcucccgagacccccauccccggcgccaguugguccauuaguccaacaacccccgggggguuaccaugggguuggacucagacaccuaccccagugcccgaggacaaggggcaaccaggcgaggaucugagacaccccgggaccaguuuaccagcugcuucgcccgucaccuag

SEQ ID NO: 238201 - RNA, 3681 nt, Artificial Sequence
  derived and/or modified sequence
auggcaccgcugagagcccugcuuucauaccuacucccauugcauugcgccuuaugugccgcugcuggcucccgcacucccgaguugcaccucucuggcaaacucucggacuacgguguaaccguaccuuguaguacugauuucagaggaagguucuugucccacguuguguccggucccgcugccgcaucagcgggcuccaugguuguggacaccccccccacccuccccagacauaguucacaccuccgagucgcacggucuccgcuccaccccggcggaacguuguggccaggccgggugggacgccauagcuuauacuuuaacguaaccguguuuggaaaggagcugcaccuccgucuuagaccuaaccgaagguuaguugugccggguagcagugucgaguggcaagaggauuuucgggaguuguuucggcagccccugaggcaggagugcguguacacaggaggcguaacuggaaugccuggugccgcgguugcaaucucaaacugugauggacuggccggccuaauccgcacugacagcaccgacuuuuuuaucgagccuuuagagcguggacagcaggagaaggaagcgucgggccggacccacgugguuuaccgccgcgaagcugugcagcaagaaugggcugaaccagauggagaccuucacaaugaggcauucggacucggggaucuuccuaaucugcuaggauuggugggcgaucagcucggcgacacagaacguaaaagaagacacgcaaagccaggcuccuacagcaucgaaguauuauuagugguggaugauuccgucgugagguuucaugggaaagagcauguccagaacuacguuuuaacucugaugaacauaguggaugagauauaccacgacgagagccugggcgugcauaucaauauagcgcucguuaggcugauaauggugggcuaucggcaaucuuugucauuaaucgaacgugguaaucccuccagaagcuuagaacagguguguaggugggcacauucucaacagagacaggacccuagccaugcagagcaccacgaccacgucguuuuuuuaacaaggcaggacuucggaccgagcggaaugcaggguuacgcuccggugacugggaugugccacccgcugcgcucuugugcuuugaaucaugaagaugguuuuaguucagccuucguuaucgcucaugagaccggccacgugcucgggauggaacaugauggccagggcaacggaugugcagaugagacgucucuugguucagugauggcaccccuuguucaagcggcuuuccauagauuucauuggucacgauguuccaaacuggagcuuucuagauaccuccccucuuacgacugucuguuagaugacccauucgacccagcauggccacagccuccugagcucccaggaauaaacuacucaauggacgaacagugucgcuucgacuucggaucuggauaccagaccugcuuggcauuccgcacuuuugagccguguaaacaacuuugguguucacaucccgauaauccuuauuucuguaagaccaagaaaggcccuccccuggacggcacagaaugcgcaccugguaagugguguuucaaagggcauuguaucuggaaaucucccgaacagacguauggccaggaugggggcuggucuagcuggacuaaauuugguucuuguucaagaaguuguggagggggcguucgaucuaggagcaggucuugcaacaaucccucuccagccuacggcgggcgucugugcuugggacccauguuugaguaccaaguuugcaauucugaagaauguccuggcacuuaugaagauuuuagggcccaacagugugccaaaaggaacucuuauuauguucaccagaacgccaaacacucauggguacccuaugagccagacgaugacgcucaaaaaugugaacuaauuugucaaucggccgacacuggugaugugguguuuaugaaucagguggugcacgacggcacccgcugcagcuaccgcgacccuuacucaguaugugcccgcggagaaugugugcccgucggaugcgacaaagaagucgguucuaugaaagccgaugauaaaugcggugugugcggcggcgacaacagucauugcagaacugugaaaggaacacuggggaaggcaucuaagcaagccggagcucuuaaacucgugcaaauuccggccggggcacggcauauacaaaucgaggcucucgaaaaguccccucauaggauugugguaaagaaucagguuaccgggagcuuuauucugaacccgaagggcaaagaagcaacauccagaacauucaccgcuaugggccucgagugggaggacgccguggaggacgcaaaggaaagccugaaaacgucaggcccuuuacccgaagcuaucgcuauccuggcacuccccccaacagagggaggcccaagaagcagccuugcauauaaguacguuauccacgaagaucuuuugcccuugauaggcuccaauaacguacucuuggaggaaauggacacuuaugaaugggcucucaagaguugggcuccuugcucuaaggccuguggaggcggcauccaauucacgaaguaugguugucguagacggcgcgaucaccacauggugcagagacaucucugugaucacaagaagcguccuaaaccaaucaggagaagaugcaaucaacacccuuguucccaaccaguguggguuaccgaagaauggggagccugcucaagaagcugcgguaagcuuggagugcagacacgcggaauccagugccucuuacccuuaucaaacgggacucauaaaguuaugcccgcuaaggccugugcgggagauaggcccgaggcacggaggccgugccuucgagucccaugcccggcucaguggagacuaggugcguggucccaaugcucugccacuugcggugaagggauucagcaaagacaggucguaugucgcacaaaugcgaauucgcucggacacugcgaaggcgaccgaccugauaccguccaaguuugcucacuacccgccugcggaggcaaccaccagaacucuaccguacgagcagacgugugggagcugggcacacccgagggucaaugggugccccagucugaaccguuacaccccauuaacaagauuucauccaccgagcccugcacaggcgacagauccguguuuugucaaauggaaguuuuggaccgguacugcagcauaccaggcuaucaucgacucugcugcgugucauguaucaagaaagccagugggcccaauccuggaccugaccccggccccaccagccugccuccuuucucgacuccgggcucuccccucccaggaccucaagaucccgcugaugccgcagagccuccaggaaagccaacaggaucagaagaccaucagcauggcagggcaacacaacugccaggagcccuggauaccucaucuccggggacccagcacccuuucgcccccgaaacuccaauccccggugccuccugguccauuuccccuacaacaccuggcggacuccccuggggauggacacagacaccaacuccuguacccgaggauaagggccaacccggugaagaucuccgacacccaggaaccucucugccugccgcuagccccguaacauag

SEQ ID NO: 238202 - protein, 420 aa, Artificial Sequence [sequence omitted]

SEQ ID NO: 238203 - protein, 47 aa, Artificial Sequence
  derived and/or modified sequence
MWSPQDRKYNSPPTQLSLKPNSQSLRSGNWSERKSHRLPRLPKRHSH

SEQ ID NO: 238204 - protein, 717 aa, Artificial Sequence
  derived and/or modified sequence
MTMTANKNSSITHGAGGTKAPRGTLSRKSFEFEDASSLQSLYPSSPTENGTENQPKFGSKSTLEENAYEDIVGDLPKENPYEDVDLKSRRAGRKSQQLSENSLDSLHRMWSPQDRKYNSPPTQLSLKPNSQSLRSGNWSERKSHRLPRLPKRHSHDDMLLLAQLSLPSSPSSLNEDSLSTTSELLSSRRARRIPKLVQRINSIYNAKRGKKRLKKLSMSSIETASLRDENSESESDSDDRFKAHTQRLVHIQSMLKRAPSYRTLELELLEWQERELFEYFVVVSLKKKPSRNTYLPEVSYQFPKLDRPTKQMREAEERLKAIPQFCFPDAKDWLPVSEYSSETFSFMLTGEDGSRRFGYCRRLLPSGKGPRLPEVYCVISRLGCFGLFSKVLDEVERRRGISAALVYPFMRSLMESPFPAPGKTIKVKTFLPGAGNEVLELRRPMDSRLEHVDFECLFTCLSVRQLIRIFASLLLERRVIFVADKLSTLSSCSHAVVALLYPFSWQHTFIPVLPASMIDIVCCPTPFLVGLLSSSLPKLKELPVEEALMVNLGSDRFIRQMDDEDTLLPRKLQAALEQALERKNELISQDSDSDSDDECNTLNGLVSEVFIRFFVETVGHYSLFLTQSEKGERAFQREAFRKSVASKSIRRFLEVFMESQMFAGFIQDRELRKCRAKGLFEQRVEQYLEELPDTEQSGMNKFLRGLGNKMKFLHKKN

SEQ ID NO: 238205 - protein, 136 aa, Artificial Sequence
  derived and/or modified sequence
MTMTANKNSSITHGAGGTKAPRGTLSRKSFEFEDASSLQSLYPSSPTENGTENQPKFGSKSTLEENAYEDIVGDLPKENPYEDVDLKSRRAGRKSQQLSENSLDSLHRMWSPQDRKYNSPPTQLSLKPNSQSLRSG

SEQ ID NO: 238206 - protein, 26 aa, Artificial Sequence
  derived and/or modified sequence
MTMTANKNSSITHGAGGTKAPRGTLS

SEQ ID NO: 238207 - protein, 344 aa, Artificial Sequence
  derived and/or modified sequence
MWSPQDRKYNSPPTQLSLKPNSQSLRSGNWSERKSHRLPRLPKRHSHDDMLLLAQLSLPSSPSSLNEDSLSTTSELLSSRRARRIPKLVQRINSIYNAKRGKKRLKKLSMSSIETASLRDENSESESDSDDRFKAHTQRLVHIQSMLKRAPSYRTLELELLEWQERELFEYFVVVSLKKKPSRNTYLPEVSYQFPKLDRPTKQMREAEERLKAIPQFCFPDAKDWLPVSEYSSETFSFMLTGEDGSRRFGYCRRLLPSGKGPRLPEVYCVISRLGCFGLFSKVLDEVERRRGISAALVYPFMRSLMESPFPAPGKTIKVKTFLPGAGNEVLELRRPMDSRLEHV

SEQ ID NO: 238208 - DNA, 1263 bp, Artificial Sequence
  derived and/or modified sequence
atgaccagcagaaagaacggcggcggcgcccacagctggcaggagaccccctgggagcagagaagagccctgggcctgcagagagccgagatgaccatgaccgccaacaagaacagcagcatcacccacggcgccggcggcaccaaggcccccagaggcaccctgagcagaaagagcttcgagttcgaggacgccagcagcctgcagagcctgtaccccagcagccccaccgagaacggcaccgagaaccagcccaagttcggcagcaagagcaccctggaggagaacgcctacgaggacatcgtgggcgacctgcccaaggagaacccctacgaggacgtggacctgaagagcagaagagccggcagaaagagccagcagctgagcgagaacagcctggacagcctgcacagaatgtggagcccccaggacagaaagtacaacagcccccccacccagctgagcctgaagcccaacagccagagcctgagaagcggcaactggagcgagagaaagagccacagactgcccagactgcccaagagacacagccacgacgacatgctgctgctggcccagctgagcctgcccagcagccccagcagcctgaacgaggacagcctgagcaccaccagcgagctgctgagcagcagaagagccagaagaatccccaagctggtgcagagaatcaacagcatctacaacgccaagagaggcaagaagagactgaagaagctgagcatgagcagcatcgagaccgccagcctgagagacgagaacagcgagagcgagagcgacagcgacgacagattcaaggcccacacccagagactggtgcacatccagagcatgctgaagagagcccccagctacagaaccctggagctggagctgctggagtggcaggagagagagctgctgagcaccctgtggtggtgccccagcagaagaagccacagagagacccccaccagccccaagagccccaccagcttccccagaaacgtgctgagccccgccctgcacgtggccgccggcagcttcagcttcctgagactgtgcagcagcagaaccagcttcagaagaagcgtgcagacccccgcctggagccccagccccgcccagctggccctgctggacagacccaccaagcagatgagagaggccgaggagagactgaaggccatcccccagttctgcttccccgacgccaaggactggctgcccgtgagcgagtacatgagacccttcctgagctgctag

SEQ ID NO: 238209 - DNA, 219 bp, Artificial Sequence
  derived and/or modified sequence
atgaccatgaccgccaacaagaacagcagcatcacccacggcgccggcggcaccaaggcccccagaggcaccctgagcagaaagagcttcgagttcgaggacgccagcagcctgcagagcctgtaccccagcagccccaccgagaacggcaccgagaaccagcccaagttcggcagcaagagcaccctggaggagaacgcctacgaggacatcgtgtag

SEQ ID NO: 238210 - DNA, 2154 bp, Artificial Sequence
  derived and/or modified sequence
atgaccatgaccgccaacaagaacagcagcatcacccacggcgccggcggcaccaaggcccccagaggcaccctgagcagaaagagcttcgagttcgaggacgccagcagcctgcagagcctgtaccccagcagccccaccgagaacggcaccgagaaccagcccaagttcggcagcaagagcaccctggaggagaacgcctacgaggacatcgtgggcgacctgcccaaggagaacccctacgaggacgtggacctgaagagcagaagagccggcagaaagagccagcagctgagcgagaacagcctggacagcctgcacagaatgtggagcccccaggacagaaagtacaacagcccccccacccagctgagcctgaagcccaacagccagagcctgagaagcggcaactggagcgagagaaagagccacagactgcccagactgcccaagagacacagccacgacgacatgctgctgctggcccagctgagcctgcccagcagccccagcagcctgaacgaggacagcctgagcaccaccagcgagctgctgagcagcagaagagccagaagaatccccaagctggtgcagagaatcaacagcatctacaacgccaagagaggcaagaagagactgaagaagctgagcatgagcagcatcgagaccgccagcctgagagacgagaacagcgagagcgagagcgacagcgacgacagattcaaggcccacacccagagactggtgcacatccagagcatgctgaagagagcccccagctacagaaccctggagctggagctgctggagtggcaggagagagagctgttcgagtacttcgtggtggtgagcctgaagaagaagcccagcagaaacacctacctgcccgaggtgagctaccagttccccaagctggacagacccaccaagcagatgagagaggccgaggagagactgaaggccatcccccagttctgcttccccgacgccaaggactggctgcccgtgagcgagtacagcagcgagaccttcagcttcatgctgaccggcgaggacggcagcagaagattcggctactgcagaagactgctgcccagcggcaagggccccagactgcccgaggtgtactgcgtgatcagcagactgggctgcttcggcctgttcagcaaggtgctggacgaggtggagagaagaagaggcatcagcgccgccctggtgtaccccttcatgagaagcctgatggagagccccttccccgcccccggcaagaccatcaaggtgaagaccttcctgcccggcgccggcaacgaggtgctggagctgagaagacccatggacagcagactggagcacgtggacttcgagtgcctgttcacctgcctgagcgtgagacagctgatcagaatcttcgccagcctgctgctggagagaagagtgatcttcgtggccgacaagctgagcaccctgagcagctgcagccacgccgtggtggccctgctgtaccccttcagctggcagcacaccttcatccccgtgctgcccgccagcatgatcgacatcgtgtgctgccccacccccttcctggtgggcctgctgagcagcagcctgcccaagctgaaggagctgcccgtggaggaggccctgatggtgaacctgggcagcgacagattcatcagacagatggacgacgaggacaccctgctgcccagaaagctgcaggccgccctggagcaggccctggagagaaagaacgagctgatcagccaggacagcgacagcgacagcgacgacgagtgcaacaccctgaacggcctggtgagcgaggtgttcatcagattcttcgtggagaccgtgggccactacagcctgttcctgacccagagcgagaagggcgagagagccttccagagagaggccttcagaaagagcgtggccagcaagagcatcagaagattcctggaggtgttcatggagagccagatgttcgccggcttcatccaggacagagagctgagaaagtgcagagccaagggcctgttcgagcagagagtggagcagtacctggaggagctgcccgacaccgagcagagcggcatgaacaagttcctgagaggcctgggcaacaagatgaagttcctgcacaagaagaactag

SEQ ID NO: 238211 - DNA, 411 bp, Artificial Sequence
  derived and/or modified sequence
atgaccatgaccgccaacaagaacagcagcatcacccacggcgccggcggcaccaaggcccccagaggcaccctgagcagaaagagcttcgagttcgaggacgccagcagcctgcagagcctgtaccccagcagccccaccgagaacggcaccgagaaccagcccaagttcggcagcaagagcaccctggaggagaacgcctacgaggacatcgtgggcgacctgcccaaggagaacccctacgaggacgtggacctgaagagcagaagagccggcagaaagagccagcagctgagcgagaacagcctggacagcctgcacagaatgtggagcccccaggacagaaagtacaacagcccccccacccagctgagcctgaagcccaacagccagagcctgagaagcggctag

SEQ ID NO: 238212 - DNA, 234 bp, Artificial Sequence
  derived and/or modified sequence
atgaccatgaccgccaacaagaacagcagcatcacccacggcgccggcggcaccaaggcccccagaggcaccctgagcagaaagagcttcgagttcgaggacgccagcagcctgcagagcctgtaccccagcagccccaccgagaacggcaccgagaaccagcccaagttcggcagcaagagcaccctggaggagaacgcctacgaggacatcgtgggcgacctgcccaagtag

SEQ ID NO: 238213 - DNA, 1035 bp, Artificial Sequence
  derived and/or modified sequence
atgtggagcccccaggacagaaagtacaacagcccccccacccagctgagcctgaagcccaacagccagagcctgagaagcggcaactggagcgagagaaagagccacagactgcccagactgcccaagagacacagccacgacgacatgctgctgctggcccagctgagcctgcccagcagccccagcagcctgaacgaggacagcctgagcaccaccagcgagctgctgagcagcagaagagccagaagaatccccaagctggtgcagagaatcaacagcatctacaacgccaagagaggcaagaagagactgaagaagctgagcatgagcagcatcgagaccgccagcctgagagacgagaacagcgagagcgagagcgacagcgacgacagattcaaggcccacacccagagactggtgcacatccagagcatgctgaagagagcccccagctacagaaccctggagctggagctgctggagtggcaggagagagagctgttcgagtacttcgtggtggtgagcctgaagaagaagcccagcagaaacacctacctgcccgaggtgagctaccagttccccaagctggacagacccaccaagcagatgagagaggccgaggagagactgaaggccatcccccagttctgcttccccgacgccaaggactggctgcccgtgagcgagtacagcagcgagaccttcagcttcatgctgaccggcgaggacggcagcagaagattcggctactgcagaagactgctgcccagcggcaagggccccagactgcccgaggtgtactgcgtgatcagcagactgggctgcttcggcctgttcagcaaggtgctggacgaggtggagagaagaagaggcatcagcgccgccctggtgtaccccttcatgagaagcctgatggagagccccttccccgcccccggcaagaccatcaaggtgaagaccttcctgcccggcgccggcaacgaggtgctggagctgagaagacccatggacagcagactggagcacgtgtag

SEQ ID NO: 238214 - DNA, 231 bp, Artificial Sequence
  derived and/or modified sequence
atgaccatgaccgccaacaagaacagcagcatcacccacggcgccggcggcaccaaggcccccagaggcaccctgagcagaaagagcttcgagttcgaggacgccagcagcctgcagagcctgtaccccagcagccccaccgagaacggcaccgagaaccagcccaagttcggcagcaagagcaccctggaggagaacgcctacgaggacatcgtgggcgacctgccctag

SEQ ID NO: 238215 - DNA, 1263 bp, Artificial Sequence
  derived and/or modified sequence
atgacttctcgcaagaacggggggggggctcacagctggcaggaaacgccctgggagcagcgtcgcgctctggggctccagcgggcagagatgaccatgactgctaataagaacagttcgatcactcacggggccggtggaactaaagccccccggggtactttgtcccgaaaatcattcgagtttgaagacgcgtcttccctgcagtcactgtatccttcatccccgactgagaatggaactgagaaccagccaaaattcgggagcaagtccactctcgaggagaatgcctatgaagacatagtgggagacttaccgaaggagaacccatatgaagatgtcgatctgaaatcaagacgtgctggaaggaagtcacagcagctcagcgaaaactctctggacagtcttcatagaatgtggtctcctcaggatcggaaatacaatagcccaccaactcagttaagtttgaagcctaattctcagagcctgcgatccgggaattggtctgaaagaaagtcccatcggttgccaaggctgcctaagaggcatagtcatgacgacatgctcctcttagcccaactgtcactcccgtcatctccaagcagtctcaacgaggatagcctgagtaccactagtgaactcctatcttcacgcagagcgaggcgtatccccaaattggtccagagaatcaacagcatttacaacgcaaaacggggcaaaaagcgacttaagaagttatctatgtctagcatcgagaccgccagccttcgggacgagaactccgagtccgaaagtgattccgacgataggtttaaggcccacactcagcgactagttcacatccaatctatgcttaagcgagcaccttcttacagaacattagagcttgaattgctggaatggcaggagcgggagctcctgtccaccctttggtggtgcccatcaaggcgtagtcaccgcgaaactcccacctcgccaaaatctcccacttcctttccacgcaacgtgctgtcacccgccctgcatgtggcagccggcagcttctcatttctcaggctctgctcaagcagaacgagcttccgccggtcagtacaaactccggcttggtccccttccccagctcagctcgcattactagaccggccgacgaagcagatgagagaggccgaagagaggctgaaagcaattccccagttttgcttccccgatgcgaaggattggctgcccgttagcgaatacatgcggcctttcttaagctgctag

SEQ ID NO: 238216 - DNA, 219 bp, Artificial Sequence
  derived and/or modified sequence
atgacaatgacagctaacaaaaatagctcgatcactcatggcgccggggggaccaaggccccccggggcactctgagccgcaaatcatttgagtttgaggatgcttccagccttcagtccctgtaccccagcagccctacggaaaacggtacagaaaaccagcccaaatttggctctaaatctactctggaggaaaacgcatacgaagacatagtgtag

SEQ ID NO: 238217 - DNA, 2154 bp, Artificial Sequence
  derived and/or modified sequence
atgacgatgactgcaaacaaaaattctagcataacccacggcgcagggggaacgaaagctccccggggaaccctgagtaggaagagtttcgaattcgaggacgcctcatccctgcagagcctctaccctagtagtcctaccgaaaacggcactgagaatcagcccaagtttggatctaaatccacactggaggagaacgcttacgaggacattgtgggtgatttacctaaggagaacccatacgaagacgtcgatctcaagtctcgtcgcgcaggaaggaaaagtcagcaactctcagagaactctttggacagtctgcatcggatgtggtcaccgcaagaccgtaaatacaactcgccacccactcagctgagccttaagcccaactcacagtctctcaggtcagggaactggtccgaacgcaaatctcaccgactgcctagattgcctaaaaggcactcacatgacgatatgctgctgctggcccagctgagcttaccaagcagccccagctctttgaatgaagatagcctatcaacaacttctgaactcctttccagtagacgggcacgccggatccctaagctcgttcagcgcattaatagcatctataatgcaaagagggggaaaaaaaggttaaaaaagctttctatgagtagcatcgagacagcctccctgcgagacgagaacagcgagagtgagtctgatagcgatgaccgatttaaagctcacacgcagaggttggtacacattcagtcaatgttaaagcgcgctccttcttatcgcacactggaactagagctgttggaatggcaagagagagaactgtttgagtacttcgtcgtggtctccctgaagaagaaaccaagcaggaacacctatttacctgaagtgagttaccaatttccaaagctagacaggcccacgaagcagatgcgtgaagcggaggagagactcaaggctattccccagttttgctttcccgacgcgaaggactggctgcctgtcagcgaatacagcagcgaaacgttcagtttcatgctcaccggggaagatggctcacgtcgcttcggctactgccgacgcctgctgccatccggcaaaggtccgaggctcccggaggtttattgtgttatttcccgcctgggctgtttcgggctgttttccaaggttttggatgaagtggaaagaagaaggggcatctcagcagccttagtatacccattcatgaggagcctgatggaatctccatttcccgcacctggaaagactatcaaagtaaaaaccttcttgccaggagcaggcaacgaggtccttgaactgaggagacccatggatagccgtctcgaacatgtagactttgagtgtctgtttacgtgcctctctgtgcgccagttgattcgcatatttgcatcccttttactggaacgcagggtgattttcgtggctgataagctgtcaaccttatcctcctgcagccacgcagtagtagcactgctttatccattttcctggcagcacacatttattccagtgctgcccgccagcatgatagacatcgtgtgctgcccgaccccatttctggtgggtcttttatcctcttcactccctaagctcaaagaactgcccgtggaggaggcccttatggttaacttaggatcggaccggttcattcgccagatggacgacgaggataccttgcttcccaggaaactgcaagctgccctcgaacaggccttagagaggaaaaatgaactgatctcccaggacagtgattcagacagcgacgatgagtgcaacactctgaatgggctggtatctgaggtgttcattaggttttttgtggaaaccgttggccattattccctgttcctgactcagtcagagaagggagagcgagcattccagagggaggcttttcgcaaatcagtggcctccaagagcatccggaggtttctcgaggtgttcatggaatcccaaatgtttgcaggctttatccaggatcgagaacttcgcaagtgtcgcgctaaaggcctgtttgagcaacgggtggagcagtatttggaggagctgcctgatactgaacagtctggtatgaacaaatttctgagggggctcggcaataagatgaaattcttacacaagaagaattag

SEQ ID NO: 238218 - DNA, 2154 bp, Artificial Sequence
  derived and/or modified sequence
atgaccatgaccgcaaataagaactcctcaatcactcacggggctggagggactaaagcccccagaggaactctttcgcggaagtcgtttgagttcgaggacgcgagcagtcttcagtccctgtatccaagctcaccgacggagaacggaaccgagaaccaacccaagtttggtagtaagagcaccctggaggagaacgcctatgaggacatcgtgggcgatctcccaaaggaaaacccctatgaggatgtagatctgaaatctcgaagagctggacgcaaaagtcagcagttatcggagaacagtttggattcgttgcacagaatgtggtccccccaggatcggaagtataacagcccaccaacccagctgagccttaagccgaactctcagtccttgcggtcgggcaattggagcgagcgcaagagccataggctgccccggcttcctaaacgacatagtcatgacgacatgttgctcttagctcaattgtctctgccgagcagtcccagcagtctgaatgaggatagccttagcaccaccagtgaacttctaagctcaaggcgcgcaagacgaatcccaaaactggtgcagaggattaacagtatttataacgcaaaacggggcaagaaacgcctcaagaagctgagcatgagctctatcgagaccgcttctttgcgtgatgaaaactctgaaagcgagtctgattccgatgacagattcaaggcccatacccagcgactggtgcatatccagtctatgctcaagagagctcccagttatcgcaccctagaactggaattacttgagtggcaggaaagggagctcttcgagtattttgtcgtggtgtctctgaagaaaaagccctcccgaaatacatacctgccagaagtgtcttatcagttccccaagctggaccggcctacaaagcagatgagagaagccgaagagcgtcttaaagcaattcctcagttctgctttcctgacgccaaggattggctgccagtttccgagtacagttcggaaaccttctcatttatgctcacaggcgaagacggttccagaagatttggatactgccgccgcctactgccgtccggcaaggggccaagacttcctgaggtttactgtgtgatcagccgcttgggctgtttcggccttttcagtaaggtcctggatgaggtggaacgacgaagggggatctccgcagccttggtgtatcccttcatgagaagcctcatggagagtccattccctgctccaggaaagaccatcaaggtaaaaactttcctgccaggtgcgggcaacgaagtgttagaacttcggcgacccatggactcccgactggaacacgtggactttgaatgcttgtttacatgtctctccgtacggcaacttatccgtattttcgctagcctgctcctagaacgaagggtcattttcgtcgcagataagctgagcacgctgagctcttgctcccatgccgtagtggccctactctatccgttcagttggcaacatacattcatccctgtgctccctgcctctatgatcgacatagtttgctgccctacaccattcctggtcggtctgctgtcatcctctctccccaagctaaaagagctgccagtggaggaggccctcatggtgaatttggggtcagataggtttatccgtcagatggacgatgaagatactctgttaccacggaaactgcaggccgccttggagcaggccctcgaacggaagaatgaactaatctcccaggatagcgattcggattctgatgatgagtgcaatacattaaatggccttgttagtgaagtgtttattcggtttttcgtggaaactgtcggccactactctctgttcctgactcaatcagagaagggagaaagagctttccagcgagaggcttttcgcaagagcgttgcatctaaatctataagacgcttcttagaagttttcatggagagtcagatgttcgccgggtttattcaagaccgcgaattgaggaagtgtagggccaagggtctgtttgaacaacgtgtggagcagtatttagaggagcttccagataccgaacagtccggcatgaacaagtttctgcgaggactaggaaataagatgaagttcctacataagaaaaattag

SEQ ID NO: 238219 - DNA, 411 bp, Artificial Sequence
  derived and/or modified sequence
atgacaatgaccgctaacaagaacagcagcataacgcacggggccggaggcactaaggcccctcgcggaaccctttcgcggaaatcattcgaatttgaggacgcttccagtcttcagtcactgtacccatcctctcccacagaaaacggcactgaaaaccagcctaaattcggctctaagtctacactggaggagaacgcctatgaggacatcgtgggcgatcttcctaaggagaacccgtatgaagatgtcgacctgaaatctcggagggccgggcgcaagagtcagcaattgtccgaaaattccttggatagcctgcacaggatgtggtcacctcaggatcgtaaatacaactctccaccaacccagttatccctgaaacccaactctcaaagtcttaggagtggctag

SEQ ID NO: 238220 - DNA, 234 bp, Artificial Sequence
  derived and/or modified sequence
atgactatgaccgcaaataagaactcttctattacccacggagccggcggtactaaagccccaaggggcacactgtcacggaaatcatttgagttcgaagatgcctctagtctgcagtcgctttatccatcatcacctacggaaaacgggactgaaaaccaacctaagtttggaagtaagtcaacactcgaggagaacgcttacgaagatattgtgggtgatctcccaaagtag

SEQ ID NO: 238221 - DNA, 1035 bp, Artificial Sequence
  derived and/or modified sequence
atgtggtccccccaggaccgtaagtacaatagcccacccacccagttgagcctcaagcccaatagtcagtccctgaggtctggtaactggtctgagagaaagtctcacagactgcccagactccctaaacggcattcacacgatgatatgctgctgctcgctcaactgagtttgccctctagtcccagttctctcaacgaggacagcctcagtaccacttctgagttgctctcttcccgcagggccagacgaatccccaagctcgtgcagcggatcaacagcatttacaacgctaaacggggaaaaaaaaggctcaagaagctgtcaatgtcttcgattgaaacagcctccctcagagacgagaacagtgagtctgaaagcgactccgatgaccggtttaaggcccatacgcaacgtctagttcacatccaatctatgcttaaacgcgcaccctcctacagaactctagagctggaactattagagtggcaagaaagggaacttttcgagtactttgttgtggtgagtctgaaaaagaagccatcccggaatacatatcttcccgaggtaagttatcaatttccaaagctggaccggccaacaaaacagatgagagaggccgaagaacgcctgaaagccatcccgcaattttgtttcccagatgccaaggattggctccctgtctccgaatactcatccgaaaccttttctttcatgctaactggggaggatggatccaggcgtttcggttactgtcgtcgcctgctgccctccgggaaggggcccagacttcccgaagtctactgcgtaattagccgtttgggctgttttggactgtttagcaaagtgctcgacgaggtcgaacgtagacgaggcatctctgcggcacttgtttatccctttatgcgatcccttatggagtcacctttcccagctcccgggaagaccattaaggtcaaaacgtttcttccgggcgcagggaatgaggtactcgagctgagaagaccaatggacagtcggctggaacacgtttag

SEQ ID NO: 238222 - DNA, 231 bp, Artificial Sequence
  derived and/or modified sequence
atgacaatgactgctaataagaattcaagcatcacccatggcgctgggggtacgaaggcccctagagggacactgagccgcaaatcttttgaatttgaggacgccagttcactgcagtccctctacccctcatcccctactgagaacggtactgagaaccagccaaaattcggtagtaagtccacactcgaggaaaatgcctacgaagacattgttggcgacctgccctag

SEQ ID NO: 238223 - DNA, 1263 bp, Artificial Sequence
  derived and/or modified sequence
atgaccagcaggaagaatggaggaggagcccacagctggcaggagaccccctgggagcagaggcgggccctgggcctgcagagagctgagatgaccatgacagccaacaagaacagcagcatcacccatggagctgggggcaccaaggccccccggggcaccctgagcaggaagagctttgaatttgaagatgccagcagcctgcagagcctgtaccccagcagccccacagaaaatggaacagagaaccagcccaagtttggcagcaagagcaccctggaggagaatgcctatgaagatattgtgggggacctgcccaaggagaacccctatgaagatgtggacctgaagagcagaagagctggcaggaagagccagcagctgtctgagaacagcctggacagcctgcacaggatgtggagcccccaggacaggaagtacaacagcccccccacccagctgagcctgaagcccaacagccagagcctgcggagcggcaactggagcgagaggaagagccaccggctgccccggctgcccaagaggcacagccatgatgacatgctgctgctggcccagctgagcctgcccagcagccccagcagcctgaatgaagacagcctgagcaccaccagcgagctgctgagcagccggcgggcccggcgcatccccaagctggtgcagaggatcaacagcatctacaatgccaagaggggcaagaagaggctgaagaagctgtccatgagcagcattgaaacagccagcctgagagatgaaaattctgagagcgagagtgacagtgatgaccgcttcaaggcccacacccagaggctggtgcacatccagagcatgctgaagagggcccccagctaccgcaccctggagctggagctgctggagtggcaggagcgggagctgctgagcaccctgtggtggtgccccagccgccgcagccaccgggagacccccaccagccccaagagccccaccagcttccccagaaatgtgctgagccctgccctgcacgtggccgccggcagcttctccttcctgcggctgtgcagcagcaggaccagcttcagaagatctgtgcagaccccagcctggagccccagccctgcccagctggccctgctggaccggcccaccaagcagatgagggaggccgaggagcggctgaaggccatcccccagttctgcttcccagatgccaaggactggctgcctgtgtctgagtacatgaggcccttcctgagctgctag

SEQ ID NO: 238224 - DNA, 219 bp, Artificial Sequence
  derived and/or modified sequence
atgaccatgacagccaacaagaacagcagcatcacccatggagctgggggcaccaaggccccccggggcaccctgagcaggaagagctttgaatttgaagatgccagcagcctgcagagcctgtaccccagcagccccacagaaaatggaacagagaaccagcccaagtttggcagcaagagcaccctggaggagaatgcctatgaagatattgtgtag

SEQ ID NO: 238225 - DNA, 2154 bp, Artificial Sequence
  derived and/or modified sequence
atgaccatgacagccaacaagaacagcagcatcacccatggagctgggggcaccaaggccccccggggcaccctgagcaggaagagctttgaatttgaagatgccagcagcctgcagagcctgtaccccagcagccccacagaaaatggaacagagaaccagcccaagtttggcagcaagagcaccctggaggagaatgcctatgaagatattgtgggggacctgcccaaggagaacccctatgaagatgtggacctgaagagcagaagagctggcaggaagagccagcagctgtctgagaacagcctggacagcctgcacaggatgtggagcccccaggacaggaagtacaacagcccccccacccagctgagcctgaagcccaacagccagagcctgcggagcggcaactggagcgagaggaagagccaccggctgccccggctgcccaagaggcacagccatgatgacatgctgctgctggcccagctgagcctgcccagcagccccagcagcctgaatgaagacagcctgagcaccaccagcgagctgctgagcagccggcgggcccggcgcatccccaagctggtgcagaggatcaacagcatctacaatgccaagaggggcaagaagaggctgaagaagctgtccatgagcagcattgaaacagccagcctgagagatgaaaattctgagagcgagagtgacagtgatgaccgcttcaaggcccacacccagaggctggtgcacatccagagcatgctgaagagggcccccagctaccgcaccctggagctggagctgctggagtggcaggagcgggagctgtttgagtactttgtggtggtgtccctgaagaagaagcccagcaggaacacctacctgcctgaggtgtcctaccagttccccaagctggaccggcccaccaagcagatgagggaggccgaggagcggctgaaggccatcccccagttctgcttcccagatgccaaggactggctgcctgtgtctgagtacagcagcgagaccttctccttcatgctgactggagaagatggcagcagaagatttggctactgccggcggctgctgcccagcggcaagggcccccggctgcctgaggtgtactgtgtgatcagccggctgggctgcttcggcctcttcagcaaggtgctggatgaggtggagcggcggcggggcatctctgctgccctggtgtaccccttcatgaggagcctgatggagagccccttccctgcccctgggaagaccatcaaggtgaagaccttcctgcccggggctggaaatgaggtgctggagctgcggcggcccatggacagccggctggagcacgtggactttgaatgtctcttcacctgcctgtctgtgcggcagctgatccgcatctttgccagcctgctgctggagaggagggtcatctttgtggccgacaagctgagcaccctgagcagctgcagccatgctgtggtggccctgctgtaccccttctcctggcagcacaccttcatccctgtgctgcctgcctccatgattgacatcgtgtgctgccccacccccttcctggtgggcctgctgagcagcagcctgcccaagctgaaggagctgcctgtggaggaggccctgatggtgaacctgggcagtgaccgcttcatccggcagatggatgatgaggacaccctgctgcccaggaagctgcaggccgccctggagcaggccctggagaggaagaatgagctgatcagccaggacagcgacagcgacagtgatgatgagtgcaacaccctgaatggcctggtgtctgaggtgttcatccgcttctttgtggagaccgtgggccactacagcctcttcctgacccagagcgagaagggggagcgggccttccagcgggaggccttcaggaagtctgtggccagcaagagcatccgccgcttcctggaggtgttcatggagagccagatgtttgctggcttcatccaggaccgggagctgaggaaatgtcgggccaagggcctgtttgagcagagggtggagcagtacctggaggagctgcctgacacagagcagagcggcatgaacaagttcctgcggggcctgggcaacaagatgaagttcctgcacaagaagaactag

SEQ ID NO: 238226 - DNA, 411 bp, Artificial Sequence
  derived and/or modified sequence
atgaccatgacagccaacaagaacagcagcatcacccatggagctgggggcaccaaggccccccggggcaccctgagcaggaagagctttgaatttgaagatgccagcagcctgcagagcctgtaccccagcagccccacagaaaatggaacagagaaccagcccaagtttggcagcaagagcaccctggaggagaatgcctatgaagatattgtgggggacctgcccaaggagaacccctatgaagatgtggacctgaagagcagaagagctggcaggaagagccagcagctgtctgagaacagcctggacagcctgcacaggatgtggagcccccaggacaggaagtacaacagcccccccacccagctgagcctgaagcccaacagccagagcctgcggtctggatag

SEQ ID NO: 238227 - DNA, 234 bp, Artificial Sequence
  derived and/or modified sequence
atgaccatgacagccaacaagaacagcagcatcacccatggagctgggggcaccaaggccccccggggcaccctgagcaggaagagctttgaatttgaagatgccagcagcctgcagagcctgtaccccagcagccccacagaaaatggaacagagaaccagcccaagtttggcagcaagagcaccctggaggagaatgcctatgaagatattgtgggggacctgcccaagtag

SEQ ID NO: 238228 - DNA, 1035 bp, Artificial Sequence
  derived and/or modified sequence
atgtggagcccccaggacaggaagtacaacagcccccccacccagctgagcctgaagcccaacagccagagcctgcggagcggcaactggagcgagaggaagagccaccggctgccccggctgcccaagaggcacagccatgatgacatgctgctgctggcccagctgagcctgcccagcagccccagcagcctgaatgaagacagcctgagcaccaccagcgagctgctgagcagccggcgggcccggcgcatccccaagctggtgcagaggatcaacagcatctacaatgccaagaggggcaagaagaggctgaagaagctgtccatgagcagcattgaaacagccagcctgagagatgaaaattctgagagcgagagtgacagtgatgaccgcttcaaggcccacacccagaggctggtgcacatccagagcatgctgaagagggcccccagctaccgcaccctggagctggagctgctggagtggcaggagcgggagctgtttgagtactttgtggtggtgtccctgaagaagaagcccagcaggaacacctacctgcctgaggtgtcctaccagttccccaagctggaccggcccaccaagcagatgagggaggccgaggagcggctgaaggccatcccccagttctgcttcccagatgccaaggactggctgcctgtgtctgagtacagcagcgagaccttctccttcatgctgactggagaagatggcagcagaagatttggctactgccggcggctgctgcccagcggcaagggcccccggctgcctgaggtgtactgtgtgatcagccggctgggctgcttcggcctcttcagcaaggtgctggatgaggtggagcggcggcggggcatctctgctgccctggtgtaccccttcatgaggagcctgatggagagccccttccctgcccctgggaagaccatcaaggtgaagaccttcctgcccggggctggaaatgaggtgctggagctgcggcggcccatggacagccggctggagcacgtgtag

SEQ ID NO: 238229 - DNA, 231 bp, Artificial Sequence
  derived and/or modified sequence
atgaccatgacagccaacaagaacagcagcatcacccatggagctgggggcaccaaggccccccggggcaccctgagcaggaagagctttgaatttgaagatgccagcagcctgcagagcctgtaccccagcagccccacagaaaatggaacagagaaccagcccaagtttggcagcaagagcaccctggaggagaatgcctatgaagatattgtgggggacctgccctag

SEQ ID NO: 238230 - DNA, 1263 bp, Artificial Sequence
  derived and/or modified sequence
atgaccagccggaagaacggcggcggcgcccacagctggcaggagacaccctgggagcaaagacgcgctctcggtttgcaacgggctgagatgactatgacagcgaacaagaattcaagcatcacccatggcgctggtggaaccaaagcacccagagggactctgtcaagaaaaagcttcgagttcgaggacgcctcctccctgcagtctctgtacccgtcctcccccaccgaaaatggtaccgaaaatcagcctaaattcggctcgaaatcaaccctggaagaaaatgcctacgaggatattgtgggcgacctccccaaggagaatccctacgaggacgtggatctgaagtctcgtcgggctggccgaaagtctcaacagctcagtgagaactcactggactcactgcaccggatgtggtctccccaagacaggaaatacaactcccctcccacccagttatcgctcaaaccaaacagccagagcctccgatcagggaactggtctgagagaaagagccacaggcttcccagactgcctaaacgccactctcacgacgatatgctgttgctcgcccaactcagtctgcccagtagcccaagctcactgaatgaggattcgctgagcacaacctccgaactgttaagttcacggcgagcccgtagaataccaaaactggttcaacggattaactccatctataatgcaaaacgcggtaagaaacgactgaaaaaactgtccatgtctagcatcgagaccgcatccctccgggatgagaacagcgaaagcgaaagcgacagcgacgatagattcaaagcccacacacagaggcttgtccacatccagtcaatgctgaaaagggcgcctagctataggaccctggaactcgaactgttggaatggcaagaacgcgaattgttgagcaccctttggtggtgtccctctagacgcagccaccgggagacccccacttcgcccaagtctccaacctcctttccaaggaacgttctgtcccccgccctacacgtcgcagccggctcgttttcgttcctgcgactgtgctcttcaaggacctcttttcgccgcagtgttcagacgcctgcctggtcaccgtctcccgcccagttggcacttctggacaggcccacaaagcaaatgcgagaggccgaggaacgactgaaggctatccctcaattttgtttcccagatgctaaggattggctacccgtgtctgaatacatgcgcccgtttctgagttgttag

SEQ ID NO: 238231 - DNA, 219 bp, Artificial Sequence
  derived and/or modified sequence
atgaccatgaccgccaacaagaacagcagcatcacccacggcgccggcggaaccaaggctccgagaggcacattaagcaggaagtctttcgagtttgaggacgccagcagtttgcagtcactctatccttcatctcccacagaaaatgggactgagaatcagccgaaattcggcagcaagtctactttggaggaaaacgcatatgaggatatagtgtag

SEQ ID NO: 238232 - DNA, 2154 bp, Artificial Sequence
  derived and/or modified sequence
atgaccatgaccgccaacaagaacagcagcatcacccacggcgccgggggcaccaaggccccacgcggtacattaagtcgaaaatccttcgaattcgaggatgcctcctccctgcagtcactgtatccttcaagcccaactgagaatggcacagagaaccagccaaaatttggaagtaagagtactcttgaagagaatgcctacgaagatatcgtgggtgaccttcctaaagaaaatccctacgaagacgttgacctgaagtccaggcgcgcaggtagaaaatctcaacaactctccgaaaacagcttagatagcttacaccgtatgtggagccctcaagaccgaaaatataacagtccacccacacagctgagccttaagccaaattcccagtcccttagatccggaaactggtccgagagaaagtcacacagattgccgagactgcctaaacgccattcacacgatgacatgcttctgctagcacaactgtccctgccctcaagcccatcctccttaaatgaggactcactctccaccacctccgagctgctctcctctagacgggccaggcgtatcccaaaacttgtccagagaatcaatagcatttataacgccaagagggggaaaaagcggctgaaaaagttgagtatgtctagtattgaaacggctagtctgagagacgagaattcagagtccgaaagtgactcagacgaccggtttaaggctcatactcagcgcctggtacacatacagtcaatgcttaagagggctccctcctatcggaccctggaactcgagctgttggagtggcaggaacgggaactgtttgaatattttgtggttgtttctctgaaaaaaaagcccagtcgcaacacctacctccccgaagtgagctatcagttccccaagctggacaggcccacaaagcagatgagggaggctgaggagagactaaaagccataccgcagttctgttttcctgacgccaaggactggctgccagtgtcagagtacagtagcgagacattctccttcatgctaactggcgaggatggctctcggcgatttggctactgtaggcgactcctgccgtcaggcaaggggcccaggctgccagaagtctactgcgtaatcagtcggctgggctgtttcgggctgttctctaaagtcctcgatgaagtcgagcggcgcagaggcatttctgcagccctggtttatccattcatgcggagcttgatggagagcccttttccggcacccgggaaaacaataaaggtcaaaacattcctacccggcgctggcaacgaagtcctggagttgaggcggcccatggactctcggctcgagcatgtagatttcgagtgtttgtttacctgcctgagtgtaaggcagttgattcgcatcttcgccagcctactcctggaaagaagagtcatttttgttgcagataagctgtcgacgttaagttcatgctcccatgcggtagtggccctcctgtaccctttttcttggcaacacacattcattccggttctaccggccagtatgatcgacattgtctgctgcccaaccccattcctggtagggctgctttccagcagccttccgaaactgaaggagttaccagtggaggaggccctgatggtgaacctgggatccgacagattcatcaggcaaatggatgatgaggatacgctcctgcctcgcaaactccaggccgctctggaacaggctctggagaggaagaatgaactcatatcccaagactccgactctgacagcgatgatgaatgtaacaccctgaacggacttgttagcgaagtgtttatcaggttcttcgtggaaaccgtaggccactattccttgtttcttacccaatccgaaaagggtgagagagccttccagagggaggcatttcgcaagtcagtggcttccaaatccatccggagatttctcgaagtatttatggagtcgcaaatgttcgccggcttcattcaagatcgggaactgaggaagtgtagagctaagggattatttgagcagcgggtcgaacaatatttggaggagctgcccgacactgaacagagtgggatgaacaaattcttgcgaggacttgggaacaagatgaaattcttacacaagaaaaattag

SEQ ID NO: 238233 - DNA, 2154 bp, Artificial Sequence
  derived and/or modified sequence
atgaccatgaccgccaacaagaacagcagcatcacccacggcgccggtggcacaaaagcccccaggggaacactctctcggaagagctttgaatttgaggacgctagctccctgcagtccctgtatccatcttccccaaccgagaatggcacggagaatcagccgaagttcgggtctaagtcgacactggaagagaacgcctatgaggacatcgtcggagacctgcccaaggagaatccttatgaagatgtggatcttaagagccggcgtgccggtcggaaaagccagcaactatccgagaactcactcgacagccttcataggatgtggagcccccaagatagaaaatacaactcaccacctacacagctgagtctgaagccaaactcacaatctttgcgctcaggtaactggtccgagagaaagagtcatagactgccccgcctgcccaaacggcactcccacgacgatatgctgttgctggcccagctttccttacccagtagtccctcctcactgaatgaggatagcttgtccactacatctgaacttctctcaagcaggcgcgctagaaggataccgaagcttgttcagcgtattaatagcatctacaatgcaaagagaggaaagaaacgcctcaaaaaactgtcaatgtcgtccatagaaacagcatcactgcgggacgagaattccgaatccgagagtgattcagatgacaggtttaaggcccacactcagagactggtccacattcagtccatgctcaagcgggcaccctcctacagaacgttagagttagagctgctagagtggcaggaacgggagctctttgagtacttcgtggttgtatctctgaaaaagaagccatcccgtaacacttacctgccggaggtgtcttatcagttccccaagctggacagaccgactaagcaaatgagagaagcagaggagagattaaaggcgataccccagttctgctttccggatgctaaggactggctcccagtgagtgagtattcttcggagacctttagcttcatgctgaccggagaggacgggtctagaaggttcggatactgcagacgcttacttccaagcgggaaagggcctcgtctgcctgaagtatattgcgtaataagtcgactggggtgctttggccttttttccaaggtgctggacgaagtggaaagaaggcgaggtatttctgccgcactggtgtaccccttcatgaggtctctgatggagtcgccattccctgcaccaggaaagacgattaaagtgaaaacatttctgcccggcgccggcaatgaggtactggagctacggcgtcccatggacagccggctggaacacgttgattttgagtgtcttttcacctgtctgagcgtgcgccaattaatccggatttttgcgtctttgcttctcgagaggcgcgtgatcttcgtggccgacaaactcagcactctttcttcttgctctcacgcggtggttgccctcctgtaccctttctcctggcagcacacatttataccggtgctcccggcttcgatgatagatatcgtctgctgtcccacccccttcctagtaggactgctgtcttcatccttgcccaagctgaaagaactccccgtggaggaagctcttatggttaacctgggcagcgatagattcatccgccagatggatgatgaggacacactgctgccgcgaaaacttcaggcagcgttggaacaggccctggagcggaagaatgagctgatcagccaggatagcgattccgatagcgatgatgagtgcaacactctcaacggactcgttagcgaagtattcataaggttctttgtagaaacagtgggtcattattctttgttccttacacagtcggaaaagggggagagagcattccagcgagaagcctttcggaaaagcgttgcctccaaaagtattcggagattcctcgaggtgttcatggaatctcaaatgttcgccggcttcatacaggaccgtgagttgcggaaatgtcgtgccaaaggcctgtttgagcagcgggtggagcaatatctcgaagaactgcctgataccgagcaaagcggaatgaacaagttcctccgggggcttggtaataaaatgaagttcttacacaagaagaactag

SEQ ID NO: 238234 - DNA, 411 bp, Artificial Sequence
  derived and/or modified sequence
atgaccatgaccgccaacaagaacagcagcatcacccacggcgccggcggaaccaaggctcctcgggggaccctgagccgaaaatcctttgaatttgaagatgcctctagccttcagtccctgtatccaagctctccaacggagaatggcaccgaaaaccagccgaaattcggaagtaaaagcacactggaggaaaatgcctatgaggatatcgttggcgacctaccaaaggaaaatccgtatgaggatgtcgacctcaagagccggagagctggaaggaagtctcagcagctgtccgagaatagcttggacagtttgcataggatgtggagcccccaggatagaaagtataatagtccacccacacaactctctctgaaaccaaacagccagagtcttcgatctggttag

SEQ ID NO: 238235 - DNA, 234 bp, Artificial Sequence
  derived and/or modified sequence
atgaccatgaccgccaacaagaacagcagcatcacccacggcgccggaggaacaaaggcccccagaggtacactgagccgaaagtccttcgagtttgaggacgcctccagtcttcagtcattgtacccctcttcgcccacagagaacggcacagagaatcagcccaagttcggctccaaaagtacgctggaggaaaatgcctatgaggacatcgtaggagacctgccaaagtag

SEQ ID NO: 238236 - DNA, 1035 bp, Artificial Sequence
  derived and/or modified sequence
atgtggagcccccaggaccggaagtacaacagcccccccacccagttatcgcttaagcccaatagccagagcctgcgttcagggaattggtcagagagaaagagccaccggttacctagactgcctaagcgacacagccacgacgatatgctcctcctcgcccagcttagtcttccctcatcaccaagctccctgaatgaagactcccttagcaccacaagcgagctgctcagctcgcggcgagcccggaggatccccaagttagttcagaggattaattcaatttacaacgctaagcgtggcaagaaaagactaaaaaaattatctatgtcttccattgaaacggcgagtttacgggatgaaaattccgaaagcgagagcgactcagatgaccgcttcaaggcccacacacagcgcctcgttcacattcagtcaatgttgaagcgcgctccttcatataggactttagaactcgagctgttagagtggcaggagagagagctgtttgagtacttcgtagtcgtgtcgctaaagaagaagccttctaggaatacatacctgcccgaggtgagctaccagttcccgaagctggatcgtcccactaaacagatgcgcgaggccgaggaacggcttaaagcgatccctcagttctgtttcccagatgcgaaagactggctgccagtgtcagagtacagcagtgagactttttcttttatgctgacgggtgaggatggtagcagaaggtttggatactgtcggcgcttactgccctcgggcaagggcccacggctccccgaagtgtactgtgtcatcagcaggcttgggtgttttggactgttcagcaaagtgctggacgaggtcgagcggaggcgaggcatctcagctgccctggtgtatccattcatgcgtagcctcatggagtcaccattccccgcccccggcaaaactataaaggtgaagacattcctccccggggctggaaacgaggtgctggaattgagacgaccaatggattccaggctggagcacgtgtag

SEQ ID NO: 238237 - DNA, 231 bp, Artificial Sequence
  derived and/or modified sequence
atgaccatgaccgccaacaagaacagcagcatcacccacggcgccgggggcacaaaagcacctcggggcacccttagccggaaatcgttcgagtttgaagacgcttccagccttcaaagcctttatccctcaagtcccacggagaacgggacggaaaaccagccaaagtttggctccaagagcaccctggaggagaacgcctacgaggacattgtcggggatctgccctag

SEQ ID NO: 238238 - DNA, 1263 bp, Artificial Sequence
  derived and/or modified sequence
atgacaagccggaagaacgggggaggagctcacagctggcaggagacaccctgggaacagcgcagggcgctgggccttcagagagccgagatgactatgacagccaataagaactcatctatcacgcatggtgccggaggtaccaaagcgccacgcggtaccctgtccagaaaatcctttgagttcgaagacgcctcatcccttcaatcactgtacccatcttccccaactgagaacggaaccgagaatcagcctaagtttgggagcaagtcaaccctggaggaaaatgcctatgaagacatcgtgggagatctgcccaaagagaacccatacgaggatgtggaccttaagtccaggagggcgggacggaaatcccaacaattgtctgagaatagcctggacagcctgcacaggatgtggagcccacaggatcgcaaatataattctcccccaacccagttaagcctgaagcccaattcccaaagcctgagaagcggcaattggagtgaaagaaagtcccaccggctgcctagacttccgaagcgacactcacatgatgacatgttactgttagcccagctcagcttgcctagttcgccttcctccttgaacgaggattctctcagtacaacttccgaattactgtccagccgccgtgcccgtagaatccccaaactggtgcagcgtatcaactctatctataacgcgaagcggggtaaaaagagactcaaaaaactctcaatgtcatccattgagacggcaagtctgagagatgagaatagcgagagcgagagtgactctgatgataggtttaaagctcacacacaacggctcgtccatatccagagcatgttaaaacgggcaccctcctatcgaactctcgagctcgagcttcttgagtggcaagagagagaactcctgagtaccttgtggtggtgtccgtcgagacggtctcaccgcgagactccaacctctccaaaatcccccacatctttccccagaaacgtacttagccccgcactgcacgttgccgcaggctctttctcgttcctgaggctctgctcctcaagaacttcttttaggaggtctgtccaaacccccgcatggtctccctctcctgcccaactggctctgctggacagacctaccaagcagatgcgggaggctgaagaaagattaaaagcgataccgcagttctgctttccagatgcaaaagattggctcccggtgagtgagtatatgcgacccttcctgtcctgttag

SEQ ID NO: 238239 - DNA, 219 bp, Artificial Sequence
  derived and/or modified sequence
atgacaatgacagccaacaaaaactcttcaataacacatggagcgggaggtacgaaggcacccagaggaactctgtcccgcaagtcgtttgagtttgaagacgcctcatctctacagtcattgtacccttcgtcaccaacggaaaatggaaccgagaatcaaccaaagttcgggagtaagagtaccctcgaggagaatgcctatgaggatatagtgtag

SEQ ID NO: 238240 - DNA, 2154 bp, Artificial Sequence
  derived and/or modified sequence
atgactatgacagccaacaagaacagttctatcacccatggcgcagggggaacgaaggccccaagaggaactctctcacggaagtcctttgagttcgaggacgcgtcgtcgcttcagagcctctacccctcctctcccacagaaaacggcacagagaaccagcctaagtttggttccaagagcacacttgaggagaatgcttatgaagatatcgtgggcgacctacccaaggaaaacccttacgaagatgtagatctgaaatcacgcagggcaggcagaaaatctcagcagttgagcgaaaacagtctggactcactccatcgcatgtggtcaccccaagatcggaaatataactcccctccaactcaattgtcactcaagccaaatagccaatccctgagatcaggaaactggtcggaacgcaagagtcaccgattgccaaggttgccgaagaggcactctcacgatgatatgctgttactggcccagcttagtctgccatcgagcccaagtagtctgaatgaagattcactgtcaactaccagcgaactgctctcctctcgtagagccagacggattcctaagcttgtgcagcgcataaattccatttataacgccaagaggggcaagaaacgactgaaaaaactgtccatgagttcgatcgaaaccgcttccctgagggacgaaaatagcgaatccgagtcggactccgacgatcgcttcaaggcccatacgcagcggcttgtgcatatccagagcatgcttaagcgtgccccaagctatcgtacactcgaactggaactgctggagtggcaggaacgtgagctgtttgagtatttcgtggtggtttccctgaaaaaaaagccaagtcgcaacacctacctccccgaagtctcatatcagtttcccaagttggacagacctacaaaacaaatgcgtgaggctgaagagcgattgaaggccatccctcaattctgtttccccgatgcaaaggactggcttccagtatccgagtattcaagcgagacatttagtttcatgctgacaggcgaggacgggtcaaggagattcggatattgtcgcaggctcctacctagcggaaaaggccctagactgccagaggtatattgtgttattagccgactgggatgttttggtctgttttctaaggtcctagatgaggtcgagcggcgtcgcggaattagtgctgccctcgtttatccctttatgcggagtttgatggagtcaccgtttcccgctcccggtaagactatcaaggtgaagactttccttccgggtgcgggaaacgaggtgctggagctgcgacgccctatggattcgaggctggaacatgtggacttcgaatgtttgttcacctgtctgagcgtgcggcagctgataagaatctttgcctctctcctgctcgaacggagagttatcttcgttgccgacaagctctcgacactcagtagctgttcccacgccgtcgtggcactcctctacccatttagttggcaacacacttttatccccgttctgcctgcttccatgatcgacattgtgtgttgccccaccccttttttagtggggcttctcagctcgagccttcctaaactaaaagaattgcccgtagaggaggctcttatggttaacctcggttccgacaggttcatccgccagatggacgatgaggacaccctgcttccgagaaaacttcaggctgcactagagcaggccctggagcgcaaaaatgaactcattagtcaggactccgacagcgattcagatgatgaatgtaacactctcaacggtttggtgtccgaagtgtttatccggttctttgtcgaaacagtggggcactactctctttttttgacgcagtctgagaagggagaacgagcctttcagcgggaggccttccgcaagtcagtcgcttctaaatctatccgacgcttcctcgaggtatttatggagtctcagatgttcgcgggatttattcaggatcgcgagctacggaagtgtcgggcaaaaggactgttcgaacagcgggtcgaacagtacctggaggagctgccagatactgaacagagtggaatgaacaagtttctaagaggactggggaataagatgaagttcttacataagaagaattag

SEQ ID NO: 238241 - DNA, 2154 bp, Artificial Sequence
  derived and/or modified sequence
atgacaatgaccgctaacaagaattcctcgataactcacggtgctggcggtaccaaagccccaagaggcactctcagtaggaaatcctttgagtttgaagacgccagtagcctccagtcactctatccctcatcccccacagagaatgggacggaaaaccagcctaagtttggcagtaagtctactttggaggagaatgcatacgaggatatagtcggcgacctgcccaaggagaatccatatgaagacgtcgaccttaaatcaaggcgcgctggaagaaaaagccagcaactgagcgaaaactcacttgactcccttcaccggatgtggagtccgcaagaccgaaagtataacagccctccaacccagctgtcacttaagcctaattcacagtccctacgcagcggcaactggagcgagagaaaatcccatcggcttcccagactccccaagagacatagccatgatgatatgttacttctggctcagctcagtctccctagcagtccaagtagtctaaacgaggatagtctgagtactactagtgagctcttgagcagcaggcgagctcgccgaattccaaaactcgtgcagagaataaatagcatttacaatgcgaagagaggtaagaagcgcctgaagaagctgtcaatgtcatctattgaaactgctagtctgagagacgaaaacagcgagtccgagagtgactccgatgaccgcttcaaagctcacacccagcggttggtacatatccaatcaatgctcaaaagggcccctagttaccggacacttgagctcgaattattagaatggcaggaaagagagctgttcgagtattttgtggtggtgtcactgaagaagaagccttcgcggaatacctacctgcctgaagtgagctatcagtttccaaaactcgacaggcccacgaagcagatgagagaagcggaagaacgcctcaaagcgattccccagttttgctttcctgatgctaaggattggttaccagtgtctgagtatagctccgagacattcagttttatgttgacaggagaggatggctcacggaggttcggatactgccgcagactactcccctcgggcaaggggcctcgcttaccagaggtctactgtgtgatttctcgactgggctgtttcggacttttctcaaaggtcctggatgaggtggagcggaggaggggaattagcgccgctttggtttacccatttatgcggtccctgatggagtcgccttttcccgcacccggtaaaaccatcaaagttaagacattcctgcccggagctggaaatgaagttctggagcttcgaagaccaatggattcaaggctggagcacgtggattttgagtgcctgtttacgtgcctaagtgtgcgccaattaatccgaatctttgcaagtcttctgctggagcgcagggtcatttttgtggccgataagttgtctactctgtcctcctgttctcacgccgtggtcgcgctgctctaccctttttcatggcaacataccttcatccccgtcctcccagcttctatgattgacatcgtttgttgtcccaccccctttctggtgggcttgctttcttcatccctgcctaaattgaaggagcttcccgttgaagaggccctaatggtcaacttgggttccgaccggttcatcaggcagatggatgatgaagacactcttctcccaagaaagctgcaggccgctctggaacaagctcttgagaggaagaatgagctgatctctcaggattccgattccgactccgacgatgagtgtaatacccttaacggcttggtgtctgaagtgttcatacggttcttcgtggaaactgtcggtcactattccttgttccttacgcagtccgagaaaggagagcgagccttccagagagaagcattcaggaaaagtgtggcttctaagtccatcagaagattcctcgaagttttcatggagagtcaaatgtttgctgggtttatccaggaccgggaactgagaaagtgtagagcaaagggcctatttgaacagcgtgtcgaacagtacctggaggaactacccgatacagaacaatcaggaatgaataaattcctgcgtgggctagggaataaaatgaaattcttacataagaagaattag

SEQ ID NO: 238242 - DNA, 411 bp, Artificial Sequence
  derived and/or modified sequence
atgaccatgaccgcaaacaagaacagtagtatcacacacggcgctggcggtaccaaagctcccaggggcaccctgtctagaaagtcatttgagttcgaggacgcaagctccctccaaagcctttatccatccagtccgacagagaacgggacagagaaccaaccgaaatttggcagtaaaagcaccctcgaagaaaatgcatacgaagatatagtcggtgatctgcccaaggaaaacccatacgaagatgtggacctcaagagtagaagggccggacgcaagagccagcaattaagtgaaaactctctggactccctgcaccgaatgtggagccctcaagataggaagtataactcccccccaacccagctgtccttgaagccaaacagccagtctctgcgctctggatag

SEQ ID NO: 238243 - DNA, 234 bp, Artificial Sequence
  derived and/or modified sequence
atgaccatgactgcaaataagaattcaagcatcacccacggagctggtggtactaaagctcccagaggtacactcagtcgcaagtcctttgaattcgaggacgccagtagcctgcaaagtctgtatcccagcagtcctactgaaaatggcacagaaaatcagcccaagttcggcagcaaaagcaccctggaggaaaatgcctacgaagatatcgtcggtgacttgccaaaatag

SEQ ID NO: 238244 - DNA, 1035 bp, Artificial Sequence
  derived and/or modified sequence
atgtggagccctcaggaccggaagtacaactcccccccaacacaactcagcctgaaaccaaatagccagtcactcagatccgggaactggtccgagcggaaatcccataggctgccacgcctgcccaaaagacattcccacgacgatatgctgcttttggcgcagttgtcccttccttcttcaccgtcatctcttaacgaggacagcctgtcaacgacaagcgagttattgtcctcaaggcgagctagaagaattccgaagctcgtacagcgcatcaacagtatatataatgccaagagaggcaagaagagactgaagaagctgtcgatgtcttcaatcgagactgcctcactgagggatgagaattccgagagcgaatcagattctgacgaccgcttcaaggcacatacacagcgtctggtgcacatccagtctatgctgaaacgagctccgtcatacaggacattggagctggaattactcgagtggcaggagagggagttatttgagtacttcgtcgtggtgagtctcaagaagaaaccaagtcgtaacacctatctccccgaagtttcatatcagttcccaaaattggacaggccaacaaagcagatgagagaggccgaagagaggctgaaggccatcccccagttttgctttccagatgctaaagattggctgccagtttccgagtactcctccgaaacattcagcttcatgctcaccggagaggatggttcccgccgttttggttattgcaggaggctacttcccagcggaaaaggcccaaggttacccgaggtatattgcgttataagtagactcggatgtttcggactgttctcaaaggtgctagacgaggtggagcggagacgcggtattagtgctgccctggtgtatccttttatgcgctcgctgatggagtctccctttccagctcccggtaagacaataaaagtcaagactttcctccctggcgcagggaatgaagttctggaactgaggaggccaatggacagccggctcgagcacgtatag

SEQ ID NO: 238245 - DNA, 231 bp, Artificial Sequence
  derived and/or modified sequence
atgaccatgacagcgaataagaattcaagcattacgcatggcgctgggggtacaaaggccccaagaggcacactctcaaggaagtcattcgagttcgaggacgcctcgtcgctgcaaagtctttacccctcgagtccgacggagaatggaacagagaatcagcccaaattcggctcgaagtccactttagaggagaacgcatacgaggacatcgtcggcgatctgccctag

SEQ ID NO: 238246 - DNA, 1411 bp, Artificial Sequence
  derived and/or modified sequence
attatgacttcaaggaagaatggaggtggggcgcatagctggcaagaaaccccgtgggaacaaagaagggctctgggtttgcagagagccgaaatgaccatgactgccaacaagaattccagcatcacccacggagctggtggcactaaagcccctcgggggactctgagcagaaaatcctttgagtttgaggatgcatccagtctccagtccctgtacccctcttctcccactgagaatggtactgagaaccaacccaagtttggatccaaaagcactttagaagaaaatgcctatgaagatattgtgggagatctgcccaaggagaatccatatgaggatgtggacttaaagagccgaagagcaggacgaaaatcccagcaactgtctgagaactccttggactctttgcacaggatgtggagtcctcaggacaggaagtacaacagcccgcccacacagctttccctgaaacccaacagccagtccctgcgcagtgggaactggtcagaaaggaagagccaccggctgccacgattacccaagaggcacagccatgacgacatgctgctgctggctcagctgagtctgccgtcctcaccctccagcctcaatgaagacagcctcagcaccaccagcgagctgctgtccagccgccgggcccgccgcattcccaagcttgtccaaagaattaactccatctacaatgccaagagaggaaagaagagattaaaaaagttgtctatgtccagcattgaaacagcatcactgagagatgaaaacagtgagagcgagagcgactctgatgacaggttcaaagcccacacacagcgcctggtccacatccagtcgatgctgaagcgcgcccccagctatcgcacgctggagctggagctgctggagtggcaggagcgggagcttttgagtactttgtggtggtgtccctcaagaagaagccatcgcgaaacacctacctccccgaagtctcctaccagtttcccaaggaatgtgctttctccagctcttcacgtggctgctggctccttctcatttctcaggctctgctcaagtaggacctctttcaggaggtctgtccagacacctgcatggagcccctcccctgcccagcttgctctgctggaccgacccaccaagcagatgcgagaggcagaggaaaggctcaaagccattccccagttttgcttccctgatgccaaggactggcttcctgtgtcagagtatatgagaccttttctttcatgctgactggggaagatggcagcagacgctttggctactgcaggcgcttactgccaagtgggaaagggccccggttgccagaggtgtactgtgtcatcagccgccttggctgcttcggcttgttttccaaggtcctagatgaggtggagcg

SEQ ID NO: 238247 - DNA, 600 bp, Artificial Sequence
  derived and/or modified sequence
agcccggggcgcggatgcctgcccgccgcccgccctctctgcaggagcggctcctcctccgggccgcgcggctcccggcgagaccccatccaggcgccgcgcccggcccggctggggaacgcagaggaagatgagagactgcttaggcgccaccactagtaccatgagtccctgcactggttaaagccatcgccacaacctggacaggcagcaagaaaatcctttgagtttgaggatgcatccagtctccagtccctgtacccctcttctcccactgagaatggtactgagaaccaacccaagtttggatccaaaagcactttagaagaaaatgcctatgaagatattgtgggagatctgcccaaggagaatccatatgaggatgtggacttaaagagccgaagagcaggacgaaaatcccagcaactgtctgagaactccttggactctttgcacaggatgtggagtcctcaggacaggaagtacaacagcccgcccacacagctttccctgaaacccaacagccagtccctgcgcagtgggaactggtcagaaaggaagagccaccggctgccacgattacccaagaggcacagccat

SEQ ID NO: 238248 - DNA, 559 bp, Artificial Sequence
  derived and/or modified sequence
tcccggcgagaccccatccaggcgccgcgcccggcccggctggggaacgcagagatttcacaccctttggagagtttctttcttggataattcagggtcttgctgtgttgctcgggctgctcttgaactcctgggctcaaacagtcctcttgcctcagcctcccaacgtgctgggattacgggagcaagccaccccactgtgtgcagcccagaagttgagcctgagaggaagatgagagactgcttaggcgccaccactagtaccatgagtccctgcactggttaaagccatcgccacaacctggacaggcagcaagggctctgggtttgcagagagccgaaatgaccatgactgccaacaagaattccagcatcacccacggagctggtggcactaaagcccctcgggggactctgagcagaaaatcctttgagtttgaggatgcatccagtctccagtccctgtacccctcttctcccactgagaatggtactgagaaccaacccaagtttggatccaaaagcactttagaagaaaatgcctatgaagatattgtgg

SEQ ID NO: 238249 - DNA, 3019 bp, Artificial Sequence
  derived and/or modified sequence
tttcaggaagatgagagactgcttaggcgccaccactagtaccatgagtccctgcactggttaaagccatcgccacaacctggacaggcagcaagggctctgggtttgcagagagccgaaatgaccatgactgccaacaagaattccagcatcacccacggagctggtggcactaaagcccctcgggggactctgagcagaaaatcctttgagtttgaggatgcatccagtctccagtccctgtacccctcttctcccactgagaatggtactgagaaccaacccaagtttggatccaaaagcactttagaagaaaatgcctatgaagatattgtgggagatctgcccaaggagaatccatatgaggatgtggacttaaagagccgaagagcaggacgaaaatcccagcaactgtctgagaactccttggactctttgcacaggatgtggagtcctcaggacaggaagtacaacagcccgcccacacagctttccctgaaacccaacagccagtccctgcgcagtgggaactggtcagaaaggaagagccaccggctgccacgattacccaagaggcacagccatgacgacatgctgctgctggctcagctgagtctgccgtcctcaccctccagcctcaatgaagacagcctcagcaccaccagcgagctgctgtccagccgccgggcccgccgcattcccaagcttgtccaaagaattaactccatctacaatgccaagagaggaaagaagagattaaaaaagttgtctatgtccagcattgaaacagcatcactgagagatgaaaacagtgagagcgagagcgactctgatgacaggttcaaagcccacacacagcgcctggtccacatccagtcgatgctgaagcgcgcccccagctatcgcacgctggagctggagctgctggagtggcaggagcgggagctttttgagtactttgtggtggtgtccctcaagaagaagccatcgcgaaacacctacctccccgaagtctcctaccagtttcccaagctggaccgacccaccaagcagatgcgagaggcagaggaaaggctcaaagccattccccagttttgcttccctgatgccaaggactggcttcctgtgtcagagtatagcagtgagaccttttctttcatgctgactggggaagatggcagcagacgctttggctactgcaggcgcttactgccaagtgggaaagggccccggttgccagaggtgtactgtgtcatcagccgccttggctgcttcggcttgttttccaaggtcctagatgaggtggagcgccggcgtgggatctccgctgcattggtctatcctttcatgagaagtctcatggagtcgcccttcccagccccagggaagaccatcaaagtgaagacattcctgccaggtgctggcaatgaggtgttagagctgcggcggcccatggactcaaggctggagcacgtggactttgagtgcctttttacctgcctcagtgtgcgccagctcatccgaatctttgcctcactgctgctggagcgccgggtcatttttgtggcagataagctcagtaccctctccagctgctcccacgcggtggtggccttgctctaccccttctcctggcagcacaccttcattcctgtcctcccggcctccatgattgacatcgtctgctgtcccacccccttcctggttggcctgctctccagctccctccccaaactgaaggagctgcctgtggaggaggcgctgatggtgaatctgggatctgaccgattcatccgacagatggacgacgaagacacgttgttacctaggaagttacaggcagctctggagcaggctctggagaggaagaatgagctgatctcccaggactctgacagcgactccgacgatgaatgtaataccctcaatgggctggtgtcggaggtgtttatccggttctttgtggagaccgttgggcactactccctctttctgacacagagtgagaagggagagagggcctttcagcgagaggccttccgcaaatctgtggcctccaaaagcatccgccgctttcttgaggtttttatggagtctcagatgtttgctggcttcatccaagacagggagctaagaaagtgtcgggcaaagggcctttttgagcagcgagtggagcagtacttagaagaactcccagacactgagcagagtggaatgaataagtttctccgaggtttgggcaacaaaatgaagtttctccacaagaagaattaagcctccttctcagtagcagagtccagtgccttgcagagcctgaagcctggggagaaggcccagcctgggaccctctgggctgctgtggctcctctgcccccacagatcctatcctccaagccagcccacctctgccttcatcatatcccaggatactgtttgtaaataatctgctgtaagctttcttaactgttttttgtaacaagcaaagagaatatggcaaatatttgtatattcccaaggggccgggtgctttcctgtcctgccagagcatggatgaagtttcgctgggtgctcgtgactggccagttttgtgcagctgactgtctcagccaaaccactgatcttccctggaggccttcggcctgcctgcctgcctgaggtccccgctgccagtcccgggccctggagagcagatgctgtcttgttatgtacaggaggaccttttaaaaaaatcaagtttctattttttgctggtagtccgcatacccataccctctgtttttgaaaggcaaaggccaatcagtccccatttgtagcatggcaccagggtcttaggcctagtcctctcattcctcccaccctccgagatggtcagtgtgtcatgggaagcccacccccagctctgccagtgctctctgggcctggctcccagtcagtggtggccacgatgcggtacagggcatccctccttcccatctacgggtgttctcaataaacaatgtacagttgtttgggcccagag

SEQ ID NO: 238250 - DNA, 940 bp, Artificial Sequence
  derived and/or modified sequence
acttggctgcgaggagcgccacgaaaggtcagaggaaggagctgtgggaagctcgcagcaggtatcggagcttaagccagtggatttgggggccctgggctccctagccggctgcggtgtgagaatggagtgggcaggaaagcagcgggactttcagaaaatcctttgagtttgaggatgcatccagtctccagtccctgtacccctcttctcccactgagaatggtactgagaaccaacccaagtttggatccaaaagcactttagaagaaaatgcctatgaagatattgtgggagatctgcccaaggagaatccatatgaggatgtggacttaaagagccgaagagcaggacgaaaatcccagcaactgtctgagaactccttggactctttgcacaggatgtggagtcctcaggacaggaagtacaacagcccgcccacacagctttccctgaaacccaacagccagtccctgcgcagtgggaactggtcagaaaggaagagccaccggctgccacgattacccaagaggcacagccatgacgacatgctgctgctggctcagctgagtctgccgtcctcaccctccagcctcaatgaagacagcctcagcaccaccagcgagctgctgtccagccgccgggcccgccgcattcccaagcttgtccaaagaattaactccatctacaatgccaagagaggaaagaagagattaaaaaagttgtctatgtccagcattgaaacagcatcactgagagatgaaaacagtgagagcgagagcgactctgatgacaggttcaaagcccacacacagcgcctggtccacatccagtcgatgctgaagcgcgcccccagctatcgcacgctggagctggagctgctggagtggcaggagcgggagctttttgagtactttgtggtggtgtccctcaagaagaa

SEQ ID NO: 238251 - DNA, 2679 bp, Artificial Sequence
  derived and/or modified sequence
gaagaaaacaagtccactcactgtcttctcccttctcccctctgagctgttcaagcaagttcccaggagcagttcagagcccctgttggactggaagggaggtaggaggagtggaatgcatgcaaaaaccgagctgatcaaaagacagtgctgtttcatggaagcctcccagaactgagagagagagagagagagagagagagagagagacagtgagaaagaaagaaaaagagagcgcccttgtgcacgcgctaggccaagagcgcgccgctgtgcgcgcgcccgcctagcgaggacagggtctccatgacaaccggcctggccggctagcagtgctctgctcacttggctgcgaggagcgccacgaaaggtcagaggaaggagctgtgggaagctcgcagcaggtatcggagcttaagccagtggatttgggggccctgggctccctagccggctgcggtgtgagaatggagtgggcaggaaagcagcgggactttcagggctctgggtttgcagagagccgaaatgaccatgactgccaacaagaattccagcatcacccacggagctggtggcactaaagcccctcgggggactctgagcagaaaatcctttgagtttgaggatgcatccagtctccagtccctgtacccctcttctcccactgagaatggtactgagaaccaacccaagtttggatccaaaagcactttagaagaaaatgcctatgaagatattgtgggagatctgcccaaggagaatccatatgaggatgtggacttaaagagccgaagagcaggacgaaaatcccagcaactgtctgagaactccttggactctttgcacaggatgtggagtcctcaggacaggaagtacaacagcccgcccacacagctttccctgaaacccaacagccagtccctgcgcagtgggaactggtcagaaaggaagagccaccggctgccacgattacccaagaggcacagccatgacgacatgctgctgctggctcagctgagtctgccgtcctcaccctccagcctcaatgaagacagcctcagcaccaccagcgagctgctgtccagccgccgggcccgccgcattcccaagcttgtccaaagaattaactccatctacaatgccaagagaggaaagaagagattaaaaaagttgtctatgtccagcattgaaacagcatcactgagagatgaaaacagtgagagcgagagcgactctgatgacaggttcaaagcccacacacagcgcctggtccacatccagtcgatgctgaagcgcgcccccagctatcgcacgctggagctggagctgctggagtggcaggagcgggagctttttgagtactttgtggtggtgtccctcaagaagaagccatcgcgaaacacctacctccccgaagtctcctaccagtttcccaagctggaccgacccaccaagcagatgcgagaggcagaggaaaggctcaaagccattccccagttttgcttccctgatgccaaggactggcttcctgtgtcagagtatagcagtgagaccttttctttcatgctgactggggaagatggcagcagacgctttggctactgcaggcgcttactgccaagtgggaaagggccccggttgccagaggtgtactgtgtcatcagccgccttggctgcttcggcttgttttccaaggtcctagatgaggtggagcgccggcgtgggatctccgctgcattggtctatcctttcatgagaagtctcatggagtcgcccttcccagccccagggaagaccatcaaagtgaagacattcctgccaggtgctggcaatgaggtgttagagctgcggcggcccatggactcaaggctggagcacgtggactttgagtgcctttttacctgcctcagtgtgcgccagctcatccgaatctttgcctcactgctgctggagcgccgggtcatttttgtggcagataagctcagtaccctctccagctgctcccacgcggtggtggccttgctctaccccttctcctggcagcacaccttcattcctgtcctcccggcctccatgattgacatcgtctgctgtcccacccccttcctggttggcctgctctccagctccctccccaaactgaaggagctgcctgtggaggaggcgctgatggtgaatctgggatctgaccgattcatccgacagatggacgacgaagacacgttgttacctaggaagttacaggcagctctggagcaggctctggagaggaagaatgagctgatctcccaggactctgacagcgactccgacgatgaatgtaataccctcaatgggctggtgtcggaggtgtttatccggttctttgtggagaccgttgggcactactccctctttctgacacagagtgagaagggagagagggcctttcagcgagaggccttccgcaaatctgtggcctccaaaagcatccgccgctttcttgaggtttttatggagtctcagatgtttgctggcttcatccaagacagggagctaagaaagtgtcgggcaaagggcctttttgagcagcgagtggagcagtacttagaagaactcccagacactgagcagagtggaatgaataagtttctccgaggtttgggcaacaaaatgaagtttctccacaagaagaattaa

SEQ ID NO: 238252 - DNA, 588 bp, Artificial Sequence
  derived and/or modified sequence
ttgactttcacttccccaggcctcagtgcctcttcccacagaggctgggttttctccttgttgctgcctgagcaggtgaccttgggatggttcccacagagcagtgtggctccaggcactgccctttgctgtctacttcagcacctgtggcttcagggctctgggtttgcagagagccgaaatgaccatgactgccaacaagaattccagcatcacccacggagctggtggcactaaagcccctcgggggactctgagcagaaaatcctttgagtttgaggatgcatccagtctccagtccctgtacccctcttctcccactgagaatggtactgagaaccaacccaagtttggatccaaaagcactttagaagaaaatgcctatgaagatattgtgggagatctgcccaaggagaatccatatgaggatgtggacttaaagagccgaagagcaggacgaaaatcccagcaactgtctgagaactccttggactctttgcacaggatgtggagtcctcaggacaggaagtacaacagcccgcccacacagctttccctgaaacccaacagccagtccctgcgcagtgg

SEQ ID NO: 238253 - DNA, 502 bp, Artificial Sequence
  derived and/or modified sequence
gggccatgagggctccaccctcatgaatggattaatgctgtcattgctagagtttgtttctgataaaaacaagtccggccccctcctgccctctctctcttttgtgtgtactgttgtgcccttctgcctttctgctatgggatgatgcaggaagaaggcccgcaccagattcagccatcaatcttaagacttccaagcctctggaaccgtaagaaataaatcctcacttcattagcataaattcagggctctgggtttgcagagagccgaaatgaccatgactgccaacaagaattccagcatcacccacggagctggtggcactaaagcccctcgggggactctgagcagaaaatcctttgagtttgaggatgcatccagtctccagtccctgtacccctcttctcccactgagaatggtactgagaaccaacccaagtttggatccaaaagcactttagaagaaaatgcctatgaagatattgtgggagatctgcccaag

SEQ ID NO: 238254 - DNA, 1309 bp, Artificial Sequence
  derived and/or modified sequence
gtagcctccccactgcagacgggcagctgcatgactcatgagctgaggggccaggcagaagccattctctttggttcacaggaattctgcttgtttatttgtgtgtgtgtgagttcgtgtgtttccttcttcccttctcccccttctctaactcttcctcctctgcaggagatctgcccaaggagaatccatatgaggatgtggacttaaagagccgaagagcaggacgaaaatcccagcaactgtctgagaactccttggactctttgcacaggatgtggagtcctcaggacaggaagtacaacagcccgcccacacagctttccctgaaacccaacagccagtccctgcgcagtgggaactggtcagaaaggaagagccaccggctgccacgattacccaagaggcacagccatgacgacatgctgctgctggctcagctgagtctgccgtcctcaccctccagcctcaatgaagacagcctcagcaccaccagcgagctgctgtccagccgccgggcccgccgcattcccaagcttgtccaaagaattaactccatctacaatgccaagagaggaaagaagagattaaaaaagttgtctatgtccagcattgaaacagcatcactgagagatgaaaacagtgagagcgagagcgactctgatgacaggttcaaagcccacacacagcgcctggtccacatccagtcgatgctgaagcgcgcccccagctatcgcacgctggagctggagctgctggagtggcaggagcgggagctttttgagtactttgtggtggtgtccctcaagaagaagccatcgcgaaacacctacctccccgaagtctcctaccagtttcccaagctggaccgacccaccaagcagatgcgagaggcagaggaaaggctcaaagccattccccagttttgcttccctgatgccaaggactggcttcctgtgtcagagtatagcagtgagaccttttctttcatgctgactggggaagatggcagcagacgctttggctactgcaggcgcttactgccaagtgggaaagggccccggttgccagaggtgtactgtgtcatcagccgccttggctgcttcggcttgttttccaaggtcctagatgaggtggagcgccggcgtgggatctccgctgcattggtctatcctttcatgagaagtctcatggagtcgcccttcccagccccagggaagaccatcaaagtgaagacattcctgccaggtgctggcaatgaggtgttagagctgcggcggcccatggactcaaggctggagcacgtgga

SEQ ID NO: 238255 - DNA, 583 bp, Artificial Sequence
  derived and/or modified sequence
gtcacataatatccagtgcgtcctccctggcactccgattctcagtagtcatgaaccagctggcttctatatctctcaccaatcacaggtaatttaggtctccctcagggtcttgctgtgttgctcgggctgctcttgaactcctgggctcaaacagtcctcttgcctcagcctcccaacgtgctgggattacgggagcaagccaccccactgtgtgcagcccagaagttgagcctgagaggaagatgagagactgcttaggcgccaccactagtaccatgagtccctgcactggttaaagccatcgccacaacctggacaggcagcaagggctctgggtttgcagagagccgaaatgaccatgactgccaacaagaattccagcatcacccacggagctggtggcactaaagcccctcgggggactctgagcagaaaatcctttgagtttgaggatgcatccagtctccagtccctgtacccctcttctcccactgagaatggtactgagaaccaacccaagtttggatccaaaagcactttagaagaaaatgcctatgaagatattgtgggagatctgccc

SEQ ID NO: 238256 - DNA, 1155 bp, Artificial Sequence
  derived and/or modified sequence
atgaccagcttccaccccagaggcctgcaggccgccagagcccagaagttcaagagcaagagacccagaagcaacagcgactgcttccaggaggaggacctgagacagggcttccagtggagaaagagcctgcccttcggcgccgccagcagctacctgaacctggagaagctgggcgagggcagctacgccaccgtgtacaagggcatcagcagaatcaacggccagctggtggccctgaaggtgatcagcatgaacgccgaggagggcgtgcccttcaccgccatcagagaggccagcctgctgaagggcctgaagcacgccaacatcgtgctgctgcacgacatcatccacaccaaggagaccctgaccttcgtgttcgagtacatgcacaccgacctggcccagtacatgagccagcaccccggcggcctgcacccccacaacgtgagactgttcatgttccagctgctgagaggcctggcctacatccaccaccagcacgtgctgcacagagacctgaagccccagaacctgctgatcagccacctgggcgagctgaagctggccgacttcggcctggccagagccaagagcatccccagccagacctacagcagcgaggtggtgaccctgtggtacagaccccccgacgccctgctgggcgccaccgagtacagcagcgagctggacatctggggcgccggctgcatcttcatcgagatgttccagggccagcccctgttccccggcgtgagcaacatcctggagcagctggagaagatctgggaggtgctgggcgtgcccaccgaggacacctggcccggcgtgagcaagctgcccaactacaaccccgagtggttccccctgcccacccccagaagcctgcacgtggtgtggaacagactgggcagagtgcccgaggccgaggacctggccagccagatgctgaagggcttccccagagacagagtgagcgcccaggaggccctggtgcacgactacttcagcgccctgcccagccagctgtaccagctgcccgacgaggagagcctgttcaccgtgagcggcgtgagactgaagcccgagatgtgcgacctgctggccagctaccagaagggccaccaccccgcccagttcagcaagtgctggtag

SEQ ID NO: 238257 - DNA, 1155 bp, Artificial Sequence
  derived and/or modified sequence
atgacctcttttcacccccgtggcttacaagctgctagggcgcagaaattcaaatcaaagcgaccacggagtaattcagactgctttcaggaggaggatctgcgccagggcttccaatggagaaaatctctgccatttggcgctgctagttcgtatctgaatctggagaaactgggggagggctcatacgccacggtgtacaagggaatcagtaggatcaacgggcagctggtggctctcaaagtgatatcaatgaacgccgaagagggagtgccttttactgctatccgggaggctagcttattgaagggcctgaagcatgcaaacattgtactgttacatgatataattcatacgaaagaaacactgaccttcgtgtttgagtatatgcacactgatctggctcaatatatgtctcagcatcccgggggcttacacccccacaacgttaggctgttcatgttccagctcctgagaggcctggcatacatccatcatcagcacgtgctgcatcgcgacttaaagccccagaatctgcttattagccatttgggggagctgaagctggccgacttcggtctggccagggcaaaatctattccatcacagacctatagcagcgaggtggttacgctatggtatagaccccccgatgcccttcttggagcaacagagtactctagcgaacttgacatctggggtgcaggttgcatctttattgaaatgtttcagggtcagcccctgtttcctggcgtgtcaaacatattagaacagctggaaaaaatatgggaagtgctcggggtacccacagaggacacctggcccggcgtctcgaaactgccaaattacaacccagaatggtttccgctccccactccaaggtcattacacgtcgtctggaatcgtctgggaagggtcccggaagcggaagatcttgctagtcaaatgctgaaaggctttccgcgggaccgtgtgtctgcgcaggaggcattagtacacgactatttttcagctctcccatcacagctctatcagctacccgacgaagagagcctgtttacagtttcgggggttcgactcaaaccggagatgtgtgacctgctggcttcataccaaaagggccatcaccccgcacaattttccaagtgctggtag

SEQ ID NO: 238258 - DNA, 1155 bp, Artificial Sequence
  derived and/or modified sequence
atgaccagcttccacccccgcggcttacaggctgctagggcacagaaatttaagtccaagcgaccccgcagcaattccgattgctttcaggaagaggatctcaggcaggggttccagtggcgcaaatcactaccattcggcgccgcgagttcttacctcaacctggaaaagttgggagaaggctcttatgccaccgtctataaaggtatatcccgcataaacggtcaattggttgcactcaaggttatcagcatgaacgctgaagagggggttccattcactgcaattcgtgaagccagtctcctgaagggactgaagcacgccaatatagtgcttctgcatgatatcattcataccaaggagacactaacatttgtattcgagtatatgcatacggatctggcgcagtacatgtctcaacacccaggcggcctgcacccccataacgtgcgtctgtttatgtttcagcttcttagggggttagcttatatccatcatcagcacgtcctccatcgcgacctaaaaccacagaatctgctcatcagccacctcggcgagttgaaactggctgattttggattggcgcgagccaagagcattccctcgcagacatacagctctgaagtggtaaccctgtggtaccgccctccagatgctctgttgggcgcaacagagtatagcagtgagctcgacatatggggggccggctgtatctttattgagatgttccagggccagcctctgtttccgggtgtgtcaaatatccttgaacaactggagaagatttgggaggttctgggcgttcctaccgaggacacttggccaggcgtgtcgaaattgcctaactacaacccagagtggtttccactccccactccgcgctcattgcacgtggtgtggaatagactcggacgggtgccggaagcggaagacttagcctcccaaatgctgaaaggattccctagggaccgcgtgagtgcccaggaagccctggtgcacgactacttctcagcccttccaagtcagctatatcagcttcccgacgaagaaagtctgtttacggtgagtggagtccgtctcaaaccagagatgtgtgacctgcttgccagctaccagaaaggtcatcacccagctcagttctccaaatgttggtag

SEQ ID NO: 238259 - DNA, 1155 bp, Artificial Sequence
  derived and/or modified sequence
atgaccagcttccacccccggggcctgcaggccgcccgggcccagaagttcaagagcaagaggcccaggagcaacagcgactgcttccaggaggaggacctgcggcagggcttccagtggaggaagagcctgccctttggagctgccagcagctacctgaacctggagaagctgggggagggcagctatgccaccgtgtacaagggcatcagccgcatcaatggccagctggtggccctgaaggtgatctccatgaatgctgaggagggcgtgcccttcaccgccatccgggaggccagcctgctgaagggcctgaagcacgccaacatcgtgctgctgcatgacatcatccacaccaaggagaccctgacctttgtgtttgagtacatgcacacagacctggcccagtacatgagccagcaccctgggggcctgcacccccacaacgtgcggctcttcatgttccagctgctgcggggcctggcctacatccaccaccagcacgtgctgcaccgggacctgaagccccagaacctgctgatcagccacctgggggagctgaagctggccgactttggcctggcccgggccaagagcatccccagccagacctacagcagcgaggtggtgaccctgtggtaccggcccccagatgccctgctgggcgccacagagtacagcagcgagctggacatctggggcgccggctgcatcttcatcgagatgttccagggccagcccctcttccctggggtgagcaacatcctggagcagctggagaagatctgggaggtgctgggcgtgcccacagaggacacctggccaggagtgtccaagctgcccaactacaaccctgagtggttccccctgcccacccccaggagcctgcacgtggtgtggaaccggctgggccgggtgcctgaggccgaggacctggccagccagatgctgaagggcttcccccgggacagagtgtctgcccaggaggccctggtgcatgactacttcagcgccctgcccagccagctgtaccagctgcctgatgaggagagcctcttcaccgtgtctggagtgcggctgaagccagagatgtgtgacctgctggccagctaccagaagggccaccacccagcccagttcagcaagtgctggtag

SEQ ID NO: 238260 - DNA, 1155 bp, Artificial Sequence
  derived and/or modified sequence
atgaccagcttccacccccggggcctgcaggccgcccgggcccagaaattcaagagtaagcgcccacgttccaatagcgactgctttcaggaggaagatctccgccagggtttccaatggcgcaaatccttgcccttcggggcagctagctcttaccttaatctggagaagctcggggagggaagctacgcaactgtgtataagggaatcagtaggattaatgggcagttggtggctttgaaagtgattagcatgaacgcagaagagggggtgccatttacagcaattagagaggcctccttgctgaagggcttgaaacacgcaaatatcgttctgctccacgacattatacacaccaaggaaacgctaactttcgtattcgaatacatgcataccgacctagcccagtatatgtcccagcacccgggagggcttcatcctcataacgtgcggttatttatgtttcagctactgcgtggtttggcttatatccatcatcagcacgtcctgcacagggacctgaaacctcagaaccttctgatatcacatctgggcgaactgaagctcgccgatttcgggttagccagggccaagtctattccatcacaaacctattcctccgaagtggtcacgttatggtacaggcccccagacgctctcttgggagccaccgagtattctagtgagttagatatatggggcgctgggtgcatattcattgaaatgttccaggggcagcctttgtttcccggtgttagtaacattttggagcagctggagaagatctgggaggtgctgggcgtacccacagaggatacttggccaggggtgagtaagctacctaactataaccctgagtggtttccattaccaacaccacggtctctacacgtggtttggaataggctgggaagggtacccgaagctgaggatttggccagtcaaatgctcaaggggtttcctcgtgaccgtgtgagcgcccaagaggcccttgtgcatgattactttagtgccctgccaagccagttataccagctgcccgacgaggaatctctctttaccgttagcggagtccgattaaaaccagagatgtgtgaccttttagccagttaccagaaaggtcaccaccctgcccagttttccaagtgctggtag

SEQ ID NO: 238261 - DNA, 1155 bp, Artificial Sequence
  derived and/or modified sequence
atgaccagcttccacccccggggcctgcaggccgcccgggcccagaaattcaaatctaagcggcctcggagcaactcagactgtttccaggaagaggacctccggcagggatttcagtggaggaaatccctgcccttcggggctgcctctagctacttgaacctggaaaaattgggagagggctcctatgccaccgtatacaaggggatctccagaataaatgggcagcttgtggcgctgaaggtaatatccatgaatgccgaggagggggtgccgttcaccgctatacgtgaggccagtttgttaaagggattgaaacacgctaacatagttcttctccacgacatcatccacacaaaggagacactcacctttgtcttcgagtatatgcacaccgatctggcacaatacatgtctcagcaccctggaggactccacccacacaatgtgagacttttcatgttccaactcctgcgcggactcgcctacattcaccaccagcacgtcctacatcgcgatctgaaacctcagaatctcctgatatctcatctcggagaactgaaactagccgatttcgggttggcaagagccaagtctattccttctcaaacatactcctctgaggtggttaccctgtggtacaggccccctgacgcattgctgggtgccacagaatactcctcggagcttgatatttggggggcgggttgtatatttatcgaaatgtttcagggccaaccactgtttcctggggtatccaacattttagaacagttggagaaaatctgggaagttctaggcgttcctacagaggacacctggcctggggtcagcaagctccctaactacaatcctgaatggttcccgcttcctacacccaggagcctgcacgtggtatggaacagactcggacgtgtcccagaggctgaggacttagcatcccagatgctgaagggcttccctcgggatcgggtctctgcacaggaggccctggttcacgactacttcagcgcactcccctctcagctctatcagctgcccgacgaggaaagcctgtttaccgtgtctggggtgcgcttgaagccagaaatgtgcgacctcctggcatcatatcagaaggggcaccaccccgcgcagttttccaagtgctggtag

SEQ ID NO: 238262 - DNA, 1155 bp, Artificial Sequence
  derived and/or modified sequence
atgacctcattccaccctagggggctgcaagccgctcgcgctcagaagtttaaatcaaaaaggccaaggtcaaacagcgactgttttcaggaggaggatctacggcagggtttccagtggagaaaaagcttgccgtttggcgcagcttcatcctacttaaatctggagaagctgggcgaaggctcctatgccactgtctataagggaattagccgcatcaatggacagctagtggcccttaaagtcattagcatgaatgccgaagagggggtgccattcacggctattcgcgaggctagcctcctgaagggcctcaagcacgctaatattgtgctactccatgacataattcacaccaaagaaacgctcaccttcgtgtttgaatatatgcacacagatcttgcgcaatatatgtcacaacacccaggtggattgcacccacacaacgttagactgtttatgttccagctgctaaggggcctggcatatatccaccatcaacatgttctgcatagggaccttaagcctcaaaatctgctcatttctcatctcggtgagttaaaactcgcagacttcggccttgcaagggcaaagtccatcccttcccaaacatattcaagtgaggtcgtgaccctgtggtaccgaccccctgacgcccttctgggcgctacagaatacagcagtgagctggacatctggggagcaggatgtattttcatcgagatgttccagggccagccactgtttcccggagtgagtaacatcctggagcagctggaaaagatctgggaggtgctgggcgtgccaaccgaggacacttggcccggagtctccaagctgccgaattacaaccccgagtggttccctctgcccacaccgaggagcctgcacgtggtgtggaatcgtttgggccgagtgcccgaagccgaagatttggcctcacagatgctcaaaggcttccccagagacagggtatccgcacaggaggccctagttcacgactacttcagcgctctgccaagccagctgtatcaactgcccgacgaagagtcactgttcaccgtcagcggggtccgtctcaaacccgagatgtgcgacctcctggccagctaccaaaaagggcatcacccagcccagttttcgaagtgttggtag

SEQ ID NO: 238263 - DNA, 1155 bp, Artificial Sequence
  derived and/or modified sequence
atgactagtttccaccctaggggcctgcaggctgcaagggcacagaagttcaagagcaaaagaccacgctccaacagcgactgtttccaggaagaagatctgcgacagggttttcagtggagaaaatcgctcccatttggagcagcttcctcataccttaatttagaaaaattgggcgaaggctcatatgcaactgtttataaggggataagtaggatcaatggccagctcgttgctttaaaagtgatatcaatgaatgccgaagagggcgtgcctttcaccgcgattcgtgaggcatctctgctcaagggactaaaacatgcgaatattgtgttattacacgatatcatccacactaaggagacactcacattcgtcttcgagtacatgcacaccgatctcgctcagtatatgtcacagcacccgggtgggttacaccctcacaacgtacgccttttcatgttccagcttttgagaggcctggcgtatatccaccatcagcacgttttgcatcgtgacctgaaaccacaaaatctgttgatttctcacttgggagaattaaaattggccgatttcggcctggccagagcgaagtccatacccagtcagacatattcttccgaagtcgtgactctttggtaccgcccaccagacgctttattaggtgcaactgagtacagcagcgaactcgacatctggggggctgggtgtatttttatcgaaatgtttcagggccagcccctgtttccaggggtgtctaacattctggaacaacttgagaaaatctgggaggtgcttggggtgccaactgaagacacctggcctggggtctccaagctcccaaactataatcccgagtggtttccactgccaactccacggtctctgcacgtggtgtggaataggctgggacgcgtgccagaagctgaggatctagcctcgcagatgctgaaaggcttcccaagggatagagtgagcgctcaggaagcgctggtccatgactacttttcagcactcccaagtcaactctatcagttgcccgacgaggaatcactgtttaccgtgtccggggtccggcttaagccggaaatgtgcgacctgcttgctagctatcagaagggtcaccacccggcacagttttccaagtgctggtag

SEQ ID NO: 238264 - protein, 445 aa, Artificial Sequence
  derived and/or modified sequence
MYPNPLIYCTCWDPWNLGPRKLIKTPQLPRKNSTGSSKLTPLVPAPKNHNYLQPTKPVVSPKMKIHSARQEETNKSFYEVINVSPGYQLVRNREQISVTLGDEMFDRKKRWESEIPDKGRFSRTNIISDLEEQISELTAIIEQMNRDHQSAQKLLSSEMDLRCAEMKQNFENKNRELKEAHEAELSELENNYKAALKAEKLAAQEKLEEMGKEYKYLKNMFRTYQDSIYDEMEEKWSKQKAKWKKDEKFERENILLQQKKKMTKKFEMESGEEDKKINESCSAVFENFIQEKEELLKQHQSDTLQLEELRKTKEVPWRRDQINRHWHDVLQQLLLMQVMQEELHAQALILESLNTNLYYTQLELQKEKAIVGNLEKMLQTKFAETEEKYKHTIQILTEENIHLKQKIISKNEEICEGCSGRLASITVSKDDSDTVQDGSKKGQES

SEQ ID NO: 238265 - DNA, 1338 bp, Artificial Sequence
  derived and/or modified sequence
atgtacccaaatcctttgatttactgtacatgttgggacccatggaatctgggaccacggaagctgattaaaacaccacagctgccacgcaaaaacagtactggttcatcgaaactaactccgctggtgccagcccccaagaaccacaattaccttcagcccaccaagcccgtcgtcagccctaagatgaagattcactccgcaaggcaggaggagaccaacaaatcattctatgaagttattaacgtctcaccaggctaccagctcgtgagaaatagggaacagatctcagtgaccctgggcgatgaaatgttcgacaggaagaaacgctgggagagcgaaataccggataagggccgcttctcccgcactaacataatcagtgatctggaggagcagatctccgagctcaccgccatcatcgagcagatgaatcgagatcaccagagtgctcaaaagctgctgagcagtgagatggatctcagatgtgccgagatgaagcagaactttgagaataagaacagggagctaaaggaagctcacgaggccgaactgtcagaattggaaaacaactataaggccgctttaaaggccgagaaactggccgctcaggagaagctcgaggaaatggggaaggagtacaaatacctgaagaatatgtttcgcacctaccaggactctatctatgacgagatggaagagaagtggtccaagcagaaggctaagtggaaaaaagatgaaaaatttgagagggaaaacatcctcctgcaacagaagaaaaaaatgactaaaaaattcgaaatggaatccggcgaggaagataaaaagataaacgaatcatgttctgccgtgttcgagaactttattcaggaaaaggaagagttactgaaacagcaccagagcgacaccctccagctagaggaactcaggaaaactaaagaagtcccttggaggcgggatcagatcaatagacattggcacgatgtcctgcagcagctgctgttaatgcaggtcatgcaagaggaactccacgcgcaggcactgatcctcgagagtctgaatactaacctgtactatacacagctcgagctccagaaagaaaaagcaatagtgggcaacctggaaaagatgttgcaaaccaaatttgcagagacagaagaaaagtacaagcacacaatccaaatattgaccgaagagaatattcacctgaagcagaagataatttctaagaacgaagagatctgtgagggctgctctggacgccttgcaagtatcacagtcagtaaggatgactcggacaccgtccaggacggctccaagaaagggcaagaatcctag

SEQ ID NO: 238266 - DNA, 1338 bp, Artificial Sequence
  derived and/or modified sequence
atgtacccgaatccccttatctactgtacctgctgggacccgtggaacctgggccccagaaagctgatcaagaccccccagctccctcgtaaaaacagcactggctccagcaagctgactccactggtgccagccccaaagaaccataactacctacaacccaccaagcctgtcgtatcaccaaagatgaaaattcatagcgcaaggcaggaagagaccaacaaatccttttacgaggtaatcaatgtgagtccggggtaccaactcgtccgcaacagggaacagatatcagtcaccctgggagacgaaatgtttgatagaaagaaacggtgggagtcagaaatcccggataaaggcagattctctcgaactaatatcatttccgacctggaagaacagatctcagaactcaccgcaatcatcgagcagatgaatcgggatcaccagtccgcacagaaactgctgtcttccgagatggacctccgctgtgctgagatgaagcagaacttcgagaacaaaaatagggagctaaaggaagcccatgaggctgagttatcagaactggaaaacaattacaaggcagccttaaaagcagagaaactggcggctcaggagaaattggaagaaatgggtaaagagtacaaatatctcaagaatatgtttcgaacatatcaagattccatatacgacgagatggaggaaaagtggtccaagcagaaggccaaatggaaaaaggacgaaaagtttgagcgggaaaacatcctcctgcaacagaaaaagaagatgactaaaaagtttgagatggaatctggagaagaggacaaaaaaattaacgaatcctgtagcgcagtattcgaaaacttcatccaggaaaaagaggagttgctgaagcagcaccagagcgataccctccagttggaggagttacgcaaaaccaaggaggtgccctggagaagggaccagatcaatcgacactggcacgacgtgctgcagcaattactgttaatgcaagtgatgcaggaggaattacacgctcaggccttgatactggaaagcctgaataccaatctgtactatacccaattggagctccagaaagaaaaggctatagtcgggaatttggagaaaatgctgcagaccaaattcgcggaaacggaggagaagtacaaacacactattcagatcctcacggaagagaatatacaccttaagcaaaagataataagcaagaacgaggaaatttgcgagggctgttctgggcggctagcttctattacggtcagtaaggatgactctgacacggtccaggacgggtccaaaaagggtcaggaatcctag

SEQ ID NO: 238267 - DNA, 1338 bp, Artificial Sequence
  derived and/or modified sequence
atgtaccccaaccccctcatctactgcacctgctgggacccctggaacctgggccccaggaagctgatcaagaccccccagctgcccaggaagaacagcacaggcagcagcaagctgacccccctggtgcctgcccccaagaaccacaactacctgcagcccaccaagcctgtggtgagccccaagatgaagatccacagcgcccggcaggaggagaccaacaagagcttctatgaggtgatcaacgtgtccccaggctaccagctggtgaggaaccgggagcagatctctgtgaccctgggagatgagatgtttgacaggaagaagcgctgggagagcgagatcccagacaagggccgcttcagcaggaccaacatcatcagtgacctggaggagcagatcagcgagctgacagccatcatcgagcagatgaacagagaccaccagagcgcccagaagctgctgagcagcgagatggacctgcgctgtgccgagatgaagcagaactttgagaacaagaaccgggagctgaaggaggcccatgaagctgagctgtctgagctggagaacaactacaaggccgccctgaaggccgagaagctggccgcccaggagaagctggaggagatgggcaaggagtacaagtacctgaagaacatgttccgcacctaccaggacagcatctatgatgagatggaggagaagtggagcaagcagaaggccaagtggaagaaggatgagaagtttgagcgggagaacatcctgctgcagcagaagaagaagatgaccaagaagtttgagatggagagcggggaggaggacaagaagatcaatgaaagctgcagcgctgtgtttgagaacttcatccaggagaaggaggagctgctgaagcagcaccagagcgacaccctgcagctggaggagctgaggaagaccaaggaggtgccctggaggcgggaccagatcaacagacactggcatgatgtgctgcagcagctgctgctgatgcaggtgatgcaggaggagctgcacgcccaggccctgatcctggagagcctgaacaccaacctgtactacacccagctggagctgcagaaggagaaggccatcgtgggcaacctggagaagatgctgcagaccaagtttgctgagacagaggagaagtacaagcacaccatccagatcctgacagaggagaacatccacctgaagcagaagatcatcagcaagaatgaggagatctgtgagggctgcagcggccgcctggccagcatcaccgtgtccaaggatgacagcgacacagtgcaggacggcagcaagaagggccaggagagctag

SEQ ID NO: 238268 - DNA, 1338 bp, Artificial Sequence
  derived and/or modified sequence
atgtaccccaaccccctgatctactgcacctgctgggacccctggaacctgggccccaggaagttaattaaaacgccacaactgccccggaagaactcaaccggatctagtaagcttacaccgctcgtgccagcccccaagaaccataactacttgcaaccaacaaagcccgtggtttctccaaaaatgaaaatccactcagccaggcaggaagagacaaacaaaagcttttatgaagttattaatgtctcgcccgggtatcagctagtgagaaatcgtgagcaaatctccgttaccctgggggacgaaatgttcgacaggaagaagcggtgggagtccgaaatccctgataaaggcagattcagtcgaactaacatcatctccgacttggaagagcaaatctcagagctgacagcgatcatcgaacaaatgaatcgggatcaccagtccgcccagaagttgttgtcctccgagatggacttgcggtgcgcggagatgaaacaaaacttcgaaaataagaatcgggaactaaaggaagcacatgaggcagaattaagcgagctcgaaaacaactacaaggcggctcttaaggccgaaaaactggcagcgcaggaaaaactggaagagatgggaaaagagtacaaatatctgaaaaacatgtttcggacctatcaagattcaatctacgatgaaatggaggagaaatggagcaagcagaaagccaagtggaagaaggacgaaaaattcgaacgcgagaacattttactgcagcaaaaaaagaaaatgaccaagaaatttgaaatggagtcaggtgaagaagataaaaagatcaatgagtcttgttcggctgtgttcgaaaatttcatccaggagaaggaggaactgctgaagcagcatcaaagcgatacacttcagcttgaagaactccgcaaaactaaggaagtgccttggcgcagagatcagataaacagacactggcacgacgtcctccagcaactcctgctgatgcaggtcatgcaggaagagctgcatgcgcaggccctcatcctcgagagccttaatacgaatctgtactacacacagttggagttacagaaggagaaagccatcgtgggcaatttggagaagatgctgcagaccaaatttgccgagacggaggaaaaatataagcacactatacagatcctgacagaggagaatatccatctgaaacagaagattatcagcaaaaatgaggagatctgcgaaggctgctcgggcagactggcttctattacagtctccaaggacgactcagacacagtgcaggacgggtccaagaagggccaggaaagctag

SEQ ID NO: 238269 - DNA, 1338 bp, Artificial Sequence
  derived and/or modified sequence
atgtaccccaaccccctgatctactgcacctgctgggacccctggaacctagggccaagaaagttaatcaagaccccccagctgccgcgcaagaactccacgggttcatccaagctcacacccttagtacctgctccaaagaaccacaattacctgcagcctacaaaacctgttgtctcacccaagatgaagatccacagcgctagacaggaagagaccaacaaatccttttatgaagtgataaatgtgtcgccaggctaccagctagtacgcaacagggagcaaattagcgtaaccctcggggatgaaatgtttgacagaaaaaaaagatgggagagcgaaataccagataagggccgattctctaggaccaacatcatttcagatctggaagagcagatatcagagctgaccgctattatcgaacagatgaatcgggatcaccagtctgcgcaaaaattgttatccagcgagatggacttacgttgtgcggagatgaaacagaacttcgaaaataaaaatcgcgaacttaaggaagcccacgaggcagagctgagcgaattggagaataactacaaggcggccctgaaggcagagaagcttgctgctcaggagaagctggaggagatgggtaaggagtacaaatacctcaagaatatgttccgcacttatcaggattccatttacgatgagatggaggaaaaatggtctaagcaaaaggccaaatggaagaaagatgagaagtttgagcgtgagaacatcctgctgcaacagaaaaagaagatgaccaagaaatttgagatggagtcaggagaggaagacaaaaagataaacgagtcatgttcagctgtgtttgagaactttatccaggaaaaggaagaactgctgaagcagcatcaatccgataccctgcagctggaggagttaaggaaaactaaggaagtcccttggaggcgtgatcaaatcaataggcactggcacgatgttctgcagcaactgctcctgatgcaggtcatgcaagaagaactgcacgctcaggccctgatccttgagtcactgaatactaacctctactacacgcagctggagctccaaaaagaaaaggcaattgtggggaacctagaaaaaatgctccaaaccaaatttgcggagactgaggaaaaatacaaacacacaatccaaatcctgacagaagaaaatatccacttgaagcagaaaataatcagcaaaaacgaagagatctgcgagggatgcagcggtcgtctggcttcaatcactgtttcaaaggatgactccgacactgttcaggacggcagcaagaaaggacaggagtcctag

SEQ ID NO: 238270 - DNA, 2013 bp, Artificial Sequence
  derived and/or modified sequence
ctttggcctgccatctcccaagggcaaacctcacaactcaggcccaagtcacaggaatctgaatggtggggtgaccttctcctctagtttaatttcattgcaatactgagaaacttcaactgttttgtctttagaagggaaattcatgtttgtgccaggccagcctttgtaaaagcctttgattggattcactagaagtctgtcttcccgcagtacatatactgtgaattttctccttcggcatttcaaccacttggaatggccactaaagtggcttttgatctaaagtaaactctgattctgtgttgatggggaaccatttctctctaacatggtggtttctttaagatgtttgacttgggccacatgagaataacagatctttgggcagtccaagcaagagcctcctgatctagcagccaagactccccctgacctttggccatgtaccccaaccctctcatctactgcacctgctgggacccctggaacttgggaccacggaagctaatcaagacccctcaactaccacgcaagaactccacagggagttccaagctaactcctcttgtaccagctccaaaaaatcacaattacctccaaccaacaaaacctgttgtttccccaaaaatgaaaatccattcagcaaggcaagaagagactaataaatcattttatgaagtgatcaacgtgtcacctggctatcaacttgttcggaatcgggaacagatttctgtcaccttaggggatgagatgtttgataggaaaaagcggtgggaatcggagatcccggacaaaggcagattttccaggaccaacatcatttctgacctagaagagcaaatctcagagctgacagcaataattgaacaaatgaacagagaccaccagtctgcccagaaattgctctccagtgaaatggatctccgctgtgctgagatgaaacagaactttgaaaacaagaacagggagctcaaagaggcccatgaagcagaactcagtgagttggagaacaactacaaagcagccttgaaggcagagaagttggctgcccaagagaagctagaggagatgggaaaagaatacaagtatttgaagaatatgtttcgtacgtatcaggacagtatttatgatgaaatggaagagaagtggtcaaaacagaaggcgaaatggaagaaggatgagaagttcgagcgagaaaatatcctgctacagcaaaaaaaaaagatgaccaaaaaattcgaaatggagtcaggagaagaagataagaaaataaatgaatcctgcagtgctgtctttgagaacttcattcaagagaaggaggagctcttgaaacaacatcaaagtgacaccttgcaattagaagagctgagaaaaaccaaagaggtgccctggagaagagaccaaataaatagacattggcatgatgtcctgcaacagcttcttcttatgcaggtcatgcaggaagaattgcatgcacaagcccttatcctagagtcactgaacacaaacctctactatacccagttggaactccagaaagagaaagctatagtgggaaatctggagaaaatgcttcaaaccaagtttgctgaaactgaagaaaagtataagcacaccatacagatcctgacggaagagaacattcatctgaagcaaaagataatttctaagaatgaagaaatttgtgaaggatgttctgggagattggcctctattactgtttctaaggatgattctgacactgtgcaagatggtagcaagaaaggacaagaatcataaacaaaaagttgctctgcattgttgaagatggttggcacaccatttctgtaggcccaggaaactcctgggagggttttcttgagaaaatgcatataatgagtttagttcttgggttgctctgactctctgaatgtctgaaaatgtttgaattcgcatctgaatttcacagcttatcacggactcttcactgaaaaatgatgctctccatactgggagctgagctttctctga

SEQ ID NO: 238271 - DNA, 1338 bp, Artificial Sequence
  derived and/or modified sequence
atgtaccctaacccattaatttactgcacatgctgggatccatggaatcttgggccaaggaaattgatcaagactccacaactgccgcgtaagaactcaacagggagcagcaaactcacaccgctggtgccggcacccaagaaccacaactacctgcagcccacaaaaccggttgtgagcccaaaaatgaagattcactctgcccgacaagaagagactaacaagagcttttacgaagtgatcaatgtttcccctgggtaccaactggtgagaaatcgtgaacaaatatctgtgaccctcggcgacgaaatgttcgatagaaagaaaaggtgggaatccgaaatccctgacaagggacgcttctctcggaccaacatcatatccgatcttgaagaacagatatctgagcttacagcaatcattgaacagatgaacagagaccatcaatctgcacaaaaactgttatctagtgaaatggacctgaggtgtgccgaaatgaagcagaactttgagaataaaaaccgggagctgaaagaggcacacgaggcagaactctcagaattagaaaataattataaagccgctctgaaggcagagaagctggccgcacaggaaaagctcgaggagatgggcaaagaatacaaatatctgaaaaatatgtttaggacgtaccaagactcgatctatgacgaaatggaggagaagtggtccaaacagaaagcaaagtggaagaaggacgaaaagtttgaaagagagaacatcctattgcagcaaaagaagaagatgacaaagaagttcgagatggaaagcggcgaagaagataaaaaaatcaacgaaagctgctcagctgtattcgagaattttattcaggagaaagaagaactgttgaaacagcatcagtccgacaccctccagttggaagagctgcgcaagacaaaagaggtaccttggaggcgcgaccagatcaaccgccactggcacgatgtgctgcaacagctgctgctgatgcaagtgatgcaggaagagttgcatgcccaggctctaatactcgaaagtttgaatacgaacctgtactacacccagctcgagctgcagaaggagaaggcaatcgtggggaatctcgagaagatgctacagacgaagttcgcggaaactgaggagaagtataaacatactattcagatcctgaccgaggagaacatccacctcaaacagaagattatcagcaaaaacgaggagatttgtgagggttgttctggccgattggctagcatcaccgtgtctaaggacgactcagatactgtccaagacggttctaagaaaggacaggaaagttag

SEQ ID NO: 238272 - DNA, 1338 bp, Artificial Sequence
  derived and/or modified sequence
atgtacccgaatcctctgatttactgtacttgctgggatccatggaatctgggccctcgcaaactgatcaagactccgcagttgccacgaaaaaacagtactgggtcttccaagttgactccgcttgttccagctcccaagaaccataattatctgcagccaaccaaacctgttgtgtcacctaagatgaaaatccattctgcccgtcaggaggagactaacaaatctttttatgaggtcatcaacgtgagccctggatatcagctggtaagaaaccgagaacaaattagcgttacactgggagatgagatgttcgaccgcaaaaaacgttgggaaagcgaaatccctgacaagggccgatttagtcggaccaacattatctctgacctcgaggagcagattagcgaactcaccgctatcatcgaacagatgaatagagaccaccaaagtgcccagaaacttttgtcctcggaaatggacctgcgatgtgcagagatgaagcagaactttgagaataaaaaccgtgagctcaaggaggcacacgaggcagagctgtcggaactcgagaataattataaagcagctcttaaggccgaaaaactggccgctcaggaaaagctcgaggagatggggaaggaatacaaatatctcaagaacatgttccgtacctatcaagacagcatttacgatgaaatggaagagaagtggagcaaacagaaggcaaagtggaagaaagatgagaaatttgagcgggagaacatattgcttcagcagaagaaaaagatgacaaaaaagtttgagatggagtcaggggaggaagataagaaaatcaacgaatcttgctctgctgtatttgagaacttcatacaggagaaggaagagctgctgaaacaacatcaatccgacaccctgcagcttgaagagctgcgaaagaccaaggaggtgccttggaggcgcgaccagatcaacagacactggcatgatgtcttacaacaattgcttctcatgcaggtcatgcaggaggaattgcacgcccaggcccttattctggagtcccttaacactaatctgtattacacacagcttgaattgcagaaggaaaaggctatcgtagggaacctggaaaaaatgctccagaccaaattcgcagagacagaagaaaaatacaagcatactatccagattctgacggaagaaaacattcacctgaaacagaagattatctccaagaacgaggaaatctgcgaggggtgcagtgggagacttgcctccatcaccgtctctaaagacgattctgatacggtacaggacggtagtaagaaagggcaagagtcttag

SEQ ID NO: 238273 - DNA, 1769 bp, Artificial Sequence
  derived and/or modified sequence
caagagcctcctgatctagcagccaagactccccctgacctttggccatgtaccccaaccctctcatctactgcacctgctgggacccctggaacttgggaccacggaagctaatcaagacccctcaactaccacgcaagaactccacagggagttccaagctaactcctcttgtaccagctccaaaaaatcacaattacctccaaccaacaaaacctgttgtttccccaaaaatgaaaatccattcagcaaggcaagaagagactaataaatcattttatgaagtgatcaacgtgtcacctggctatcaacttgttcggaatcgggaacagatttctgtcaccttaggggatgagatgtttgataggaaaaagcggtgggaatcggagatcccggacaaaggcagattttccaggaccaacatcatttctgacctagaagagcaaatctcagagctgacagcaataattgaacaaatgaacagagaccaccagtctgcccagaaattgctctccagtgaaatggatctccgctgtgctgagatgaaacagaactttgaaaacaagaacagggagctcaaagaggcccatgaagcagaactcagtgagttggagaacaactacaaagcagccttgaaggcagagaagttggctgcccaagagaagctagaggagatgggaaaagaatacaagtatttgaagaatatgtttcgtacgtatcaggacagtatttatgatgaaatggaagagaagtggtcaaaacagaaggcgaaatggaagaaggatgagaagttcgagcgagaaaatatcctgctacagcaaaaaaaaaagatgaccaaaaaattcgaaatggagtcaggagaagaagataagaaaataaatgaatcctgcagtgctgtctttgagaacttcattcaagagaaggaggagctcttgaaacaacatcaaagtgacaccttgcaattagaagagctgagaaaaaccaaagaggtgccctggagaagagaccaaataaatagacattggcatgatgtcctgcaacagcttcttcttatgcaggtcatgcaggaagaattgcatgcacaagcccttatcctagagtcactgaacacaaacctctactatacccagttggaactccagaaagagaaagctatagtgggaaatctggagaaaatgcttcaaaccaagtttgctgaaactgaagaaaagtataagcacaccatacagatcctgacggaagagaacattcatctgaagcaaaagataatttctaagaatgaagaaatttgtgaaggatgttctgggagattggcctctattactgtttctaaggatgattctgacactgtgcaagatggtagcaagaaaggacaagaatcataaacaaaaagttgctctgcattgttgaagatggttggcacaccatttctgtaggcccaggaaactcctgggagggttttcttgagaaaatgcatataatgagtttagttcttgggttgctctgactctctgaatgtctgaaaatgtttgaattcgcatctgaatttcacagcttatcacggactcttcactgaaaaatgatgctctccatactgggagctgagctttctctgagttttgtactatttttcttctaccttgacgtatttcgttagaaagaaactgatttgaaggccttcttcatattgaacttttactatatttgggaggtgtacctttgtcccctggggcatttaggtagcaaaaaaagatgatgtgttgatttta

SEQ ID NO: 238274 - DNA, 1338 bp, Artificial Sequence
  derived and/or modified sequence
atgtaccccaaccccctgatctactgcacctgctgggacccctggaacctgggccccagaaagctgatcaagaccccccagctgcccagaaagaacagcaccggcagcagcaagctgacccccctggtgcccgcccccaagaaccacaactacctgcagcccaccaagcccgtggtgagccccaagatgaagatccacagcgccagacaggaggagaccaacaagagcttctacgaggtgatcaacgtgagccccggctaccagctggtgagaaacagagagcagatcagcgtgaccctgggcgacgagatgttcgacagaaagaagagatgggagagcgagatccccgacaagggcagattcagcagaaccaacatcatcagcgacctggaggagcagatcagcgagctgaccgccatcatcgagcagatgaacagagaccaccagagcgcccagaagctgctgagcagcgagatggacctgagatgcgccgagatgaagcagaacttcgagaacaagaacagagagctgaaggaggcccacgaggccgagctgagcgagctggagaacaactacaaggccgccctgaaggccgagaagctggccgcccaggagaagctggaggagatgggcaaggagtacaagtacctgaagaacatgttcagaacctaccaggacagcatctacgacgagatggaggagaagtggagcaagcagaaggccaagtggaagaaggacgagaagttcgagagagagaacatcctgctgcagcagaagaagaagatgaccaagaagttcgagatggagagcggcgaggaggacaagaagatcaacgagagctgcagcgccgtgttcgagaacttcatccaggagaaggaggagctgctgaagcagcaccagagcgacaccctgcagctggaggagctgagaaagaccaaggaggtgccctggagaagagaccagatcaacagacactggcacgacgtgctgcagcagctgctgctgatgcaggtgatgcaggaggagctgcacgcccaggccctgatcctggagagcctgaacaccaacctgtactacacccagctggagctgcagaaggagaaggccatcgtgggcaacctggagaagatgctgcagaccaagttcgccgagaccgaggagaagtacaagcacaccatccagatcctgaccgaggagaacatccacctgaagcagaagatcatcagcaagaacgaggagatctgcgagggctgcagcggcagactggccagcatcaccgtgagcaaggacgacagcgacaccgtgcaggacggcagcaagaagggccaggagagctag

SEQ ID NO: 238275 - protein, 263 aa, Artificial Sequence
  derived and/or modified sequence
MRRISLTSSPVRLLLFLLLLLIALEIMVGGHSLCFNFTIKSLSRPGQPWCEAQVFLNKNLFLQYNSDNNMVKPLGLLGKKVYATSTWGELTQTLGEVGRDLRMLLCDIKPQIKTSDPSTLQVEMFCQREAERCTGASWQFATNGEKSLLFDAMNMTWTVINHEASKIKETWKKDRGLEKYFRKLSKGDCDHWLREFLGHWEAMPEPTVSPVNASDIHWSSSSLPDRWIILGAFILLVLMGIVLICVWWQNGEWQAGLWPLRTS

SEQ ID NO: 238276 - DNA, 792 bp, Artificial Sequence
  derived and/or modified sequence
atgagaagaatcagcctgaccagcagccccgtgagactgctgctgttcctgctgctgctgctgatcgccctggagatcatggtgggcggccacagcctgtgcttcaacttcaccatcaagagcctgagcagacccggccagccctggtgcgaggcccaggtgttcctgaacaagaacctgttcctgcagtacaacagcgacaacaacatggtgaagcccctgggcctgctgggcaagaaggtgtacgccaccagcacctggggcgagctgacccagaccctgggcgaggtgggcagagacctgagaatgctgctgtgcgacatcaagccccagatcaagaccagcgaccccagcaccctgcaggtggagatgttctgccagagagaggccgagagatgcaccggcgccagctggcagttcgccaccaacggcgagaagagcctgctgttcgacgccatgaacatgacctggaccgtgatcaaccacgaggccagcaagatcaaggagacctggaagaaggacagaggcctggagaagtacttcagaaagctgagcaagggcgactgcgaccactggctgagagagttcctgggccactgggaggccatgcccgagcccaccgtgagccccgtgaacgccagcgacatccactggagcagcagcagcctgcccgacagatggatcatcctgggcgccttcatcctgctggtgctgatgggcatcgtgctgatctgcgtgtggtggcagaacggcgagtggcaggccggcctgtggcccctgagaaccagctag

SEQ ID NO: 238277 - DNA, 792 bp, Artificial Sequence
  derived and/or modified sequence
atgcgcagaatttcattgaccagttctcccgtccgcctgctgctgtttcttttgttgctgctgatagcactggagatcatggttggaggacactccctgtgctttaactttacaataaagtcactttctcgccccggacagccctggtgtgaggcccaagtttttctgaataaaaatctctttcttcagtacaacagcgacaataacatggtcaaacctctgggcctcctgggcaagaaagtgtatgccacatctacttggggcgagctcacacagacactcggggaagtggggagggatctccgtatgttgctgtgtgacattaaacctcagatcaaaaccagcgatccttcgacattgcaggtcgagatgttttgccaaagggaagccgagcgctgcacaggcgcaagttggcagtttgccacaaatggcgaaaagtccctccttttcgacgctatgaatatgacatggacagtgatcaaccatgaggcgagcaagatcaaggagacctggaaaaaagaccggggccttgaaaagtatttcaggaaactgagcaagggcgactgcgaccactggctccgggaattcctcggtcattgggaggccatgccggaacccactgtgagcccagtgaatgctagtgatattcattggagtagtagctcgctgccagacagatggattatcctgggagcatttatccttcttgtgctgatgggaattgtgctgatctgcgtctggtggcagaacggtgagtggcaggctgggttatggcccctgagaacaagctag

SEQ ID NO: 238278 - DNA, 792 bp, Artificial Sequence
  derived and/or modified sequence
atgaggcgcatcagcctgaccagcagccctgtgcggctgctgctcttcctgctgctgctgctgattgccctggagatcatggtgggcggccacagcctgtgcttcaacttcaccatcaagagcctgagcaggcctggccagccctggtgtgaggcccaggtgttcctgaacaagaacctcttcctgcagtacaacagcgacaacaacatggtgaagcccctgggcctgctgggcaagaaggtgtatgccaccagcacctggggcgagctgacccagaccctgggggaggtgggccgggacctgaggatgctgctgtgtgacatcaagccccagatcaagaccagtgaccccagcaccctgcaggtggagatgttctgccagcgggaggccgagcgctgcaccggggcctcctggcagtttgccaccaatggagagaagagcctgctgtttgatgccatgaacatgacctggacagtcatcaaccacgaggccagcaagatcaaggagacctggaagaaggaccggggcctggagaagtacttcaggaagctgagcaagggggactgtgaccactggctgcgggagttcctgggccactgggaggccatgcctgagcccaccgtgtcccctgtgaatgccagtgacatccactggagcagcagcagcctgcctgaccgctggatcatcctgggcgccttcatcctgctggtgctgatgggcatcgtgctgatctgtgtgtggtggcagaatggagagtggcaggccggcctgtggcccctgcggaccagctag

SEQ ID NO: 238279 - DNA, 792 bp, Artificial Sequence
  derived and/or modified sequence
atgcggcggatcagcctgaccagcagccccgtgcggctgctgctgtttctcttattattgctcattgcattagagatcatggtgggagggcattccttgtgctttaactttactataaaaagtcttagccgccccggtcagccctggtgtgaagcacaagtgtttttgaacaagaatctatttctgcaatacaactcagacaataatatggtgaagcccctgggcttactcggtaagaaagtatacgccactagcacatggggggaacttacgcagactctgggggaagtggggagagaccttagaatgttactgtgcgacatcaagccgcagataaaaacttccgacccgtccacactccaagttgagatgttttgtcaacgcgaggctgagcgatgtaccggagctagctggcagttcgcaaccaatggagagaaatccctgttattcgacgctatgaacatgacatggaccgtgatcaaccacgaggcctcaaagattaaagagacgtggaagaaggatagagggctagaaaagtactttagaaagctgtctaagggagactgtgatcactggttgagagaatttctgggccactgggaggccatgcccgaaccaacagtgagcccagtgaacgcaagtgatatccactggtcttccagcagcttgcctgatcgctggatcatcctgggcgctttcatactgctggtgctcatgggcattgtcttgatttgcgtgtggtggcagaacggcgaatggcaagctggcttgtggcccctgagaacttcttag

SEQ ID NO: 238280 - DNA, 792 bp, Artificial Sequence
  derived and/or modified sequence
atgcgacgaatctcattgacttctagtccggtgcgcctgctcctttttctgctactcctactaatagccctggaaatcatggttgggggacactccttgtgttttaactttacgatcaaaagcctctctcgcccaggtcaaccttggtgtgaagctcaggtctttctgaacaagaacctctttttgcagtacaactctgataataatatggtgaagcctttagggctgctaggtaagaaggtatatgcaacatcaacttggggggagctgacccagaccctgggcgaggttggcagagacttaaggatgttactgtgtgacataaagccccagatcaaaacatccgatccatccactttacaagttgaaatgttttgccagcgagaagccgaaaggtgtaccggcgcttcatggcaattcgcaactaatggtgaaaagagtttgttgtttgacgccatgaacatgacctggacagtcattaatcacgaagcatctaaaatcaaggaaacctggaagaaggataggggtctcgagaagtattttcggaagctgtccaagggcgactgcgaccattggctgcgagagttccttggacattgggaggcaatgcccgaaccaactgtgagccctgtcaatgctagcgatattcactggtcgagctcatctctccccgatcggtggatcatccttggagcttttatcctgctcgttctaatggggattgtactgatttgcgtttggtggcagaacggggagtggcaggcaggcctttggcctctgcgaaccagctag

SEQ ID NO: 238281 - DNA, 958 bp, Artificial Sequence
  derived and/or modified sequence
gcctgacctcagttgttccagggtaaagaatttgggcagtgcccacacccacgctgttggataacatttcttcaccataccagtgagggtgaatgtgtacacgcccagcttcctgcctgttactctccacagtatgcgaagaatatccctgacttctagccctgtgcgccttcttttgtttctgctgttgctactaatagccttggagatcatggttggtggtcactctctttgcttcaacttcactataaaatcattgtccagacctggacagccctggtgtgaagcgcaggtcttcttgaataaaaatcttttccttcagtacaacagtgacaacaacatggtcaaacctctgggcctcctggggaagaaggtatatgccaccagcacttggggagaattgacccaaacgctgggagaagtggggcgagacctcaggatgctcctttgtgacatcaaaccccagataaagaccagtgatccttccactctgcaagtcgagatgttttgtcaacgtgaagcagaacggtgcactggtgcatcctggcagttcgccaccaatggagagaaatccctcctctttgacgcaatgaacatgacctggacagtaattaatcatgaagccagtaagatcaaggagacatggaagaaagacagagggctggaaaagtatttcaggaagctctcaaagggagactgcgatcactggctcagggaattcttagggcactgggaggcaatgccagaaccgacagtgtcaccagtaaatgcttcagatatccactggtcttcttctagtctaccagatagatggatcatcctgggggcattcatcctgttagttttaatgggaattgttctcatctgtgtctggtggcaaaatggtgagtggcaggctggtctctggcccttgaggacgtcttagtctggtaaggactcaagagaggtgaatcatggg

SEQ ID NO: 238282 - protein, 381 aa, Artificial Sequence
  derived and/or modified sequence
MAPGEKESGEGPAKSALRKIRTATLVISLARGWQQWANENSIRQAQEPTGWLPGGTQDSPQAPKPITPPTSHQKAQSAPKSPPRLPEGHGDGQSSEKAPEVSHIKKKEVSKTVVSKTYERGGDVSHLSHRYERDAGVLEPGQPENDIDRILHSHGSPTRRRKCANLVSELTKGWRVMEQEEPTWRSDSVDTEDSGYGGEAEERPEQDGVQVAVVRIKRPLPSQVNRFTEKLNCKAQQKYSPVGNLKGRWQQWADEHIQSQKLNPFSEEFDYELAMSTRLHKGDEGYGRPKEGTKTAERAKRAEEHIYREMMDMCFIICTMARHRRDGKIQVTFGDLFDRYVRISDKVVGILMRARKHGLVDFEGEMLWQGRDDHVVITLLK

SEQ ID NO: 238283 - DNA, 1146 bp, Artificial Sequence
  derived and/or modified sequence
atggctccaggcgagaaagaaagcggggaaggcccagcaaagtccgcacttcgcaagataagaaccgctacgctggtgattagtctcgctcggggttggcaacagtgggcaaacgagaactctattaggcaggcacaggagcccactgggtggctccctgggggcacccaagactccccacaagctccaaaacctattacaccccctacatcccaccagaaggctcagtccgcgcccaagagtccacctcgcctccctgaagggcatggtgacgggcaatcatcagagaaggctccagaagtgtctcacattaagaaaaaggaagtatccaaaactgttgtgtcaaagacctacgaaagaggaggagacgtctctcacctctctcacagatacgaaagggacgccggggtgctcgagcccggccagcccgaaaatgacattgatagaatcctccattcccatggaagccctactcgtcgtagaaaatgtgcgaacctggtcagcgagctgactaaaggttggcgcgtgatggaacaggaagaacccacctggcgatccgatagcgtggatacggaagatagtggctatggtggcgaggcagaagagagaccagagcaggatggcgtgcaggtagcggtggtgcggatcaagcggcctctgccgagtcaagttaacagatttaccgagaaacttaattgcaaggcccaacagaagtactctccggtgggcaacctcaagggacggtggcaacaatgggctgatgaacacatccagtctcagaaacttaatcccttctctgaggaattcgactatgagcttgccatgagcaccagactgcataagggagatgaaggttacggaagacccaaggaaggtacaaagactgctgaacgtgccaaacgggcagaggagcacatttatcgagaaatgatggatatgtgctttattatttgtaccatggctcgccataggcgagatggcaaaattcaggtgaccttcggtgacttgttcgatagatacgtccgtatatccgataaggtcgttggcattttaatgagagccaggaaacatggcctcgttgattttgaaggcgaaatgctctggcaggggcgcgacgaccacgtggtgattacactactcaagtag

SEQ ID NO: 238284 - DNA, 1146 bp, Artificial Sequence
  derived and/or modified sequence
atggcccctggagagaaggagagcggggagggccctgccaagagcgccctgaggaagatcagaacagccaccctggtgatcagcctggcccggggctggcagcagtgggccaatgaaaattccatccggcaggcccaggagcccaccggctggctgcccggcggcacccaggacagcccccaggcccccaagcccatcaccccacccaccagccaccagaaggcccagagcgcccccaagagccccccccggctgcctgagggccatggagatggccagagcagcgagaaggcccctgaggtgagccacatcaagaagaaggaggtgtccaagacagtggtgtccaagacctatgaaagaggaggagatgtgagccacctgagccacagatatgaaagagatgctggggtgctggagcccggccagccagaaaatgacatcgaccgcatcctgcacagccacggcagccccaccaggaggaggaaatgtgccaacctggtgtctgagctgaccaagggctggagggtgatggagcaggaggagcccacctggaggagtgacagcgtggacacagaggacagcggctacggcggggaggccgaggagaggcctgagcaggatggagtgcaggtggccgtggtgcgcatcaagaggcccctgcccagccaggtgaaccgcttcacagagaagctgaactgcaaggcccagcagaagtacagccctgtgggcaacctgaagggccgctggcagcagtgggcagatgagcacatccagagccagaagctgaaccccttcagcgaggagtttgattatgagctggccatgagcacccggctgcacaagggagatgagggctacggccggcccaaggagggcaccaagacagctgagcgggccaagagagctgaggagcacatctaccgggagatgatggacatgtgcttcatcatctgcaccatggcccggcacagaagagatggcaagatccaggtgacctttggagacctgtttgaccgctacgtgcgcatcagtgacaaggtggtgggcatcctgatgagggccaggaagcacggcctggtggactttgaaggagagatgctgtggcagggcagagatgaccacgtggtgatcaccctgctgaagtag

SEQ ID NO: 238285 - DNA, 1146 bp, Artificial Sequence
  derived and/or modified sequence
atggcccccggcgagaaggagagcggcgagggccccgccaagagcgcactgcgcaagattcgcactgccacactggtgatcagtcttgctcggggctggcagcagtgggctaacgaaaattccattcgccaggctcaggagccaactggctggcttccgggaggtacccaagactccccccaagcacctaagcccatcacaccaccgacctcccaccagaaggcccaatctgcaccaaagtctcccccccggctgcctgagggtcacggagacggccaatcaagcgaaaaggccccagaggtgtcccacataaagaaaaaagaggtctcaaaaactgtggtgtcgaagacctacgagcggggcggagacgtatcccatctgtctcatcggtacgagcgagatgctggcgtgttagaacccggccagcccgagaatgacatcgaccggatcctgcactctcacggctctccaactcgaaggaggaagtgcgcaaacctggtatctgagctgacaaaaggttggcgagtaatggagcaggaggaaccgacttggcgttcagatagtgtggataccgaggactccggctacggtggtgaggccgaggagcggcccgagcaggatggtgttcaggtcgccgtggtgcgcattaaacgacctttacccagccaagtcaatagatttacagagaaactgaactgtaaggcccagcaaaagtatagtcctgtcggcaacctcaaaggccggtggcaacagtgggccgacgaacatattcagtcgcagaaactcaacccattcagtgaagagtttgattacgagctcgctatgagcactaggttgcacaaaggtgacgaaggctacggtcgacctaaagaagggacaaagaccgctgaacgcgctaagagggccgaagagcacatttatagggagatgatggacatgtgctttatcatctgtaccatggccaggcaccgccgggacgggaagatacaagtgacattcggtgaccttttcgataggtacgtgagaataagtgataaagttgttggcatccttatgcgtgcaaggaagcacgggttggtcgacttcgagggagagatgctgtggcaaggtcgcgacgatcatgtggtaattacgctcctaaagtag

SEQ ID NO: 238286 - DNA, 1146 bp, Artificial Sequence
  derived and/or modified sequence
atggccccaggtgagaaggaaagcggagaagggccagcaaaaagtgccctacggaagattcgaaccgcaacgcttgtgatctcactcgctcggggatggcagcagtgggctaacgagaacagcattcggcaagcacaagaacctacggggtggctgccagggggtactcaagactctccccaagccccaaaacctatcaccccccctacgtctcaccagaaggcacagtccgcaccgaagagtcctcctaggctgccagaagggcacggcgatggccagagttctgagaaggcccctgaggtatcacacattaaaaaaaaggaagtcagtaagacagtggtgagtaagacctacgagaggggtggcgatgtctcacatctatcgcacagatatgagagggacgccggagtgctcgagcccggtcagccagagaatgatatcgaccgaatcttgcactcacacggtagccccactaggcgcagaaaatgtgctaacctggtgtccgaattgaccaagggatggcgtgtgatggaacaagaggaacccacttggcggtcagatagtgtcgacactgaggactctggctatggaggcgaagccgaagagcggccagagcaggacggtgtacaggtggccgtggttcggattaagcggcctcttccctcacaggtgaatcgatttacagagaagctgaattgcaaggctcagcaaaaatactcccctgtgggaaatctcaagggtcggtggcagcaatgggccgacgagcatatccaaagccagaaattaaacccctttagtgaggaattcgactacgagttagccatgagtacacggctccacaagggggacgaaggatacgggagaccaaaggaggggactaaaacagcagagcgagctaagcgtgccgaagagcacatctatagagaaatgatggatatgtgtttcattatatgtacaatggcacgacaccggcgtgacgggaagattcaggtaacatttggtgatctattcgaccgctatgtacgtatcagcgataaagtagttggcatactaatgcgggcacgtaagcatggtctggttgattttgagggggaaatgttgtggcagggcagagacgaccacgttgttatcacactcctaaagtag

SEQ ID NO: 238287 - DNA, 2755 bp, Artificial Sequence
  derived and/or modified sequence
cacactcattttagccagtgtccaggctatcagcagagaaagacaggtgggcagcatggctccgggcgaaaaggaaagcggggagggcccagccaagagcgccctccggaagatacgcacagccaccctggtcatcagcttggcccgaggttggcagcagtgggcgaatgagaacagcatcaggcaggcccaggagcctacaggctggctgccgggagggacccaggactcacctcaagctcctaaaccaatcacaccccctacttcacaccagaaagctcagagtgccccaaagtcgccaccccgcctgccagaaggacatggagatggacaaagctcagagaaagcccctgaggtttctcacatcaaaaagaaagaggtgtccaaaacggtggtcagcaagacttatgagagaggaggggacgtgagccacctcagccacaggtacgagagggatgctggtgtgcttgaacctgggcagccagagaatgacattgacagaatcctccacagccacggctccccaacgcggaggagaaaatgtgccaacctggtgtctgagctaaccaagggctggagagtgatggagcaggaggagcccacatggaggagtgacagcgtagacacagaggacagcggctatggaggagaggctgaggagaggcccgagcaggatggagtgcaggtggctgtggtcaggatcaagcgccccttgccctcccaggtaaacagatttacagagaaactcaactgcaaagcccaacagaaatatagcccagtgggcaacttgaaagggagatggcagcagtgggctgatgaacacatacaatcccagaagctcaatcctttcagtgaagagtttgattacgagctggccatgtccacccgcctacacaaaggagatgagggctatggccgccccaaagaaggaaccaaaactgctgaaagggccaagcgtgctgaggagcacatctacagggaaatgatggacatgtgcttcattatctgcacaatggctcgccacagacgagatggcaagatccaggttacttttggagatctctttgacagatacgttcgtatttcagataaagtagtgggcattctcatgcgtgccaggaaacatggactggtagactttgaaggagagatgctatggcaaggccgagatgaccatgttgtgattacgctactcaagtgaaccttcaaaaacaaaagccaaatttggcccactatggtcttaatgctaaatgctcatgtaggtaaaatgaaaatgcaaactctctgtaataagttagtaaatattaaacaatttttacataaacgactttctggcattctatttctatctagaatgaggaattttggagattttgagaaggcacaaagcatttcagaaagcacatagaatgttaatgtataataatagtattaatagttgaaattccacagggtgtttttgtttttgttttgagacagattctctttatgtcaccaaagctggtcttttaactcctggcctcaagtgatcctctcacctcagcctcccaagtagctgggattataggcatgagcaacagcacccagccacttgtatattttaggcaaaatatttagctagtcattgtagaaactactatagatttttaattaaacattacatctaagaagaatgctgacttgagataaatatcagtagaacatataataatgtgtctttatttggaaaaaagaaaataccattaagtttggtaaaactaaacttaaaattttttcagaagcttgactttgtattattgtttatatcatagcatcacttacaaaacaagcacatatataaaaagttgtcaagatgttgctgaaattgttgaagttcctctgtgggcttggattctaacaggtttccagtaagagttcaccttcctcttgtttgatttcagcaaatcacataaaaacagacacttcctgtcttagtaccaacaaaggaaggcacaccctcactaaaagtagagcagaggtgagagattcagatttacttgcctttgtaggacttcttggagaagtttattgtttcattacatgtcagcatataacgagtcaagctgcttgcattaacatcaatgcaatgatatgtatttctccaacaatggagaaatacagaaaatctatgaagtggaatgttcagtattagaaaaatcccatagaatcattggtgaattaaaaacagatttgagacagtttaatgttcctcatactgtaacaaagaaaactttatgaaatgtttaagtcataaaactgcaatattagttctgccaaagtaaaaaatatacaatgatgatggcaaggagaaaatcattggacattaatgtgcctatgtgatcttaaaaacaaatggaatggaatgtgagattgcaattcttactggattcaatgaaattactaaaatgcattgatagtatagcactttggtgttaaatgtaaaaattaatgtctaaatatgatacctcaaaataataggtattagactgctataagaattatatttgttttcatgtatgagtctctttcaaactgaaggttctggtatcttaagaaagtatgcgtattttgtttccataccgtatttataaagctataagttaatgaccaatatttctaagtaggatttcatgtaagatgcacacttctattacaagtgaaacctacgccaaatgttaaagacaaatagcataagaataaaagatgttttcttgta

SEQ ID NO: 238288 - DNA, 1146 bp, Artificial Sequence
  derived and/or modified sequence
atggcccccggcgagaaggagagcggcgagggccccgccaagagcgccctgagaaagatcagaaccgccaccctggtgatcagcctggccagaggctggcagcagtgggccaacgagaacagcatcagacaggcccaggagcccaccggctggctgcccggcggcacccaggacagcccccaggcccccaagcccatcaccccccccaccagccaccagaaggcccagagcgcccccaagagcccccccagactgcccgagggccacggcgacggccagagcagcgagaaggcccccgaggtgagccacatcaagaagaaggaggtgagcaagaccgtggtgagcaagacctacgagagaggcggcgacgtgagccacctgagccacagatacgagagagacgccggcgtgctggagcccggccagcccgagaacgacatcgacagaatcctgcacagccacggcagccccaccagaagaagaaagtgcgccaacctggtgagcgagctgaccaagggctggagagtgatggagcaggaggagcccacctggagaagcgacagcgtggacaccgaggacagcggctacggcggcgaggccgaggagagacccgagcaggacggcgtgcaggtggccgtggtgagaatcaagagacccctgcccagccaggtgaacagattcaccgagaagctgaactgcaaggcccagcagaagtacagccccgtgggcaacctgaagggcagatggcagcagtgggccgacgagcacatccagagccagaagctgaaccccttcagcgaggagttcgactacgagctggccatgagcaccagactgcacaagggcgacgagggctacggcagacccaaggagggcaccaagaccgccgagagagccaagagagccgaggagcacatctacagagagatgatggacatgtgcttcatcatctgcaccatggccagacacagaagagacggcaagatccaggtgaccttcggcgacctgttcgacagatacgtgagaatcagcgacaaggtggtgggcatcctgatgagagccagaaagcacggcctggtggacttcgagggcgagatgctgtggcagggcagagacgaccacgtggtgatcaccctgctgaagtag

SEQ ID NO: 238289 - protein, 312 aa, Artificial Sequence
  derived and/or modified sequence
MDRSTNLDIEELKMTREQYILATQQNNLPRTENAQLYPVGIYGWRKRCLYFFVLLLLVTMIVNLAMTIWILKVMNFTVDGMGNLRVTKKGIRLEGISEFLLPLYVKEIHSRKDSPLVLQSDRNVTVNARNHMGQLTGQLTIGADAVEAQCKRFEVRASEDGRVLFSADEDEITIGAEKLKVTGTEGAVFGHSVETPHIRAEPSQDLRLESPTRSLIMEAPRGVQVSAAAGDFKATCRKELHLQSTEGEIFLNAETIKLGNLPTGSFSSSSPSSSSSRQTVYELCVCPNGKLYLSPAGVGSTCQSSSNICLWS

SEQ ID NO: 238290 - protein, 265 aa, Artificial Sequence
  derived and/or modified sequence
MTREQYILATQQNNLPRTENAQLYPVGIYGWRKRCLYFFVLLLLVTMIVNLAMTIWILKVMNFTVDSPLVLQSDRNVTVNARNHMGQLTGQLTIGADAVEAQCKRFEVRASEDGRVLFSADEDEITIGAEKLKVTGTEGAVFGHSVETPHIRAEPSQDLRLESPTRSLIMEAPRGVQVSAAAGDFKATCRKELHLQSTEGEIFLNAETIKLGNLPTGSFSSSSPSSSSSRQTVYELCVCPNGKLYLSPAGVGSTCQSSSNICLWS

SEQ ID NO: 238291 - DNA, 939 bp, Artificial Sequence
  derived and/or modified sequence
atggacagaagcaccaacctggacatcgaggagctgaagatgaccagagagcagtacatcctggccacccagcagaacaacctgcccagaaccgagaacgcccagctgtaccccgtgggcatctacggctggagaaagagatgcctgtacttcttcgtgctgctgctgctggtgaccatgatcgtgaacctggccatgaccatctggatcctgaaggtgatgaacttcaccgtggacggcatgggcaacctgagagtgaccaagaagggcatcagactggagggcatcagcgagttcctgctgcccctgtacgtgaaggagatccacagcagaaaggacagccccctggtgctgcagagcgacagaaacgtgaccgtgaacgccagaaaccacatgggccagctgaccggccagctgaccatcggcgccgacgccgtggaggcccagtgcaagagattcgaggtgagagccagcgaggacggcagagtgctgttcagcgccgacgaggacgagatcaccatcggcgccgagaagctgaaggtgaccggcaccgagggcgccgtgttcggccacagcgtggagaccccccacatcagagccgagcccagccaggacctgagactggagagccccaccagaagcctgatcatggaggcccccagaggcgtgcaggtgagcgccgccgccggcgacttcaaggccacctgcagaaaggagctgcacctgcagagcaccgagggcgagatcttcctgaacgccgagaccatcaagctgggcaacctgcccaccggcagcttcagcagcagcagccccagcagcagcagcagcagacagaccgtgtacgagctgtgcgtgtgccccaacggcaagctgtacctgagccccgccggcgtgggcagcacctgccagagcagcagcaacatctgcctgtggagctag

SEQ ID NO: 238292 - DNA, 798 bp, Artificial Sequence
  derived and/or modified sequence
atgaccagagagcagtacatcctggccacccagcagaacaacctgcccagaaccgagaacgcccagctgtaccccgtgggcatctacggctggagaaagagatgcctgtacttcttcgtgctgctgctgctggtgaccatgatcgtgaacctggccatgaccatctggatcctgaaggtgatgaacttcaccgtggacagccccctggtgctgcagagcgacagaaacgtgaccgtgaacgccagaaaccacatgggccagctgaccggccagctgaccatcggcgccgacgccgtggaggcccagtgcaagagattcgaggtgagagccagcgaggacggcagagtgctgttcagcgccgacgaggacgagatcaccatcggcgccgagaagctgaaggtgaccggcaccgagggcgccgtgttcggccacagcgtggagaccccccacatcagagccgagcccagccaggacctgagactggagagccccaccagaagcctgatcatggaggcccccagaggcgtgcaggtgagcgccgccgccggcgacttcaaggccacctgcagaaaggagctgcacctgcagagcaccgagggcgagatcttcctgaacgccgagaccatcaagctgggcaacctgcccaccggcagcttcagcagcagcagccccagcagcagcagcagcagacagaccgtgtacgagctgtgcgtgtgccccaacggcaagctgtacctgagccccgccggcgtgggcagcacctgccagagcagcagcaacatctgcctgtggagctag

SEQ ID NO: 238293 - DNA, 939 bp, Artificial Sequence
  derived and/or modified sequence
atggatcgctctacaaatctcgatattgaggagttgaaaatgacgcgggaacaatatatccttgctacccagcagaataacttgccccgcaccgaaaacgcacagctttaccctgtgggcatatacggttggagaaaacgatgcttatactttttcgttctcctgttgttagtaactatgatcgtcaatctggccatgacaatttggatcctcaaggtcatgaatttcactgtggatgggatggggaatctccgtgtaaccaagaaggggatcaggttagagggtatcagtgaatttctgctgccactgtatgtgaaggaaattcactctagaaaagattcacctctggtgctgcagtctgacaggaatgtgaccgttaatgctcgtaatcacatgggccagcttactggacagcttacaatcggcgccgatgccgtcgaagctcaatgtaaaaggtttgaagtccgtgcatctgaggatggtagggtgctcttttctgcggacgaagacgagattaccatcggggctgagaaactgaaagttactggcaccgagggcgcagtgtttgggcacagcgtggagaccccccacataagagctgaaccaagtcaggacctcaggctggaatcacccactaggtccctcattatggaagcacctagaggagttcaggtgtccgctgctgcaggggatttcaaggcaacttgtcggaaagagctgcatctccagtctacagaaggggagatttttctgaatgcggaaactattaagctcgggaacctgcctactggctctttctcttcgtccagccccagcagttcttcctcacgacagaccgtatacgaactgtgcgtctgtccaaacggcaagctgtacctgtcccctgccggagtcgggagcacatgtcaatcaagctccaacatctgcctgtggtcctag

SEQ ID NO: 238294 - DNA, 798 bp, Artificial Sequence
  derived and/or modified sequence
atgacccgcgagcagtacatattggctactcaacagaacaatctgccaaggacagagaacgctcaactttatcccgtgggaatctacggttggcgtaagcgatgtctgtacttctttgtgttattgttgctggtaaccatgatcgtcaatctagccatgaccatttggatcctgaaggttatgaattttaccgtagactcaccgctcgtgcttcagtccgaccgtaatgtcaccgttaatgctagaaatcacatggggcagctcacgggccaattgactattggcgctgatgccgtggaagctcagtgcaagcgttttgaagttcgcgcctcggaagatggacgcgtactgttcagcgccgacgaagatgaaattaccattggggcggaaaaactgaaagtgaccgggacagaaggagctgtttttgggcacagcgtggagacaccacatattcgcgcggagccttcccaagacctcaggctagagtctcccacacgatctctgattatggaagctccacgtggggtccaagtgtccgctgccgctggcgactttaaggcaacctgtcgaaaagagctacacctacagtccaccgagggcgaaatattcttaaatgctgagacaatcaaactgggtaacttaccaacaggcagttttagtagctcctccccgtcctcaagctcatcccggcagactgtgtatgagctgtgtgtttgtccaaatgggaagctctacctttcccctgccggagtgggatctacctgtcagtcctccagcaatatatgtctatggagttag

SEQ ID NO: 238295 - DNA, 939 bp, Artificial Sequence
  derived and/or modified sequence
atggacaggagcaccaacctggacatcgaggagctgaagatgacccgggagcagtacatcctggccacccagcagaacaacctgcccaggacagaaaatgcccagctgtaccctgtgggcatctacggctggaggaagcgctgcctgtacttctttgtgctgctgctgctggtgaccatgattgtgaacctggccatgaccatctggatcctgaaggtgatgaacttcaccgtggatggcatgggcaacctgcgggtgaccaagaagggcatccggctggagggcatcagcgagttcctgctgcccctgtatgtgaaggagatccacagcaggaaggacagccccctggtgctgcagagcgacagaaatgtgacagtgaatgccaggaaccacatgggccagctgaccggccagctgaccatcggggctgatgctgtggaggcccagtgcaagagatttgaggtgcgggcctctgaagatggccgggtgctcttcagcgcagatgaagatgagatcaccatcggggctgagaagctgaaggtgactggaacagagggcgctgtgtttggccacagcgtggagaccccccacatccgggcagagcccagccaggacctgcggctggagagccccaccaggagcctcatcatggaggccccccggggcgtgcaggtgtctgctgctgctggggacttcaaggccacctgcaggaaggagctgcacctgcagagcacagaaggagagatcttcctgaatgctgagaccatcaagctgggcaacctgcccaccggcagcttcagcagcagcagccccagcagcagcagcagccggcagacagtgtatgagctgtgtgtgtgccccaacgggaagctgtacctgagccctgctggggtgggcagcacctgccagagcagcagcaacatctgcctgtggagctag

SEQ ID NO: 238296 - DNA, 798 bp, Artificial Sequence
  derived and/or modified sequence
atgacccgggagcagtacatcctggccacccagcagaacaacctgcccaggacagaaaatgcccagctgtaccctgtgggcatctacggctggaggaagcgctgcctgtacttctttgtgctgctgctgctggtgaccatgattgtgaacctggccatgaccatctggatcctgaaggtgatgaacttcaccgtggacagccccctggtgctgcagagcgacagaaatgtgacagtgaatgccaggaaccacatgggccagctgaccggccagctgaccatcggggctgatgctgtggaggcccagtgcaagagatttgaggtgcgggcctctgaagatggccgggtgctcttcagcgcagatgaagatgagatcaccatcggggctgagaagctgaaggtgactggaacagaaggagctgtgtttggccacagcgtggagaccccccacatccgggcagagcccagccaggacctgcggctggagagccccaccaggagcctcatcatggaggccccccggggcgtgcaggtgtctgctgctgctggggacttcaaggccacctgcaggaaggagctgcacctgcagagcacagaaggagagatcttcctgaatgctgagaccatcaagctgggcaacctgcccaccggcagcttcagcagcagcagccccagcagcagcagcagccggcagacagtgtatgagctgtgtgtgtgccccaacgggaagctgtacctgagccctgctggggtgggcagcacctgccagagcagcagcaacatctgcctgtggagctag

SEQ ID NO: 238297 - DNA, 939 bp, Artificial Sequence
  derived and/or modified sequence
atggaccggagcaccaacctggacatcgaggagctgaagatgaccagagagcagtacatattggctacgcagcaaaacaatctgcctcgtaccgagaacgcacagctttaccccgtgggcatctatggctggaggaagcgctgcctgtatttcttcgttctgttattgctcgtgactatgatagtgaacctcgccatgacaatctggattctgaaagtaatgaacttcaccgttgacggcatgggaaacctgagggtgacgaagaagggcatcaggctagaggggatttcggagttcctcctacccttatatgtgaaagaaattcattcacgcaaggatagtcctctggtcctccagtctgaccggaacgtgactgtgaacgcaaggaatcatatgggtcagttaactggacaactcactattggagcagacgctgttgaggcacagtgtaaacggtttgaggttcgtgcttctgaggacggaagggtgcttttttctgcagacgaagatgagatcacaattggcgccgagaaacttaaggtgacgggaaccgagggcgccgtgtttgggcacagcgttgagaccccccatattagagctgaacccagtcaggacttgaggctcgagtcgccaacaaggtctctgattatggaagcgccgaggggcgtccaagtgtccgcagccgcgggagattttaaggctacatgcaggaaggagctgcatctccagtccaccgaaggcgagatctttttgaatgcagaaaccattaagctgggcaacctgcccactggatctttctccagtagcagcccatcttcttcaagttcccgccagaccgtgtacgaactctgtgtctgccccaatggcaaactctacttatcacctgcaggtgttggctccacatgccagtcatccagtaatatttgtctctggtcttag

SEQ ID NO: 238298 - DNA, 798 bp, Artificial Sequence
  derived and/or modified sequence
atgacccgggagcagtacatcctggccacccagcagaacaacctgccaagaaccgagaatgctcagctgtacccagtcggcatttatgggtggcggaagcggtgcctctacttcttcgttctgctactcctagtgacaatgatcgttaacttggccatgaccatttggattctgaaggtaatgaactttactgtggattcccctctggtcctgcagagcgacaggaatgtgactgtgaacgctcgtaaccacatgggccagctcactgggcagctgaccattggcgctgatgccgtcgaagcccagtgtaagcggtttgaagttagggcttcagaagacggtcgcgtgctctttagcgcggacgaggatgaaataaccattggcgccgagaaactaaaggtcaccggaactgagggggcagtcttcggacatagcgtggaaactccccacattcgcgctgagccatcccaggatctgcggctagaatcccccactcgcagtttaataatggaagctccacggggggtccaggttagcgccgccgctggggactttaaggccacctgtaggaaggaactgcaccttcagagcactgagggtgaaatcttcctgaatgccgaaaccataaagctcggcaatctccctaccggttcattctcatctagctcaccttcgagctcctcctcgaggcaaacagtgtatgagctgtgtgtgtgtcccaatgggaaactgtacctctcacccgccggggtaggaagcacctgccagtcttcctccaatatttgtctttggtcttag

SEQ ID NO: 238299 - DNA, 939 bp, Artificial Sequence
  derived and/or modified sequence
atggatcgctccacgaatctggacattgaggagctcaagatgactcgagaacagtatatcctggcaactcagcagaataatttacccagaactgagaatgcgcagttatatccagtaggaatttacggatggcggaaaagatgtttatattttttcgtgctgcttcttcttgtcactatgattgtcaatttagctatgaccatctggattttaaaggttatgaatttcaccgtagatggcatgggaaaccttagggttactaagaaaggcatcaggcttgagggtatcagcgaatttctacttccgctctatgtaaaagaaatccacagcagaaaggattctcccttggtcctgcagagtgatcggaatgttactgtgaacgccagaaaccacatgggccagttaactgggcagctgaccatcggagcagatgccgtcgaggcccaatgcaagagattcgaagtccgggctagtgaggacgggagagtgctgttcagtgcagacgaggacgagatcacaatcggcgcagagaagctgaaagtcacgggtaccgaaggtgctgttttcggccacagcgtggagaccccacacattcgggcagagcccagccaggatctccggctggagtcaccgacacgctctctgatcatggaggccccaaggggagtccaggtgtcagctgctgctggcgattttaaggcaacctgccgtaaggagctgcatctgcagtctacggagggtgagatttttctgaatgctgagaccattaaactgggaaatctacccactggctcgttctcctcatcctctccctccagtagctctagccggcagaccgtctacgagctttgcgtgtgccctaatggaaagctgtaccttagtcctgcaggcgtgggtagcacttgtcagagcagttccaacatatgcctctggtcctag

SEQ ID NO: 238300 - DNA, 798 bp, Artificial Sequence
  derived and/or modified sequence
atgacccgtgaacaatatatcctggctacccaacagaacaacctcccccgaaccgaaaatgctcagctgtatcccgttggaatctacggatggaggaaacgatgtctgtacttcttcgtgctcttgctcttagtaactatgatcgttaacctggccatgacaatttggatcctgaaagtgatgaatttcacagtcgatagtcccttagtgctgcagagcgatcggaatgtgactgtgaatgcgaggaatcatatgggccaactcacgggccagctaaccatcggcgctgacgccgtagaggcccagtgcaagcggttcgaggtgagagcctccgaggatggcagggtcctgttcagcgcagacgaagatgagatcactataggagctgagaagctgaaggtgactgggactgaaggggctgtgttcggacattccgtcgagacccctcacatcagagctgaacctagtcaggatttgaggctcgagtctccaactcggagcctcattatggaggcacctcgaggcgttcaggttagcgctgccgcaggagactttaaggcgacttgccgcaaggaactgcatttacagagcacagaaggcgagatctttctgaacgccgagacaattaagttgggcaacctccccacaggttccttctcgtcatccagccccagcagctcctcttcccgccagaccgtctatgagctgtgcgtttgcccaaacggcaaactgtatctttcccccgcaggagtgggatccacttgtcagagcagcagcaatatctgtctgtggtcttag

SEQ ID NO: 238301 - DNA, 2234 bp, Artificial Sequence
  derived and/or modified sequence
ctctctttctctccctctttttctctccgttggatccacctcctattccctcaactcttttagcataaccttcaaaggagaacgttcccttctgacttgattatcttcttttccccactgagaaaatacctctcagctacaagacattttttaagtctatgcaggacttcggggattctgttatcttgccggggaaactgatcattgctaatgcctgggactggagctaaattacctaccagagtaagcctgacggaggaagccttttatcatacactcttctcttcagtttgaacacatttgcttgaaatttgccgcatgatgctgaccagggaagcagctttttttctcgggatgcagcaattcgctgggttctaagcttattgcagaagaagaaataatcttaaatagagtggatttttttttccttttttcttttggcccctgtttcaatcgactcagctgtgttgcaccgcggtagagatcacctgtcactaaatctttgaggaagtaaaataaagtgaattatcattattatttatttattttccttatttttaacccggtggaggcggcgtgaccacggagaatgagactgagaggagctgccggggcttggaggaggataaagctgagtttaagctggaaactaaaagactagattgtttttgggtgccactcgcccggttcctctccacttcgtttagttgcgctccatggacagatcaacgaacctggacattgaggagctcaagatgacacgagaacaatacatactagcaacccaacagaataacctgccaaggactgagaatgcacaactttacccagtgggaatttatggatggcgaaagaggtgcttatacttctttgtccttctgctgttggttaccatgatagttaacttagccatgacaatatggatattgaaagttatgaatttcactgtggatggtatgggaaatctgagagtcaccaagaagggaatccgacttgaaggtatatctgagtttctacttccattgtatgtgaaagaaattcattctcgaaaggatagtccgctggtcttacagtctgacaggaatgtcacagtgaatgcaagaaatcacatggggcagttaaccggacagctgaccataggagctgatgctgtggaagctcagtgtaaaagatttgaagtgagagccagtgaagatggcagggtgctgttttctgcagatgaagatgagattaccattggggctgaaaagctgaaagttacaggcactgaaggagccgtatttgggcactctgtggagacgccgcacatcagagcagagccatcccaagatctcaggcttgaatcacccaccagatccttgatcatggaagctccccgtggggtccaggtgagtgctgctgcaggagacttcaaggccacctgcaggaaggagctccatctgcaatctacagaaggggagatatttttaaatgcagagacaatcaagctgggaaatctaccaactggctccttctcatcttcttcacccagctcctcaagttctcgacagacagtgtatgaactctgcgtctgccccaatggcaaactttacctttctccagcaggagtaggttccacttgtcagtccagtagcaacatctgcctgtggagctgaagtgactgatttctcctcacaccagaatagccttttgttcctgtccgtctgcttcacagttctgctcggtttcccttgtgatcagtccagagcttcttcgaatggtccacagagcaacttccagtgtgagcagggattcgccaccaccttctcttgtgatttactgtactgctcaacacagagggtgtgattgacacagcagtggaaaaagcgtcgtcagcaggaaaactggatcatgacttttgctcgaaagggagaataacataggtgcctttgctacgcgaagtgaagcacacagttttagatttttgcaggacctggatatgaactgcacatatatacattacataaatgaaattcccagtatccaatggcaagatgaaatggttaaccctgtaagaaaacttattctacattctgaaagcacaattttccattcatctttttggatgtaaacttttatccccgacttttaaaattttaaagcattatgtaatgcttgctttactaaaatttaaattcaatacatggtttttaacaaaacagaacaaaacaaaacaatacagaatctctccctga

SEQ ID NO: 238302 - DNA, 867 bp, Artificial Sequence
  derived and/or modified sequence
atgacacgagaacaatacatactagcaacccaacagaataacctgccaaggactgagaatgcacaactttacccagtgggaatttatggatggcgaaagaggtgcttatacttctttgtccttctgctgttggttaccatgatagttaacttagccatgacaatatggatattgaaagttatgaatttcactgtggatagtccgctggtcttacagtctgacaggaatgtcacagtgaatgcaagaaatcacatggggcagttaaccggacagctgaccataggagctgatgctgtggaagctcagtgtaaaagatttgaagtgagagccagtgaagatggcagggtgctgttttctgcagatgaagatgagattaccattggggctgaaaagctgaaagttacaggcactgaaggagccgtatttgggcactctgtggagacgccgcacatcagagcagagccatcccaagatctcaggcttgaatcacccaccagatccttgatcatggaagctccccgtggggtccaggtgagtgctgctgcaggagacttcaaggccacctgcaggaaggagctccatctgcaatctacagaaggggagatatttttaaatgcagagacaatcaagctgggaaatctaccaactggctccttctcatcttcttcacccagctcctcaagttctcgacagacagtgtatgaactctgcgtctgccccaatggcaaactttacctttctccagcaggagtaggttccacttgtcagtccagtagcaacatctgcctgtggagctgaagtgactgatttctcctcacaccagaatagccttttgttcctgtccgtctgcttcacagttctgctcgg

SEQ ID NO: 238303 - protein, 508 aa, Artificial Sequence
  derived and/or modified sequence
MTSLMPGAGLLPIPTPNPLTTLGVSLSSLGAIPAAALDPNIATLGEIPQPPLMGNVDPSKIDEIRRTVYVGNLNSQTTTADQLLEFFKQVGEVKFVRMAGDETQPTRFAFVEFADQNSVPRALAFNGVMFGDRPLKINHSNNAIVKPPEMTPQAAAKELEEVMKRVREAQSFISAAIEPESGKSNERKGGRSRSHTRSKSRSSSKSHSRRKRSQSKHRSRSHNRSRSRQKDRRRSKSPHKKRSKSRERRKSRSRSHSRDKRKDTREKIKEKERVKEKDREKEREREKEREKEKERGKNKDRDKEREKDREKDKEKDREREREKEHEKDRDKEKEKEQDKEKEREKDRSKEIDEKRKKDKKSRTPPRSYNASRRSRSSSRERRRRRSRSSSRSPRTSKTIKRKSSRSPSPRSRNKKDKKREKERDHISERRERERSTSMRKSSNDRDGKEKLEKNSTSLKEKEHNKEPDSSVSKEVDDKDAPRTEENKIQHNGNCQLNEENLSTKTEAV

SEQ ID NO: 238304 - protein, 1009 aa, Artificial Sequence
  derived and/or modified sequence
MTSPQLEWTLQTLLEQLNEDELKSFKSLLWAFPLEDVLQKTPWSEVEEADGKKLAEILVNTSSENWIRNATVNILEEMNLTELCKMAKAEMMEDGQVQEIDNPELGDAEEDSELAKPGEKEGWRNSMEKQSLVWKNTFWQGDIDNFHDDVTLRNQRFIPFLNPRTPRKLTPYTVVLHGPAGVGKTTLAKKCMLDWTDCNLSPTLRYAFYLSCKELSRMGPCSFAELISKDWPELQDDIPSILAQAQRILFVVDGLDELKVPPGALIQDICGDWEKKKPVPVLLGSLLKRKMLPRAALLVTTRPRALRDLQLLAQQPIYVRVEGFLEEDRRAYFLRHFGDEDQAMRAFELMRSNAALFQLGSAPAVCWIVCTTLKLQMEKGEDPVPTCLTRTGLFLRFLCSRFPQGAQLRGALRTLSLLAAQGLWAQMSVFHREDLERLGVQESDLRLFLDGDILRQDRVSKGCYSFIHLSFQQFLTALFYALEKEEGEDRDGHAWDIGDVQKLLSGEERLKNPDLIQVGHFLFGLANEKRAKELEATFGCRMSPDIKQELLQCKAHLHANKPLSVTDLKEVLGCLYESQEEELAKVVVAPFKEISIHLTNTSEVMHCSFSLKHCQDLQKLSLQVAKGVFLENYMDFELDIEFESSNSNLKFLEVKQSFLSDSSVRILCDHVTRSTCHLQKVEIKNVTPDTAYRDFCLAFIGKKTLTHLTLAGHIEWERTMMLMLCDLLRNHKCNLQYLRLGGHCATPEQWAEFFYVLKANQSLKHLRLSANVLLDEGAMLLYKTMTRPKHFLQMLSLENCRLTEASCKDLAAVLVVSKKLTHLCLAKNPIGDTGVKFLCEGLSYPDCKLQTLVLQQCSITKLGCRYLSEALQEACSLTNLDLSINQIARGLWILCQALENPNCNLKHLRLWSCSLMPFYCQHLGSALLSNQKLETLDLGQNHLWKSGIIKLFGVLRQRTGSLKILRLKTYETNLEIKKLLEEVKEKNPKLTIDCNASGATAPPCCDFFC

SEQ ID NO: 238305 - DNA, 3030 bp, Artificial Sequence
  derived and/or modified sequence
atgaccagcccccagctggagtggaccctgcagaccctgctggagcagctgaacgaggacgagctgaagagcttcaagagcctgctgtgggccttccccctggaggacgtgctgcagaagaccccctggagcgaggtggaggaggccgacggcaagaagctggccgagatcctggtgaacaccagcagcgagaactggatcagaaacgccaccgtgaacatcctggaggagatgaacctgaccgagctgtgcaagatggccaaggccgagatgatggaggacggccaggtgcaggagatcgacaaccccgagctgggcgacgccgaggaggacagcgagctggccaagcccggcgagaaggagggctggagaaacagcatggagaagcagagcctggtgtggaagaacaccttctggcagggcgacatcgacaacttccacgacgacgtgaccctgagaaaccagagattcatccccttcctgaaccccagaacccccagaaagctgaccccctacaccgtggtgctgcacggccccgccggcgtgggcaagaccaccctggccaagaagtgcatgctggactggaccgactgcaacctgagccccaccctgagatacgccttctacctgagctgcaaggagctgagcagaatgggcccctgcagcttcgccgagctgatcagcaaggactggcccgagctgcaggacgacatccccagcatcctggcccaggcccagagaatcctgttcgtggtggacggcctggacgagctgaaggtgccccccggcgccctgatccaggacatctgcggcgactgggagaagaagaagcccgtgcccgtgctgctgggcagcctgctgaagagaaagatgctgcccagagccgccctgctggtgaccaccagacccagagccctgagagacctgcagctgctggcccagcagcccatctacgtgagagtggagggcttcctggaggaggacagaagagcctacttcctgagacacttcggcgacgaggaccaggccatgagagccttcgagctgatgagaagcaacgccgccctgttccagctgggcagcgcccccgccgtgtgctggatcgtgtgcaccaccctgaagctgcagatggagaagggcgaggaccccgtgcccacctgcctgaccagaaccggcctgttcctgagattcctgtgcagcagattcccccagggcgcccagctgagaggcgccctgagaaccctgagcctgctggccgcccagggcctgtgggcccagatgagcgtgttccacagagaggacctggagagactgggcgtgcaggagagcgacctgagactgttcctggacggcgacatcctgagacaggacagagtgagcaagggctgctacagcttcatccacctgagcttccagcagttcctgaccgccctgttctacgccctggagaaggaggagggcgaggacagagacggccacgcctgggacatcggcgacgtgcagaagctgctgagcggcgaggagagactgaagaaccccgacctgatccaggtgggccacttcctgttcggcctggccaacgagaagagagccaaggagctggaggccaccttcggctgcagaatgagccccgacatcaagcaggagctgctgcagtgcaaggcccacctgcacgccaacaagcccctgagcgtgaccgacctgaaggaggtgctgggctgcctgtacgagagccaggaggaggagctggccaaggtggtggtggcccccttcaaggagatcagcatccacctgaccaacaccagcgaggtgatgcactgcagcttcagcctgaagcactgccaggacctgcagaagctgagcctgcaggtggccaagggcgtgttcctggagaactacatggacttcgagctggacatcgagttcgagagcagcaacagcaacctgaagttcctggaggtgaagcagagcttcctgagcgacagcagcgtgagaatcctgtgcgaccacgtgaccagaagcacctgccacctgcagaaggtggagatcaagaacgtgacccccgacaccgcctacagagacttctgcctggccttcatcggcaagaagaccctgacccacctgaccctggccggccacatcgagtgggagagaaccatgatgctgatgctgtgcgacctgctgagaaaccacaagtgcaacctgcagtacctgagactgggcggccactgcgccacccccgagcagtgggccgagttcttctacgtgctgaaggccaaccagagcctgaagcacctgagactgagcgccaacgtgctgctggacgagggcgccatgctgctgtacaagaccatgaccagacccaagcacttcctgcagatgctgagcctggagaactgcagactgaccgaggccagctgcaaggacctggccgccgtgctggtggtgagcaagaagctgacccacctgtgcctggccaagaaccccatcggcgacaccggcgtgaagttcctgtgcgagggcctgagctaccccgactgcaagctgcagaccctggtgctgcagcagtgcagcatcaccaagctgggctgcagatacctgagcgaggccctgcaggaggcctgcagcctgaccaacctggacctgagcatcaaccagatcgccagaggcctgtggatcctgtgccaggccctggagaaccccaactgcaacctgaagcacctgagactgtggagctgcagcctgatgcccttctactgccagcacctgggcagcgccctgctgagcaaccagaagctggagaccctggacctgggccagaaccacctgtggaagagcggcatcatcaagctgttcggcgtgctgagacagagaaccggcagcctgaagatcctgagactgaagacctacgagaccaacctggagatcaagaagctgctggaggaggtgaaggagaagaaccccaagctgaccatcgactgcaacgccagcggcgccaccgcccccccctgctgcgacttcttctgctag

SEQ ID NO: 238306 - DNA, 3030 bp, Artificial Sequence
  derived and/or modified sequence
atgacaagcccacagttagaatggacactgcagaccctcctggagcaattaaacgaggacgagctcaagtcattcaaatcattactgtgggccttccccttggaagacgtgctacagaagacaccatggtcagaagttgaggaggccgacggtaagaaactggctgagatattagtcaatacatcttctgagaattggatacggaacgcaaccgttaacatactcgaggaaatgaacctcaccgaactgtgtaaaatggccaaggcagaaatgatggaagacggacaagtgcaggagatcgacaatccagagctaggggatgctgaggaggattcggaactggctaaacctggcgagaaagagggctggcgcaactcaatggagaagcaaagtcttgtctggaagaacacgttttggcaaggtgacattgataactttcacgacgacgtgactcttcggaatcagcgctttatcccctttctcaatcctcgcactcctcggaagttaacgccgtatacagtcgtcctccatggtcctgcaggcgtgggaaagactaccctggccaagaagtgcatgctggactggacggattgcaatctctctcctacactgagatatgccttttacttgtcctgtaaagaactgtctaggatgggtccgtgtagctttgcggaattaatttccaaagattggcctgaactccaagacgatatcccatccatcctggctcaggcccagaggatactcttcgtggtggatgggctggatgagctcaaagtcccccctggggcactgattcaagacatctgcggcgactgggagaagaagaaacccgttccagtccttctagggtccctgctcaagcgaaagatgctgccacgtgcagccctcctggtgaccactcgcccgagggccctccgggacctgcagctgctagcccagcagcctatctatgtgagggtggagggttttctggaggaagaccgtcgtgcttacttcttgaggcactttggggacgaggatcaagccatgagggcctttgagctaatgcgctctaacgccgcgctgtttcagctgggcagtgcacctgcagtctgctggattgtttgtacaacactcaagctccagatggagaagggagaagaccctgtgcccacatgcctaacccgcacagggctgttcctgagatttctgtgctctcgcttcccgcagggggcgcagctgagaggagccctgagaaccctttccctcctagccgcccagggactgtgggctcagatgtccgtctttcaccgcgaggaccttgaacggctcggcgtgcaagagtctgatcttcgcctcttcctggacggggatattctccggcaggaccgcgtgagcaaaggatgttatagtttcatccacctgtcctttcagcagttcctgaccgcacttttttatgccctggagaaagaagagggggaagatcgtgacgggcacgcctgggatatcggagacgtgcaaaagttgctcagtggcgaggagcggcttaagaaccctgacctgattcaagtcgggcattttctgttcggcctggccaacgagaaaagagctaaagaacttgaggctactttcgggtgccgaatgagtcctgacatcaaacaggagctgctgcagtgcaaagctcatctacacgccaataaaccgctttcggtgaccgatctgaaggaggtgcttggatgcctgtacgagtcccaggaggaggagctggctaaagtggtggttgctcctttcaaggagatctcaattcatttaaccaacacatctgaggttatgcattgtagtttcagtctgaaacactgtcaggatctgcagaagttgtctctgcaagtcgctaagggagtgttcctggagaactacatggatttcgagctagacatcgagttcgaatcatcaaatagcaacctgaaatttctcgaagtgaaacagagcttcctctcagatagcagcgtacgcatactgtgtgaccacgtcacccgctccacttgccacctgcagaaagtagagatcaaaaacgtaacccctgatactgcttatcgggatttctgtctggcctttatcgggaaaaagacgctgacccacctcaccctcgcaggtcatatcgagtgggagcggactatgatgcttatgctgtgcgatttactaagaaatcataaatgcaatctgcagtatctgagactggggggccactgtgcaacccctgaacagtgggccgaatttttctacgtgctgaaggccaaccaaagtctgaagcatctgaggttatctgccaacgtgttgcttgacgagggggcaatgctcttgtataagactatgactcgccccaaacacttcttacagatgctctccttggagaattgccgactcactgaggcttcatgcaaggacctggcggctgttctcgtggtttcaaaaaaattgacacacctgtgcctcgcaaaaaaccctattggggacactggcgtgaaatttttgtgtgaaggcttatcatatcccgactgcaaactgcagactctggtgctacagcaatgttccattaccaagctgggctgccgatatctgagcgaggcactgcaggaagcttgcagtctcacgaacttagatctgtccatcaaccagatagcacggggactgtggatcctttgccaggcattggagaatcctaattgcaatctaaagcatcttaggttgtggagctgctccctgatgcctttttattgccagcacctgggaagcgctctcctatctaaccagaaactcgagacattggacctcggtcagaaccacttgtggaagagtggcatcattaaactgtttggtgttttgcggcagcggaccgggtccctcaagatcctgagactgaaaacatatgagactaatcttgagatcaagaagcttcttgaagaagtgaaggaaaaaaatcccaaactaacaattgactgcaacgcctccggggcaaccgccccaccatgttgtgacttcttttgctag

SEQ ID NO: 238307 - DNA, 3030 bp, Artificial Sequence
  derived and/or modified sequence
atgacctcgccccagctggagtggaccttacaaaccctgctagagcagctcaatgaagacgagcttaagtcttttaaatcattgctctgggccttccccctcgaagatgtcttacaaaagactccttggagcgaagtcgaagaggccgatggtaagaagcttgctgagatattggtgaacacctcatcagaaaactggattagaaacgctactgtgaatatactggaggaaatgaacttaacagaactctgcaagatggctaaagcagagatgatggaggacggccaggtgcaggagatagataaccccgaacttggtgacgcagaggaggacagcgagttggccaagcctggcgaaaaggaaggctggaggaacagcatggaaaaacaatccctggtgtggaaaaataccttctggcaaggcgatattgacaatttccacgacgacgtgacactccggaaccaacggtttataccttttctcaatccacgcaccccgcgaaagctgacgccctatacagtcgtgcttcacggccccgcaggcgtgggaaaaacaacccttgcgaagaaatgcatgctggattggaccgactgcaaccttagcccgaccctcagatacgcattttacctctcatgtaaagagttgtcacggatggggccttgctcttttgccgagctgattagtaaagattggccagagttacaggacgacatcccctccattctggcccaagcccaacgcatcctttttgtagtggacggattggacgaactgaaggtgccgcccggtgctctgatacaggacatttgcggagactgggagaagaaaaagcccgtgccagtcctgcttgggagcctgctcaaaagaaaaatgcttccgcgggctgcacttctggtcacgaccaggccgagggccctgcgcgacctccagttactggctcaacagcccatttatgtgcgagttgaaggattcctggaagaggatcgacgagcttattttcttcgtcatttcggtgatgaggaccaggccatgagagcctttgaattgatgcgcagtaatgcagcactttttcagctgggctctgcgcccgcggtttgttggatcgtgtgcacaacattaaaactgcagatggagaaaggtgaagaccctgtgcctacctgtctgacacggaccggcctgttccttcggttcctctgcagcagatttccacagggtgcgcagctccgcggcgcgctacggaccctttccctcctcgcggctcagggactgtgggcccagatgtctgtgttccaccgtgaagatctggagcgtttaggtgttcaagaaagtgatttaaggctcttcctggacggcgatattctgagacaggatagggtcagcaagggctgttacagttttatccacctaagcttccagcagttcctgacggccctgttctacgcgctggagaaagaagagggcgaggatagagacggacacgcatgggatatcggggatgtgcagaagctcctgtccggcgaggaacggcttaagaatcctgacctcattcaagttggccattttctattcggccttgctaacgagaagagggccaaagaattggaagcaacctttggctgcagaatgagcccagatatcaaacaggaactcctgcaatgcaaagcccatttgcatgcaaataagccattatctgtgacagacctgaaagaggtgcttggctgcttgtatgaaagtcaagaagaagaactggcaaaggtggtcgtggccccatttaaggaaatctcaattcatttgacgaacaccagcgaggtcatgcattgttcattcagtctgaaacactgtcaagatctgcagaagctaagtctccaggtcgctaaaggagtgtttctggaaaactacatggacttcgaactggatattgaattcgagtcgtctaattcaaatctgaaattcttagaggtaaagcagagctttctgtcagactcaagcgtgcgcatcctgtgcgaccacgttacacggtctacctgccacctccaaaaagtggaaattaagaacgtcacgccagataccgcatatcgggacttttgcttggcgtttatcggaaaaaagacattgacccatctgacactggctgggcacatagagtgggaaaggacgatgatgctgatgctgtgcgatttgctgaggaaccacaagtgcaacctgcagtatctgaggctagggggacactgcgccactccagaacagtgggccgagtttttctacgtgttaaaggccaatcaatctcttaagcacctacgccttagcgccaatgtacttttagacgagggggcaatgctgctgtacaaaactatgaccagacccaaacactttctgcagatgctgagtttggagaactgccgactgacagaggcctcttgcaaggacctggctgcggtcctggttgtatcaaagaagctgacgcatctctgccttgcaaagaatccaatcggggataccggagtgaagttcctctgcgaaggactttcttaccctgattgcaaactgcagaccctcgtgcttcaacagtgtagcataactaagcttggttgtcgatacctttcagaggctctgcaagaggcgtgcagtctgacgaacctcgacctcagtatcaatcagatcgcccgggggctctggatcctctgccaggcactggagaatccgaactgtaatctgaagcaccttcgtctgtggagttgttctctgatgccgttctactgccagcacttaggatctgcgttactgtcaaatcagaagctcgagaccctggacctcggacagaaccacttgtggaaatccggcattattaaactcttcggggtgctgcgacagagaacaggcagcctgaagatcctgcgattaaagacatacgagacaaatctggagatcaagaagctgctggaggaggtcaaggagaaaaatccaaaactgacgattgattgcaacgcctcaggggctacagcccctccctgctgtgattttttctgttag

SEQ ID NO: 238308 - DNA, 3030 bp, Artificial Sequence
  derived and/or modified sequence
atgacctcacctcagctggagtggacactccaaacacttctggagcagctgaatgaggacgaactgaagtccttcaaatccttgctgtgggcatttccactggaggacgtgctgcagaagaccccctggtcagaggtggaggaggccgacggcaagaagttggctgaaattcttgtgaacacgtcttctgagaactggattagaaatgcaactgtgaacattttggaggagatgaaccttactgagctgtgcaaaatggctaaggcagaaatgatggaggacgggcaggtgcaggagatcgacaaccccgaacttggcgatgctgaggaggattcagaattggccaagcctggagagaaagaaggctggcgaaattctatggaaaaacagtcccttgtgtggaaaaatacgttttggcagggagatattgacaacttccacgatgacgtgacactcagaaaccagaggttcatcccattcctaaatcccagaactccacgaaaactgactccttacaccgttgtcctacacggcccggccggggtgggcaaaacaactctggccaagaagtgcatgcttgactggacggactgcaatctgtcacctaccctgagatacgctttctatctgtcttgcaaggaattgtcgagaatggggccatgctccttcgctgagctgattagcaaggactggcccgagctgcaggacgatatcccttcaatcttggcccaagcacagagaattttattcgtggtggatggcttggacgaactaaaagtcccccccggcgccttgatccaggatatctgcggggattgggaaaagaaaaagcccgtcccagtcctcctcggcagcctacttaagcgtaagatgctgccaagggcagcactgttggtaacaaccaggccacgtgctctgagggacctgcaactcctcgcacagcagccaatctatgtccgggtggagggatttctggaggaagaccgacgtgcgtattttctgaggcactttggagacgaagatcaggccatgcgcgccttcgaactgatgaggtccaacgccgccctgttccagttgggatcagccccagcagtttgttggatcgtgtgcaccacgctcaagctccagatggagaaaggcgaagaccccgtgccaacttgtcttaccagaaccgggttatttctccggtttctgtgtagtcgtttcccccaaggcgctcagttacgcggcgctctgcgaactttgtcgctcttggccgcgcaggggctgtgggcgcagatgtccgtgttccatcgcgaggatttagagcgtcttggtgttcaggagagcgatctgcgactgttcctggatggcgacattctacgtcaagaccgtgtcagcaaagggtgttatagctttatccatctctcgtttcagcagttcctcaccgctcttttctatgcactcgaaaaagaggagggtgaggaccgcgatggccacgcctgggacatcggggacgttcagaagctgctgagcggtgaagagcgtttgaagaatcctgacttgattcaagtcggccacttccttttcggcctagccaatgagaagcgcgctaaggaactggaggctacatttggctgccgcatgagccccgatattaaacaggaactgctccagtgtaaggcccatttacacgccaacaaacctctcagcgtgaccgacctgaaggaagttttaggctgtctgtacgagtcacaggaggaagagcttgctaaagtcgtcgttgcaccattcaaggagattagtattcacttaactaacacttcagaggtgatgcattgctccttttccctcaagcattgccaagatctacagaaactcagccttcaagtggctaagggggtcttcctggagaactacatggactttgaactcgacattgagtttgaaagtagcaatagtaacttaaagttccttgaagtgaagcaatcattcctctccgatagtagcgtgcgcatcctctgcgaccacgtgactcgatctacttgtcacctgcagaaggtagaaatcaaaaacgtgaccccagatacagcctatcgagacttctgcctcgccttcattggcaagaagacattaacacaccttacactcgctggccatattgaatgggagcggactatgatgcttatgttgtgcgacttgctgaggaatcacaagtgcaacctgcaatacctgcgtctaggcggccattgcgctacccctgaacagtgggccgaattcttctacgtgctgaaggctaatcagtctctgaaacacctacgtctttctgccaacgtgctgctcgacgagggggccatgttgctctataagacaatgacacggcctaaacatttcttgcagatgctctctttggagaactgccgactcaccgaggctagttgtaaggatcttgctgcagtactcgtcgtgagtaagaaactcacacatctttgtctagcaaaaaatcctattggggatacaggagtgaaatttctctgcgaggggctctcgtatcccgactgtaaacttcagaccctggttctgcaacaatgctctatcaccaagctcggttgcaggtacctgagtgaggccttacaggaggcttgtagtctcacaaacttggacctctccatcaaccaaatcgcccggggcttgtggattctttgccaagccctcgagaatcccaactgtaacctgaagcacctcagactctggagctgttccctgatgccattttactgccagcatctcggttcggctttgttgtccaaccagaagcttgagactctagatctggggcagaaccacttgtggaagtctgggatcatcaaactgttcggcgtcttacggcagcgaacaggttctctcaaaatcctcagactgaagacttatgagaccaacttggagatcaagaaacttctcgaggaggttaaggagaaaaatcctaagttgacaatagattgcaacgctagtggcgcaacagccccaccgtgttgtgactttttttgttag

SEQ ID NO: 238309 - DNA, 3030 bp, Artificial Sequence
  derived and/or modified sequence
atgaccagtccccagctggagtggaccttacagacgctgcttgagcagctcaacgaagatgaactgaagtcgttcaaaagcctgttatgggcgtttccgctggaggacgtgttgcagaaaaccccttggtcagaagtggaggaggccgacgggaaaaaactggccgagatactcgtaaacacgtcttccgaaaattggatcaggaatgcaacagtcaacattctggaggaaatgaatcttacggaactctgcaagatggccaaggccgaaatgatggaggacggccaggtccaggagattgataaccccgagctgggcgatgccgaggaggatagcgagctggctaagccaggtgagaaggaagggtggaggaactcaatggaaaaacagagcctcgtgtggaaaaacaccttctggcagggcgatattgataattttcacgacgacgtgactctgaggaaccagcgcttcatcccattcttgaatcctcgaactccaaggaaactgaccccctatacagtggtcttgcatgggcccgctggcgttggcaaaactactctggcaaaaaaatgcatgcttgactggaccgattgtaatctgtcaccaactctccgctatgctttttacctctcctgtaaagagctgagtagaatgggtccatgtagttttgcagagctgattagcaaagattggccagagctccaagatgatatcccatctatcttggctcaagcacaaaggatcctgtttgtcgtggatggcttggacgaacttaaagtgcctccaggggctcttatccaagatatctgtggcgactgggagaaaaagaaacccgtcccagtcttactcgggagcctgctcaaaaggaaaatgctcccacgcgcagcccttttagtgaccacacgcccacgggcactccgcgacctacagcttcttgcgcagcaaccaatctacgtgagagtcgaaggcttcctcgaagaggataggcgggcctattttctcaggcattttggtgatgaggatcaggccatgcgcgcgtttgagctcatgcgatccaatgctgccctttttcagctcggaagtgctccagcagtgtgttggattgtgtgcacaacactgaaactgcagatggaaaagggagaggatcccgtgccaacatgtttgacaaggaccggactattcctcagattcttgtgttctcgctttccacagggggcacaattgagaggcgctctgagaacattaagcctgctcgctgcccagggactttgggctcaaatgagcgtgttccatcgcgaggatctcgagcggcttggggtacaagaatccgacctgaggctctttttggatggagatatactccgccaggatagagtgagtaaaggctgttactcttttatccacctgagctttcagcaatttttgacagcccttttttacgcgctggagaaggaggagggcgaggaccgggatggtcacgcgtgggacataggcgacgtacagaaactcttgagtggggaggagcgccttaagaatccagacttgatccaggttggacatttcctattcggcctggcaaatgagaaacgtgccaaagagttagaggctacattcggatgcagaatgtcacccgacattaagcaagaactacttcagtgcaaagctcacctgcacgcgaataaacctcttagcgttaccgacctaaaggaagtattaggctgcctgtatgaaagccaggaggaagagctggctaaggtcgtggttgctccgtttaaagagatttcgatccacctcacaaatacctcagaagtgatgcattgctcattctctctgaagcattgtcaggatctccaaaagctgtcattgcaggtggctaagggagttttcctagaaaactacatggactttgaactggacattgaatttgaatcgtccaattccaacctgaaattcttagaagtcaaacagagtttcctctcagactcatctgtgcggatcctgtgcgatcatgtcacacggtctacatgtcacctgcagaaagtcgagatcaaaaatgtcactccggatacagcgtaccgtgacttttgcctggcgtttatcggaaaaaaaacacttacgcatttaaccctcgccgggcatatcgagtgggagcggaccatgatgctgatgctctgtgatttgctccggaatcacaaatgtaatttgcagtatttacgtctgggtggacattgcgctactccagaacagtgggccgagttcttttacgtccttaaagccaatcagagcctaaagcacctgagactttccgccaacgttttgctggacgagggggcgatgctgctgtacaagacaatgacgcgaccgaaacacttcttgcagatgctgagcctggaaaattgtagactgacagaagctagttgtaaagatctcgcagccgtgctggtcgtgagtaaaaaactgacgcacctctgcctggcgaagaacccaattggcgacacaggcgtgaaatttctatgcgaggggttgtcttaccccgactgcaaattgcagaccctggtcctccagcagtgctcaattactaagctcgggtgtagatatctgagtgaagcgctgcaggaagcctgcagcctgaccaatctggatctgtctattaaccagatcgcgcggggcttgtggatcctgtgccaggcactagagaatcctaattgcaatcttaagcatcttcgactgtggagttgctcactgatgccgttctattgtcagcatctaggaagtgccttgctgtccaatcaaaaactcgagacccttgacctaggccagaatcatctctggaagtcaggcatcatcaaactgttcggcgtcttacgacagcgtacgggctctttgaaaattctgcgcctcaagacctacgaaacgaacctggaaattaagaagctactggaagaggttaaggagaagaatcccaagttaaccatcgattgcaatgcaagtggcgcgaccgccccaccctgttgtgattttttttgctag

SEQ ID NO: 238310 - DNA, 3030 bp, Artificial Sequence
  derived and/or modified sequence
atgacttcgccgcagctcgaatggaccctgcagaccctgctggagcaactgaacgaagacgagctgaagtccttcaagtccctgttgtgggccttccctctcgaggacgttcttcagaagacaccctggtccgaagtagaggaagcggatggaaagaaactcgccgagatcctggtgaacacttcgagtgagaactggatcagaaacgccactgtgaacatcctcgaggaaatgaatctaactgagctctgtaagatggccaaagctgaaatgatggaggacggacaagtgcaggagattgacaatcccgagctgggggacgctgaagaggatagcgaattggctaagccgggagagaaagagggctggagaaactcaatggagaaacagtccttagtgtggaagaatacgttttggcagggagacattgataattttcacgatgatgtgaccctaaggaatcagcggttcattcccttcctaaacccaagaactccacgaaaactaaccccttacaccgtagtgttgcacggccccgcaggggtcgggaagacaaccctggctaagaaatgcatgctggattggactgactgtaatctgagtccaaccctccggtacgcattttacctttcttgcaaagagttgtcccgaatgggaccatgcagttttgcagaactcatctccaaggactggcctgagcttcaagacgatataccctcaatccttgctcaggctcagcggatcttgtttgtggttgatggcttggacgagcttaaagtgccacctggagccctcatacaggacatatgtggagattgggaaaagaaaaagccagtacctgtacttttgggctcactactgaaaaggaaaatgctgcctcgcgcagctctcttggtaacaaccagaccgcgagctctgagagatctccaactgctcgcccagcagcctatctatgtacgcgtggagggtttcttggaggaagacaggagggcctacttccttcgccattttggagatgaggaccaagcaatgagggcatttgagttgatgcgcagcaatgctgccctcttccagctaggctcggcccctgctgtgtgctggatcgtttgtaccacattaaaattgcagatggagaagggagaggacccggtgcccacttgtttgacacgaaccgggttgttcctgcggttcctgtgctctagatttcctcaaggcgcgcagctgagaggggccctgagaacattaagtctgctcgcggcacagggattatgggcccagatgagtgtcttccatcgcgaagacctcgagcggctgggcgtgcaggagtccgacctgagactctttttggacggagatatactcaggcaggatagggtcagtaagggatgctactcttttattcacttaagcttccagcagtttctcaccgcacttttttatgcactcgagaaggaggaaggagaagacagagatgggcatgcatgggatatcggcgatgttcaaaagctcctctctggcgaagagaggctgaaaaaccccgacttaattcaggtagggcattttctcttcggccttgctaatgaaaaacgcgccaaggagttagaagccacgttcggctgccggatgtcaccagatattaaacaggaactcctgcagtgcaaagcccatttacatgcgaacaaacctctcagtgttacagatttgaaagaggtgctcggctgcctctacgagtcccaggaggaagagctggccaaggtcgttgtcgcgccttttaaggaaatctctattcatctgactaacacatctgaggtgatgcactgctcctttagcctcaagcattgccaagacctccaaaaattgagcctgcaggtggcaaagggtgtttttctggagaattacatggactttgagcttgacattgagttcgaatcttcaaattctaatctaaaattcctggaagtgaagcagagcttcctctctgattcctcagtgcgaatcctgtgcgatcacgtgacaagaagcacctgtcaccttcaaaaggtggagataaagaatgtgactccagataccgcctatcgcgacttttgcttagcctttatcggaaaaaaaacactaacacatctgaccctggccggccacattgaatgggagaggactatgatgctcatgctctgcgaccttttgaggaatcacaaatgcaatctgcaataccttcggctgggcggtcactgcgcaacacctgaacagtgggctgagttcttttatgtcctgaaggctaatcagtccttgaagcatctccgactgagtgccaatgttctgctggacgagggggctatgcttctctacaagacaatgacgaggcctaaacacttcctccagatgctctcactcgagaattgtcgcttgaccgaggcttcatgcaaagatctagcagcagtgcttgtcgtctcaaaaaagctcacccatctgtgccttgccaaaaaccccataggagacactggagtgaagtttctctgtgagggactgagttacccagactgtaaactgcagactctcgtgctacagcagtgttctatcacaaaacttggatgtaggtatttatccgaagccctgcaggaagcctgtagtttaactaatctcgacctgtctatcaaccagatagcgagaggcctgtggatcctttgtcaggctctggaaaaccccaactgcaatctgaagcaccttaggctttggtcctgcagcctgatgccattctattgccagcatctgggcagcgctctgctgagcaatcaaaagttggagactctggatctgggccaaaaccacttgtggaagtccggcattattaaactcttcggggttctcagacaacggactggctctctgaagatccttcgcctcaagacatacgaaacaaatctggagattaagaaacttctggaggaggttaaagaaaaaaaccccaagcttactatcgattgtaacgcatctggagctaccgcccccccatgttgcgatttcttttgttag

SEQ ID NO: 238311 - DNA, 3030 bp, Artificial Sequence
  derived and/or modified sequence
atgacctctcctcagctggagtggacactccagacactgcttgagcagttgaacgaggacgagcttaaaagttttaaatctctcctgtgggcttttcctctcgaggatgtactccaaaagacaccgtggtccgaagttgaggaggctgatggcaagaaactggcagaaatcttagtgaacacctcatctgagaactggattcggaatgcaactgttaacatcctggaagagatgaacttgacagaattatgcaagatggccaaggccgaaatgatggaggatggccaggtgcaggagattgataaccccgagttgggagatgctgaggaagacagtgaactcgcaaaaccaggcgaaaaagagggatggcggaactcaatggaaaagcagagcctggtgtggaagaataccttttggcaaggggacatcgataattttcacgacgatgtgaccctccgtaaccaaaggttcataccctttctcaacccaaggaccccacggaagctgacaccttacaccgtggtcctccatgggcccgccggcgtggggaagacaacgctcgccaagaagtgtatgctggattggactgattgcaatctgagtccaacgctgcggtatgctttctacctcagctgcaaggaactctcccggatgggaccttgttcttttgcagagttgatctcaaaagattggccggaacttcaggacgatattccctctattctggcccaggcccagcgtatcctctttgtggtggatggtctggatgagcttaaggtgcccccgggtgcgctgatccaggatatctgcggcgactgggagaaaaagaagcccgttcccgtgctgctcgggtcactgctcaaacggaagatgctgcctagggctgccctgttggtgacaacccgtcccagggcactcagagatttacagctcctggctcaacagcccatctatgtgcgcgtcgaaggattcctggaggaagatcgccgggcatacttcctgcgccacttcggggatgaggaccaggcgatgcgcgcctttgaactcatgcggtctaacgccgctctgttccaattgggaagtgctcctgcagtctgctggattgtatgtaccactttgaagctgcagatggaaaagggtgaggacccggtccccacatgcctcacgcgaaccggattgtttctacgcttcttgtgcagccgctttcctcagggtgcgcagctgcgcggcgccctgcggacactttccctcctagcagcccaaggactctgggctcagatgagcgtgtttcaccgggaagaccttgagcgcctcggggtgcaggaaagtgatcttcggctgtttctggacggggacattcttcgacaggacagggtctctaaagggtgctactctttcatacacctcagcttccaacaatttctcaccgcactcttttatgccttagaaaaagaagaaggtgaagacagagacggccacgcctgggacatcggagacgtgcaaaaactcctgagcggtgaggagcggcttaagaaccctgacctgattcaggtgggccatttcctcttcgggctagcaaacgagaagcgtgctaaggagcttgaagcaacattcgggtgtcggatgtctcctgacatcaaacaggagcttttacaatgcaaagcccacttgcatgcaaacaaacccctgagcgtgacagatctgaaggaagtgctgggttgtttatacgagagccaggaagaggagctggccaaggtagtcgtggcccccttcaaagagataagtatccatctgacgaacacttcagaggtaatgcactgtagcttctccttaaagcactgccaggacctccagaaactcagtttgcaggtggccaaaggagtcttcttagagaactacatggatttcgagctcgacattgagtttgaaagttccaacagcaatctcaaatttcttgaagtcaaacagagcttcctgtcggattcatccgtacgaattttatgtgatcacgtcacgcgttctacatgtcacttgcagaaagtggaaatcaaaaacgtgacgcctgacacagcctaccgggatttctgtctggcttttattgggaagaaaactctgacacacttaacactcgctgggcatatcgaatgggaacgcacgatgatgctgatgctttgcgatctactgcgtaatcacaagtgcaacctgcagtacctgaggctgggaggtcactgtgctacgcctgaacagtgggcagaatttttttacgtgctgaaggctaaccagtcgctgaaacacctccgtctgagcgcgaatgtcctcctggatgagggtgccatgctgctctataagacaatgacccgcccaaagcattttcttcagatgctgagcctcgaaaactgtaggctgaccgaagcttcatgtaaggatttggcggctgttctggtggtatcaaagaagcttacccacctgtgcctcgcaaaaaacccaattggggacacgggcgtgaaatttctgtgcgagggactctcatatcctgactgcaagttgcagacccttgtcctgcagcagtgttcaatcactaagctcggctgcagatatctcagcgaggccctgcaagaggcctgttcattaacgaacctggacttatcaatcaatcaaattgctcgtgggctgtggattctgtgccaggctctggaaaatccaaactgcaacctcaagcacctcaggctctggagctgttctcttatgccattctattgccagcatttgggctccgctttgttaagcaaccagaaactggagacacttgacctggggcagaaccacttgtggaagagcggaattatcaagctgtttggtgtattgcgccagagaaccggatcgcttaaaatcctgcggctgaaaacttacgagaccaatcttgaaatcaagaagctgctggaggaagtgaaggagaaaaaccccaagctcaccattgactgcaatgcatccggggctactgcccctccatgttgcgacttcttctgctag

SEQ ID NO: 238312 - DNA, 3030 bp, Artificial Sequence
  derived and/or modified sequence
atgaccagtccccagctggaatggactctgcagactctactggagcaactcaatgaagatgagctgaaatcattcaaatccttgttgtgggctttcccactggaggatgtgctgcagaaaaccccatggagtgaggtggaagaagctgatggcaaaaagcttgcagagatactggtgaacacatcatccgaaaactggataaggaatgctaccgttaacatcctggaagaaatgaacttaaccgagctgtgtaagatggccaaagccgagatgatggaagatggccaagtgcaggaaatagataacccagaacttggagatgccgaagaggattccgagctggccaagcccggcgagaaggaaggctggcgcaacagtatggaaaaacagtcactggtgtggaagaacaccttctggcagggggatattgacaactttcacgacgacgtgacactaaggaaccaacgcttcattccctttctcaatcctcggacaccacgaaagctgactccttataccgtggtgctgcacggccctgctggcgtcgggaagacaaccttggcaaaaaagtgtatgctagattggactgattgtaacctttcgccaacactgcggtacgctttctatctaagttgcaaggagttgtctcggatgggcccttgctcctttgcggagctgatctctaaagactggccagaactgcaagacgacattccctctatactggctcaagcccagcggatattatttgtagtggacggtctggacgaacttaaagtacctccgggagctctcattcaggatatctgtggagactgggaaaagaaaaaaccagtccccgtacttcttgggagtctgttaaagcggaagatgctcccacgcgccgcactactggtaaccacccgcccaagggcacttcgtgatctgcagctgcttgcacagcagcctatctatgttcgggttgaaggattcttggaggaggacaggcgggcttatttcctgcgacactttggagatgaagatcaggctatgagggcgttcgaactgatgaggagtaacgcagcactgttccagctgggcagtgcccctgccgtctgttggatcgtgtgcaccactttaaaattgcagatggagaagggggaggatccagtccccacctgcttgacgcgcaccggcttgtttctgcggttcctctgcagccgcttcccacagggagcacaactgcggggagccctacggacgctgtctctcctggctgcacagggactctgggcgcagatgagtgtatttcatcgggaagacttagaacgcttgggtgtgcaggagtccgatctgcgactgttcctcgacggcgacatacttagacaggaccgggtcagtaaaggctgttattccttcatacacctgagcttccaacagtttctgaccgctctgttctacgcgctggaaaaggaggaaggagaggaccgagacggccacgcatgggacatcggcgatgttcagaaactgttgagtggagaagagcgcttgaaaaatccagacctgattcaagtcgggcactttttatttggccttgctaacgaaaagagagccaaggaattggaagcaactttcggctgtcgcatgtcaccagacatcaaacaggaactgctgcagtgcaaagctcacttgcacgcgaataaacctttgtctgtgacggacctgaaagaggttctgggctgtctctacgaatcccaggaggaggaactcgcgaaggtagtggttgcgccattcaaagagatcagcatccatttgacaaacacctctgaagtgatgcactgcagctttagtttaaagcattgccaggacttgcagaagctgtccctgcaggtggccaaaggcgtatttctggaaaactacatggactttgaactggatatcgaatttgagagctccaacagcaacctcaaatttttggaggtgaagcagtccttcctgagtgatagctctgtgcggatcctgtgtgaccacgtgacacggtctacatgtcatctgcaaaaggtcgagatcaagaacgtgactccggacaccgcctatcgagacttttgcctggctttcatcggcaagaagacactcacccacctgacgttagctggacatattgagtgggaaagaactatgatgttgatgctgtgtgacctcctgaggaaccacaaatgtaatctgcaatacctaagactcggaggccattgcgccacgccagagcagtgggctgaattcttttacgtactgaaagctaaccaaagcttgaaacacttgcggctgagtgccaatgtactgctcgacgagggggccatgttattatacaaaacgatgacccgaccaaagcactttctgcaaatgctgtcacttgaaaactgcaggcttacggaggcctcctgcaaagatttggccgccgtgttggtggtttctaagaagctgacacacctgtgccttgccaagaaccctatcggagatactggagttaagttcctctgtgagggccttagctaccccgattgtaagctacagactctggtcttacagcagtgttctatcacaaaattgggttgtcgttacctcagcgaggccttacaggaggcctgttccctcacaaatctggacctttctatcaatcagatcgctaggggcttgtggattctgtgccaggctctcgaaaacccaaattgcaacctaaaacatctgaggctgtggagttgtagcctcatgcccttctactgtcagcatctcggtagcgccctgctcagcaatcagaagctcgagaccttggacctggggcaaaaccacctgtggaaaagtggcatcattaagctctttggtgtcctgaggcaacgaacgggttccctgaagatattgagactcaaaacctacgagaccaatctcgagattaaaaagctgctcgaagaagtcaaggagaagaatcctaaactgacaatcgactgcaacgctagtggcgccaccgccccaccctgctgtgattttttctgttag

SEQ ID NO: 238313 - DNA, 3030 bp, Artificial Sequence
  derived and/or modified sequence
atgaccagcccccagctggagtggaccctgcagaccctgctggagcagctgaatgaagatgagctgaagagcttcaagagcctgctgtgggccttccccctggaggatgtgctgcagaagaccccctggagcgaggtggaggaggctgatggcaagaagctggccgagatcctggtgaacaccagcagcgagaactggatcagaaatgccaccgtgaacatcctggaggagatgaacctgacagagctgtgcaagatggccaaggccgagatgatggaggatggccaggtgcaggagattgacaaccctgagctgggagatgctgaggaggacagcgagctggccaagccaggagagaaggagggctggaggaacagcatggagaagcagagcctggtgtggaagaacaccttctggcagggcgacatcgacaacttccatgatgatgtgaccctgaggaaccagcgcttcatccccttcctgaaccccaggacccccaggaagctgaccccctacacagtggtgctgcacggccctgctggggtgggcaagaccaccctggccaagaagtgcatgctggactggacagactgcaacctgagccccaccctgcgctatgccttctacctgagctgcaaggagctgagcaggatgggcccctgcagctttgctgagctgatcagcaaggactggccagagctgcaggatgacatccccagcatcctggcccaggcccagaggatcctgtttgtggtggatggcctggatgagctgaaggtgcccccaggggccctgatccaggacatctgtggggactgggagaagaagaagcctgtgcctgtgctgctgggcagcctgctgaagaggaagatgctgcccagggctgccctgctggtgaccacccggccccgggccctgcgggacctgcagctgctggcccagcagcccatctacgtgcgggtggagggcttcctggaggaggacagaagagcctacttcctgcggcactttggagatgaggaccaggccatgagggcctttgagctgatgaggagcaatgctgccctcttccagctgggcagcgccccagctgtgtgctggatcgtgtgcaccaccctgaagctgcagatggagaagggagaagatcctgtgcccacctgcctgaccaggacaggcctcttcctgcgcttcctgtgcagccgcttcccccagggcgcccagctgcggggggccctgcggaccctgagcctgctggccgcccagggcctgtgggcccagatgtctgtgttccaccgggaggacctggagcggctgggcgtgcaggagagtgacctgcggctcttcctggatggagacatcctgcggcaggacagagtgtccaagggctgctacagcttcatccacctgtccttccagcagttcctgacagccctcttctacgccctggagaaggaggagggggaggacagagatggccacgcctgggacattggagatgtgcagaagctgctgtctggagaggagcggctgaagaacccagacctgatccaggtgggccacttcctgtttggcctggccaatgagaagagggccaaggagctggaggccaccttcggctgcaggatgagcccagacatcaagcaggagctgctgcagtgcaaggcccacctgcacgccaacaagcccctgtctgtgacagacctgaaggaggtgctgggctgcctgtatgagagccaggaggaggagctggccaaggtggtggtggcccccttcaaggagatcagcatccacctgaccaacaccagcgaggtgatgcactgcagcttcagcctgaagcactgccaggacctgcagaagctgagcctgcaggtggccaagggcgtcttcctggagaactacatggactttgagctggacatcgagtttgagagcagcaacagcaacctgaagttcctggaggtgaagcagagcttcctgagtgacagctctgtgcgcatcctgtgtgaccacgtgaccaggagcacctgccacctgcagaaggtggagatcaagaatgtgaccccagacacagcctacagagacttctgcctggccttcatcggcaagaagaccctgacccacctgaccctggccggccacatcgagtgggagaggaccatgatgctgatgctgtgtgacctgctgaggaaccacaagtgcaacctgcagtacctgcggctgggcggccactgtgccaccccagagcagtgggccgagttcttctacgtgctgaaggccaaccagagcctgaagcacctgcggctgagcgccaacgtgctgctggatgaaggagccatgctgctgtacaagaccatgacccggcccaagcacttcctgcagatgctgagcctggagaactgccgcctgacagaggccagctgcaaggacctggccgctgtgctggtggtgtccaagaagctgacccacctgtgcctggccaagaaccccatcggggacacaggagtgaagttcctgtgtgagggcctgagctacccagactgcaagctgcagaccctggtgctgcagcagtgcagcatcaccaagctgggctgccgctacctgtctgaggccctgcaggaggcctgcagcctgaccaacctggacctgagcatcaaccagatcgcccggggcctgtggatcctgtgccaggccctggagaaccccaactgcaacctgaagcacctgcggctgtggagctgcagcctgatgcccttctactgccagcacctgggcagcgccctgctgagcaaccagaagctggagaccctggacctgggccagaaccacctgtggaagagcggcatcatcaagctgtttggagtgctgcggcagaggacaggcagcctgaagatcctgcggctgaagacctatgagaccaacctggagatcaagaagctgctggaggaggtgaaggagaagaaccccaagctgaccatcgactgcaatgccagcggggccacagccccaccctgctgtgacttcttctgctag

SEQ ID NO: 238314 - DNA, 3030 bp, Artificial Sequence
  derived and/or modified sequence
atgaccagcccccagctggagtggaccctgcagaccctgctggagcagctgaatgaagacgagttgaagagctttaaatcacttctgtgggcgtttccactcgaggatgtgcttcagaagaccccgtggtccgaagtcgaggaagcagatggtaaaaagctggcagaaatcctcgtgaatacctcatcagaaaattggatccggaatgccaccgtcaacatccttgaggagatgaaccttaccgagttgtgcaaaatggctaaggcggaaatgatggaagacggccaggtgcaggagattgacaaccccgagctgggggacgccgaggaggactccgaattagccaaaccgggcgagaaggagggttggaggaactcaatggaaaagcagagcctggtatggaaaaataccttctggcagggtgacattgataatttccacgatgacgtaaccctcaggaaccagaggttcataccctttcttaacccccgcactccaaggaaactgaccccctacacagtggtgctccacggccccgcgggggtggggaaaacaaccctcgccaaaaagtgcatgctggactggacagattgtaacctgtctccgacacttaggtacgccttctatctgtcttgcaaagagctttcgcggatggggccttgcagtttcgcggagctaatctcaaaagactggccggaactgcaggacgacatcccatcgatcctagcccaggcccagagaatcctgtttgtcgtggacggcctcgacgaactgaaggtcccacccggggcccttattcaggatatctgtggagactgggagaaaaagaagcccgtgccggttctgctgggtagcctcctcaagcgcaagatgctcccaagagccgccctcttggtgacaactaggcccagagctctgcgggatctgcagctgctggctcagcagcccatctatgtaagagtggaaggctttttggaggaagatagacgggcgtatttcttacggcacttcggtgatgaggaccaggctatgcgggcatttgaacttatgcggagtaatgccgccttgtttcagttgggaagcgcaccagccgtctgttggatcgtttgcactacactgaagctgcaaatggaaaaaggagaggaccctgtacccacttgtctgacacgtacgggcttattccttcgatttctgtgctcccggttcccacaaggcgcccagctcagaggagcactccgaactttgagtctgctcgcagcccagggactttgggcacagatgtccgtgtttcacagagaagacctggaaaggctcggagtacaggaatccgatcttcggctgtttttagacggggacattctccggcaggatcgggttagtaagggatgctattccttcattcacctctcttttcaacagttcttgaccgccctcttttacgctttggagaaggaagagggtgaggaccgagacgggcacgcttgggacattggcgacgttcagaagctgctctcgggcgaagagcgtctcaagaaccctgacctgatccaggtgggacacttcctgttcggccttgccaacgaaaagagagctaaggagcttgaggctaccttcggatgccgcatgagccctgatatcaaacaggagctcctgcagtgcaaggcccatttgcatgctaacaaacctttgagtgtgactgatctcaaggaagtcctcgggtgcctttacgagtctcaagaggaggagctagctaaagttgtcgtcgccccgttcaaagagatatctattcacctgacaaacacgtctgaggtgatgcactgttccttttcccttaaacactgccaggatttgcagaagttgtcactacaggtggccaaaggcgtcttcctagagaactacatggacttcgaactggatatcgaattcgaatccagtaacagcaacctgaaatttctggaggttaaacaaagtttcctcagcgattcatccgtaaggatcctttgcgaccacgtgacaagatcaacctgccacctgcagaaggtggagatcaagaacgtcacaccagacacagcataccgggacttctgcctcgccttcatcggtaagaagaccctcactcacctgactcttgcagggcacatcgaatgggagcgcaccatgatgctaatgctgtgcgatttgttgcgcaatcataaatgcaatctccagtacctgaggctcggggggcactgcgccactcccgagcagtgggctgagtttttctacgttctgaaagcgaatcagtctctcaaacatctgcggctgagtgctaatgtactcttggacgagggcgcaatgctcctctataaaaccatgacaagaccaaagcatttcctgcagatgttgtctctcgagaattgccgactgaccgaggcctcctgtaaggacttggcggccgttttggtggtgtctaaaaagcttacgcatctatgcctagccaaaaacccaatcggagatactggagtcaaattcctgtgcgagggactcagctatccagattgtaagctccagaccctggtgctccaacagtgctctattacaaaactcggctgtcgctatctgtccgaagccttacaggaagcatgcagtctgaccaacttagacctgagtatcaatcagatcgcgcgaggactgtggatcctgtgccaggccttggagaatcccaattgcaatctgaaacacctgcgcctctggtcttgttctttgatgccattctactgccagcatctgggttcggctctgctcagtaaccagaaattagaaaccctggatctgggccaaaatcacctatggaagtcaggtattattaaactttttggagtcctaaggcagcgcacagggagcctcaagattctcaggctcaaaacctacgagacaaacttagagatcaagaaattgctggaagaggtcaaagaaaagaaccccaaactgactattgactgtaatgcctccggcgcgactgcaccaccctgttgtgacttcttctgctag

SEQ ID NO: 238315 - DNA, 3030 bp, Artificial Sequence
  derived and/or modified sequence
atgaccagcccccagctggagtggaccctgcagaccctgctggagcagctgaatgaagacgagctgaaaagcttcaaaagtctcctgtgggcttttcccctggaagatgtgcttcaaaagaccccttggagtgaggtggaggaagccgacggtaagaagctggccgagatcctcgtgaacactagctccgagaattggattcggaacgccacagtgaatatcctggaggagatgaatttaaccgagttgtgtaagatggccaaggctgaaatgatggaggacggccaggtgcaggaaatcgacaatcccgagctcggggacgccgaagaagattcagagctcgccaagcccggtgagaaggaggggtggcgtaattccatggagaaacaatctctggtgtggaagaacacattttggcagggcgatatcgacaatttccacgatgatgtgaccctaaggaaccagaggtttataccctttttaaaccctagaacaccacggaagctcaccccctacactgtagtactacacggccccgccggtgtgggcaaaacaaccctcgccaagaagtgtatgttggactggaccgactgcaacctgtcgccgacactgcggtatgctttctacctgagctgcaaagagctgagccgaatgggaccttgttctttcgccgaattaatctccaaagattggcccgagctgcaggatgatatcccatcaattttggcccaggcccagcggatcctgttcgtggtagatgggctggatgagctgaaagtgccacctggagccctgattcaggacatctgtggggactgggaaaaaaagaagcccgttccagtcctgcttgggtcactgctgaaacgtaagatgttgccgcgcgcggctcttcttgttactacccgacctcgggcccttagggatcttcagctgctcgcccaacagcccatctatgttcgggtggaaggcttccttgaggaagatcgacgggcctactttctgaggcattttggagatgaagaccaggccatgcgtgccttcgaactgatgaggtccaacgcagccctgtttcagctcggaagcgccccagctgtgtgttggatagtgtgcaccacactgaaattgcagatggaaaaaggcgaagatcctgtcccgacatgtctgactcggacaggcctgttcctaagatttctgtgcagcaggtttccccagggcgcccagctccggggtgcccttcgcaccctatccctgttagcagcccagggcttgtgggctcagatgagtgtattccatcgcgaggatctggaacggctgggagtccaggagagtgaccttagactgtttctggatggcgacatccttcggcaggatagagtttctaaaggctgttactcgttcatccacctgtcttttcagcagttcctgactgctcttttttatgcccttgaaaaggaggagggggaggacagggatggacatgcctgggacatcggtgacgtgcagaagcttcttagcggtgaagagcggctaaaaaatccagacttgattcaggtgggccacttcctgtttggactcgcaaacgagaagagagcgaaagagttggaagcaacatttggctgtagaatgtcccccgatattaagcaggaactgctgcagtgcaaggcccacttgcatgcaaataagccactaagcgtgacagacctgaaggaggtgctggggtgtctctacgaatcccaggaagaagagcttgcgaaggtagtggttgcgccatttaaggaaattagcatccatttgaccaacacctccgaggtgatgcattgctccttctcactgaagcattgccaagatttgcaaaagttaagcttgcaagtcgcgaagggcgtttttctggagaactacatggatttcgaattagatattgaattcgagtcttctaactcgaacttgaagtttctcgaggtgaaacaatcattcttgtcagactctagcgtgcggatactctgtgatcacgtcacccgttcaacatgtcatctgcagaaggtggagatcaagaacgtcacaccggatactgcgtaccgtgatttttgcctggcttttataggcaagaagaccctgacacaccttacacttgcgggccatatcgaatgggagagaactatgatgctcatgctatgcgacctgcttcgaaatcataagtgcaacctccagtaccttcgtctcggagggcattgcgccactccagagcaatgggccgaatttttctacgtgctgaaggcgaatcagagcctaaagcacctccggctcagtgcgaatgtgctcctggacgaaggggccatgctgctctacaaaacgatgaccaggccaaaacacttccttcagatgctgtctctggagaattgtaggctgactgaggcgagttgcaaggacctggctgcggtcctagtggtgagcaagaagttgacgcacctttgcctggccaagaaccccattggtgacaccggagttaaatttctgtgtgaggggcttagctaccctgattgcaaactccaaaccctggtcttacagcagtgctctataactaagctgggctgcaggtacctgagtgaggcattgcaggaagcttgctccctgacaaacctggacctcagcattaatcagatcgcccggggcctctggatcctctgtcaggctctggagaaccccaactgtaacctcaagcatctgcgcttgtggtcctgtagcttgatgcccttctactgtcagcacctggggtccgcactgctctcaaaccaaaagcttgaaaccctggatctgggacagaaccacttatggaagtccggcatcattaagttgtttggtgtgcttagacagaggaccggttccctgaagatcctgcgtcttaaaacatatgagacaaacctcgagataaagaaactcctggaagaagtgaaagagaagaatcccaagctcaccattgattgcaacgcaagcggtgccaccgcaccaccatgttgcgattttttttgttag

SEQ ID NO: 238316 - DNA, 3030 bp, Artificial Sequence
  derived and/or modified sequence
atgaccagcccccagctggagtggaccctgcagaccctgctggagcagctcaacgaagacgaactgaagtctttcaaaagccttctgtgggcattccctctggaggacgtactgcaaaaaacaccttggtctgaggtggaagaggctgatggcaagaagctcgcagagattctagtcaacaccagttctgagaactggatccgtaacgcaacagtcaatatactcgaggaaatgaatctgaccgaactctgcaagatggccaaggcggaaatgatggaggatggacaggttcaggagattgataaccctgaactgggagatgccgaggaagactccgagctcgccaagcccggagaaaaggaagggtggaggaactcgatggagaaacaatcactcgtgtggaagaatacattctggcagggagacatagataatttccacgacgatgtaacactgcgaaatcaacggtttattcctttcctgaatcctaggactcctcgaaaactgacaccctacacagtagtgctgcacgggcccgctggagtgggaaaaactacccttgcaaaaaagtgcatgctggactggactgactgtaatctctctccaacactgagatacgctttctacttgagctgcaaagaactctctcgcatggggccatgcagcttcgctgagcttatcagtaaggactggcccgaactacaggatgacattccatccattctcgctcaagcgcaaaggattctgttcgtggtggatggtcttgacgaacttaaagtgccacccggcgcactcattcaggacatttgcggagattgggaaaaaaaaaagcctgtgcctgtgttgctgggaagcttgctgaaacggaaaatgttgccacgagccgcccttttagtcactactaggccccgcgccttacgggacctgcagttactcgctcagcagcctatatatgtgagagtggagggtttcctcgaggaagacaggagagcgtacttccttcgccactttggggatgaagaccaggctatgcgcgcgttcgagctgatgagatctaatgcagcgttgtttcagctcggcagcgcccccgctgtttgctggatagtttgtacaacactcaaactgcagatggagaagggtgaagatccggtgcccacatgcctgactcgaaccggcctgtttctgcgttttctttgtagcaggtttccccaaggcgcccaactgcgcggcgcacttcgtacactgagccttttggctgcgcagggactctgggcacaaatgtccgtgtttcaccgggaggatttggaaaggctgggcgtacaggagagcgacctcaggctgttcctggatggggacatattgcgacaggacagggtgagcaagggctgctactctttcattcatctctccttccagcaatttttaaccgcactcttttatgccttagaaaaagaagaaggcgaagatcgggacggtcacgcttgggatattggtgacgtgcagaagctgctaagcggggaggaaaggctcaaaaaccccgatcttatccaggtgggtcacttcctgttcggcctggccaacgagaagcgggctaaggagctagaggcaacctttggctgcagaatgtcgcctgacatcaaacaggagctcctgcagtgtaaggcccacttgcatgcaaacaaaccactgtctgtgacagacttgaaggaggtactaggctgtttatatgaatcccaagaggaagaactggcaaaggtggtggtggcaccatttaaagaaatatcaatccacctcacaaacacatcggaggttatgcattgtagcttctctctcaaacattgtcaggacctgcaaaagctatctctccaagtggcaaaaggcgtgttcctggagaactacatggattttgagcttgacatcgagttcgagagctcaaacagtaaccttaaatttctcgaggtgaaacagtctttcttaagcgacagtagcgttagaattctttgcgatcacgtgaccagaagcacatgccacctgcagaaggttgaaatcaagaatgtaacgccagacacagcttatagagatttctgcctagcctttattggcaagaagaccttaacccacctaaccctagcaggccatatcgagtgggaacgaaccatgatgctcatgctgtgtgatctgttacgcaatcataaatgtaatctccagtatttgaggcttgggggtcactgtgcaacgcccgagcagtgggctgaatttttctatgtcctaaaagctaaccagtccttaaaacatctcaggttgagcgccaacgtcctgttggatgagggcgcgatgttgctatataagacgatgacaagacccaaacattttcttcagatgctgtcacttgaaaattgccggctaactgaggcatcctgcaaggacctggccgctgtactggtcgtgtccaaaaagctaacccatttgtgtttggctaagaaccccataggcgatacaggggtgaagtttctgtgcgagggtctatcataccccgattgtaaactacaaactttggtgttgcaacagtgctccattactaaactggggtgtcgatacttgtcagaggctcttcaggaagcctgctctttaactaaccttgatctctcaatcaaccagattgcccggggtctgtggatattatgccaggcattggagaaccctaattgtaatctcaagcatctgcggctgtggtcttgtagtctgatgcccttttactgtcagcatctgggatctgcactcctgagtaatcagaagctggagaccctagacctcggccaaaaccatctgtggaaatcagggataattaaactgtttggggtgctgcggcagaggactgggtcgttgaaaattctcaggctcaaaacgtacgaaacgaacctcgagattaaaaagcttctggaggaggtgaaagagaaaaatccaaagctcaccatcgattgtaacgcgagcggggccacagcaccgccttgctgtgatttcttttgttag

SEQ ID NO: 238317 - DNA, 3030 bp, Artificial Sequence
  derived and/or modified sequence
atgaccagcccccagctggagtggaccctgcagaccctgctggagcaactgaatgaggatgagctcaaaagcttcaaaagtctgctatgggccttccctttggaggatgtgctccaaaagaccccatggtctgaagttgaggaggccgacgggaaaaagctggctgagatcctggtgaacacttcgtcagaaaactggatccgcaatgcgacagttaacatcctggaagagatgaatctgactgagctatgtaagatggcaaaagcagagatgatggaagatggccaggtgcaggagatcgataacccggaactcggggatgctgaagaggactccgagctcgctaaaccaggggagaaggagggctggaggaacagtatggagaagcagtctcttgtgtggaagaatacattctggcagggagacattgacaacttccacgacgacgtgacactcaggaaccagcgtttcattccattcttaaatcctcggacacctagaaagctgactccttacaccgtggtcctgcacgggccagcaggagtcggcaaaaccacgctggcaaagaagtgtatgctcgattggacagactgcaatctcagccctacactgcggtacgcattttatttgtcatgcaaagaactttcgagaatggggccatgctcctttgccgagctgatcagcaaggattggcccgagctgcaagacgacatcccctccattctggcccaggctcagaggattctgttcgtcgtggatggtctcgatgaactgaaggttccccccggagccctgattcaagatatctgcggtgactgggagaaaaaaaaaccagtccctgtcctcctggggagccttctgaagaggaaaatgctgcctcgcgccgctcttctggtgactaccaggccgcgagctctgcgggatctgcagcttctggctcagcagccaatctacgtcagggtggagggcttcctcgaagaggaccgacgagcttatttcctgcgccatttcggcgatgaagatcaggccatgcgagctttcgagctcatgagatccaatgctgctctctttcagttgggttcagctcccgcggtctgctggatcgtgtgcactaccctgaagctccagatggagaagggagaggatccagtccccacctgtctgaccaggaccggcctttttttaaggtttttatgctctcggttcccacagggagcgcaactgcgaggcgcattgcgcaccctatcactgcttgcggcccagggcctctgggcccagatgtccgtctttcacagagaagatctggagcgtctaggagttcaggagtctgatctgcggctgtttctggacggagatatactgcgtcaggacagggtgtcgaagggctgttactcctttatccacttgagctttcagcagttcttgactgctcttttctacgccctggagaaagaggagggcgaggatagggatgggcatgcatgggatatcggcgacgtgcagaaattgctgagtggcgaggagagactcaagaacccagatctaatccaagtcggacacttcttgttcggcctggctaatgagaaaagggcaaaggaactggaagcgacattcgggtgtagaatgtcccctgatataaaacaggaacttctgcaatgcaaagcacaccttcatgcaaacaagcctctgtcagtaacagatctgaaggaggtgctcggatgcctgtatgaatcccaggaggaggagttagcgaaggtggtcgtggctccgtttaaggaaatctctattcatttgacaaatacatctgaggtcatgcattgttctttctcactcaagcactgccaagatctgcaaaaactgtccttacaggttgccaagggcgtgttcctagaaaactatatggactttgaactcgatatagaatttgaaagcagtaacagtaatctgaagtttttggaagtgaagcaatccttcctttcagattccagtgtgcgcatcctgtgtgaccacgtgactagaagcacttgtcacctccagaaagttgaaattaaaaatgtgacacccgacacagcctaccgggatttttgtctggccttcattggcaagaagacgctgactcatctgacactggcagggcacattgagtgggaaagaactatgatgcttatgctgtgcgatttactccggaatcacaagtgcaacctgcagtacctccggctgggcgggcattgtgccacgcctgaacaatgggccgagttcttttacgtgctgaaagccaaccagagtttgaaacacctgcggttgagcgccaatgtgttgctcgatgagggagccatgctgctgtacaagaccatgactcggccgaaacatttcttgcagatgcttagtctcgagaattgccgcctgacagaagcaagctgcaaagacttagcagccgttcttgtggtcagcaagaagcttacacacctttgtttagctaagaatcccatcggtgataccggagtgaagttcttgtgcgagggtctgtcctacccagattgcaagctgcagactctcgtgctccagcagtgttccatcaccaaactgggctgtcgatatctgtccgaagcgttgcaggaggcctgctcccttaccaacttagatctcagcatcaaccagatagccaggggactgtggatcttgtgtcaggccctggagaatcccaattgtaaccttaagcacctccggctttggagttgcagccttatgcccttctactgtcagcacctcggatctgcgttgctttccaatcagaagctggagacgcttgatcttggtcagaaccacctgtggaagagcggaattatcaagctgtttggcgtgctcaggcaacgaacaggcagcctgaagattctgcggctgaaaacatatgaaactaacctggaaatcaagaagctgttggaggaagtgaaagaaaagaacccaaaattgacaatcgactgcaacgcctctggtgccacggccccaccctgctgtgatttcttttgctag

SEQ ID NO: 238318 - DNA, 3030 bp, Artificial Sequence
  derived and/or modified sequence
atgaccagcccccagctggagtggaccctgcagaccctgctggagcaacttaacgaggacgagctgaagagcttcaagtccctcctgtgggcctttcccttggaagatgtgctgcagaagactccatggagcgaggtagaggaggccgacgggaaaaaattggctgagatattggtaaatacttcctctgagaattggatcaggaatgcaacggtgaacatccttgaagaaatgaatcttacagaactctgtaaaatggctaaagccgaaatgatggaggatggacaggttcaggaaattgataacccagaattaggggatgcggaagaggattccgagctagcgaaacccggagaaaaggaagggtggcggaatagtatggagaaacagtccctcgtatggaaaaataccttttggcagggagacatagataacttccacgatgatgtaactttaagaaaccaaagatttattccatttttaaatccaaggaccccgagaaaactgacaccgtacacagttgtcctgcatggccccgcaggcgtcggcaagacaaccctagccaagaagtgtatgctggactggacagactgcaacttgtcacccaccctgaggtatgcattctacctttcatgcaaggagctgagtcggatggggccatgttcattcgctgagctgatatccaaggactggcccgaactgcaggacgatataccatctattctggcccaggctcagcgcatcctgtttgtagttgatgggttggatgagctgaaagtaccgccaggcgccctgatccaggatatctgtggcgactgggagaaaaaaaagccagtcccggtgcttctggggagcttgctcaagcggaagatgctgccccgagccgcattacttgtcacgaccagacctcgcgcccttcgcgacctgcagctgctggctcagcagccaatttatgtaagagttgagggcttcttagaggaagaccgtagggcatacttcctgagacacttcggtgatgaggaccaagcgatgagagcctttgagttgatgaggagcaatgccgctctattccagcttggatctgccccagctgtgtgttggatagtttgtacaacacttaagctacagatggagaagggggaggatcctgtgcctacctgcctgacaagaaccggtcttttcctgcggtttctgtgttcacgctttccacagggagcccagcttcggggcgccctgcgcaccctttccctactagccgcccaaggattgtgggcgcaaatgtcagtgtttcacagagaagacttggaacgactgggagtacaggagtccgacctgcgattgttcttggacggcgatatcctccgacaagatagggtgagtaagggatgttacagttttatccacctctcgttccagcaattcctaaccgccctcttctacgcactggagaaggaagagggcgaggatagagatgggcatgcatgggacataggggatgtacaaaaactgctctcaggggaggaacggttaaaaaacccggacctgatccaggtgggacacttcctattcggtctagctaacgaaaagcgagcaaaggaactcgaagcgaccttcggctgtcgaatgtcaccagacattaagcaggaactcttacagtgcaaagctcacctgcacgccaataagccgctgtccgttacggatttgaaagaagtgttgggatgtctttatgagagccaagaagaagaactggctaaggttgtggtggccccctttaaagaaatcagcattcacttgacaaacactagcgaggtgatgcattgctcattttccttgaaacattgccaggacctgcagaaactgtcactgcaggtcgccaagggtgtctttctggagaactacatggattttgaactggacatcgagttcgaatcatcaaattcaaatctcaagttcctggaagttaagcagagtttcctgtcagactcttcagtccggattttatgcgaccacgtgactaggtctacatgtcacctgcagaaggttgagattaagaacgtgactcccgacactgcatatcgtgacttctgtctggcgttcatcggtaaaaagaccctcacgcacttaaccctggcaggacatattgaatgggagaggaccatgatgttgatgctgtgtgatctgttaaggaaccataaatgtaacctgcaatacctccggcttggtggccattgtgctacaccagaacagtgggcagagtttttttacgtactcaaagccaaccagagcctgaaacatctgcgactgagcgctaacgtactgctggatgagggggccatgctcctgtacaaaacaatgacacgtcctaagcactttctgcagatgctgtcactggaaaattgccgcctcacggaagccagttgcaaggaccttgcagccgtgctggtggtctcaaaaaaacttactcacctgtgtctggcaaagaatccaatcggtgatactggcgtgaagttcctctgcgaaggtctctcatacccggactgtaagctccagacattagtactgcaacagtgcagtattaccaaactcggatgtcgctacctctctgaggccctgcaggaggcctgctctttgaccaacctagatctctcaataaatcaaattgccagagggttatggatcctgtgccaggccctggagaatcctaactgcaacctcaagcacttgcgattgtggtcttgttcccttatgcctttctactgtcagcatttggggagtgctctactgagtaaccaaaagttggaaaccctggacctgggccaaaaccatctgtggaaatcaggtattattaagctgtttggagtgctgcgtcagagaactggttctctgaagattcttcgtctcaaaacatacgaaacaaatctggagataaagaagctgcttgaagaagtgaaggagaaaaaccctaagctaacaattgactgcaatgcgagtggcgcgactgcccctccatgctgtgacttcttctgctag

SEQ ID NO: 238319 - DNA, 3030 bp, Artificial Sequence
  derived and/or modified sequence
atgaccagcccccagctggagtggaccctgcagaccctgctggagcagttgaatgaagacgagcttaaaagctttaagtctctgctatgggcgtttccgttggaagatgtgcttcagaagacgccttggtccgaggtggaagaagcagatggcaagaagctggcagaaattttggttaatactagctccgagaattggatcagaaatgccaccgtaaatatcctcgaggaaatgaatctcacagaactgtgcaaaatggccaaggcggagatgatggaggatggccaagttcaggagattgataatcccgagctgggggatgctgaggaagacagtgagcttgcgaagccgggagagaaagaggggtggagaaattctatggagaagcagtcccttgtgtggaagaataccttctggcagggagatatcgacaacttccatgatgacgtaaccctgcgcaaccaacgattcatcccattcctgaaccctcgtacaccacgcaaactaaccccatacacggtggtccttcacggccctgccggggtcggaaaaactactctcgccaaaaaatgcatgctggattggacagactgcaatctctctcctacattgcgatatgccttttaccttagctgcaaagaactgagccggatggggccttgctcattcgcagagctgatttctaaggactggcccgaactgcaggacgacattccttctattttggcacaggcccagagaattttgtttgtggtcgatggtttggacgaactgaaagttccccctggcgctctgattcaggatatctgcggtgactgggaaaaaaagaaaccagttcctgtgctgctggggtccctgctgaagcgaaaaatgctcccacgggccgccctgttggtcactactaggccgcgtgccctcagggacctgcagctgctggcccagcagcctatttatgtgagggtcgaagggtttctcgaggaagatagaagagcatacttcctaagacatttcggggacgaggatcaggccatgcgcgcctttgagctaatgaggagcaatgctgctctgttccaactaggcagtgcccctgcagtgtgctggatcgtgtgtactaccctaaaactgcagatggagaagggcgaggaccccgtccctacctgtctgactagaacaggactgtttttgcggtttctgtgctccaggtttcctcagggagctcagttacggggggccctgcggacgctgagtctcctggcagctcaggggctttgggcccagatgagtgtattccatagggaagacctcgaacggctcggagtgcaggagtccgacctccgactgttcctggatggcgacatactgaggcaggaccgagtatcaaaaggctgctactctttcatccacctttccttccagcaatttcttaccgccctgttctacgccctggagaaggaagagggtgaagatcgggacggccacgcatgggatatcggcgatgtgcaaaagttgctgagcggagaagaaaggctcaagaacccagaccttatccaggtgggccattttctattcggcctcgccaacgagaagcgtgccaaagagctggaggccacgttcggttgccggatgtctccagacattaagcaagagctattgcagtgtaaggcccacttacacgcgaataagccactaagtgtgacagatctcaaagaggtactgggttgcctctacgaaagtcaggaagaagagctcgccaaagtcgtggttgccccatttaaagagatttcaatccatcttacaaacactagcgaagtcatgcattgctctttttcgctgaagcactgccaggatctgcagaaactgagccttcaggttgccaagggggtgttcctggagaactacatggatttcgaacttgatattgagttcgaatcgtccaacagcaacctgaagtttcttgaagtgaagcagagcttcctgtcagattctagtgtgcggatcctgtgcgaccacgtaaccaggagtacctgccaccttcaaaaagttgaaatcaaaaacgtcactcctgatactgcctatcgggatttctgtctggccttcattggcaaaaaaacattgactcatctgacactcgccgggcacattgagtgggagaggacaatgatgcttatgctgtgcgacctccttcgcaaccacaaatgtaaccttcagtacctaaggcttggaggccattgcgctacgccggagcaatgggcagaattcttctacgtgctgaaagccaaccagagtctcaaacacctgcggttgagcgccaatgtgcttctggatgagggggccatgttactgtataaaaccatgaccagacctaagcatttcttgcagatgctatcgcttgagaattgccggctgacagaggctagctgtaaagacttggccgccgtgctggtagtgagcaagaaacttacacatctgtgtctggccaaaaatcccattggcgacaccggcgttaagttcctctgtgaaggtctgtcatatcccgactgcaagttacagacccttgtcctgcagcagtgttccattacgaagttgggatgcaggtacctctctgaagccctgcaggaggcgtgctcgttgacgaacctggatctttcaatcaaccaaatcgctcggggcctgtggattctgtgtcaggctctggagaacccaaactgcaacttgaagcatcttaggttgtggtcctgctctctcatgcctttctactgtcaacatctcgggtccgcccttcttagcaatcagaagttagaaacattggatctgggtcagaaccatctatggaagtctggtataatcaaattgtttggggtgctgcgacagcggacgggctctctcaaaatactgcgactcaagacctatgaaaccaaccttgagattaagaaactcctggaggaggtcaaggaaaaaaaccctaaattaactattgactgtaacgcctcaggtgccacagctccgccatgttgtgattttttttgttag

SEQ ID NO: 238320 - DNA, 3030 bp, Artificial Sequence
  derived and/or modified sequence
atgaccagcccccagctggagtggaccctgcagaccctgctggagcagctaaacgaggatgagctgaaatctttcaaatcactgctgtgggcttttccactggaagatgtgctgcagaaaacaccttggtcagaggtggaggaggccgacggtaaaaagctagcagaaatattggtaaacacctcaagcgagaattggattcgtaatgcaacagtgaacatccttgaggagatgaacctgactgagctctgtaaaatggccaaagcagaaatgatggaagacgggcaggtgcaggagattgataaccccgagcttggagacgccgaggaggactcagaactggccaagcctggcgagaaggagggatggagaaactcgatggagaaacagagtctggtttggaaaaacacgttctggcaaggggatatcgataatttccacgatgatgtgactttgcgaaaccaacgattcattccttttctgaacccacgcacaccccgcaagcttacaccttacacagtggttctgcatgggcccgccggcgttggaaagacgacgctcgctaaaaaatgcatgctcgattggaccgattgtaacttgtcgcccacactgagatatgctttttacctttcttgcaaggaactgagcagaatgggaccatgttcattcgctgaactgatttcaaaggactggcccgagctgcaagacgacatcccctcaatactggcccaggctcagcgaatactttttgtggttgacggcctggacgaacttaaggtacccccaggagctctgatccaagatatctgcggcgactgggagaaaaaaaaacctgtacctgttctgcttggatccctgcttaagcgcaagatgctcccaagggctgccctgttggtaactactagaccaagagcgctccgcgacctgcagttgctggcccagcagccaatttacgttagggtcgaggggttcctcgaagaggataggagagcctatttcctaagacactttggagacgaggaccaggccatgcgtgcattcgagctcatgcggtccaacgctgctcttttccagctcgggagcgcccctgctgtgtgttggattgtgtgtactacccttaagttgcagatggagaaaggggaagatcccgtaccaacatgcctgacgagaacagggctctttctgaggttcctgtgtagtcggtttccccagggcgctcaattacgcggagccctcagaacacttagtctgctggcagcccagggactgtgggcacaaatgtctgtatttcaccgagaagacttagagagactaggggttcaggagtccgatctgagactgtttctggatggcgatattcttaggcaggaccgagtctccaagggttgttattcattcatccatctgtcgttccagcagtttctcaccgcacttttctacgcactggaaaaagaagagggcgaggatcgggatggacatgcctgggatatcggcgacgtgcaaaaactgctgagcggcgaggagagactcaaaaacccagacctcatccaggtgggccactttttgttcggattagccaatgaaaaacgcgccaaggagcttgaagccacattcggatgtcggatgagtccagacatcaaacaagagttactccaatgcaaggcgcatctgcatgccaacaagccactgtctgtaaccgacctgaaggaggtcctgggttgcctgtacgaatctcaggaagaggagctagctaaagtcgtcgttgctccattcaaggagattagcattcaccttaccaacacatcagaagtcatgcactgtagttttagcctaaaacattgccaggatctccagaaattgagcttacaagtcgccaaaggcgtgtttctggaaaattatatggatttcgagcttgacatcgaatttgagtcctcgaatagcaatctgaagttcttggaggtaaagcagagctttttgtcagatagctctgttagaatcttatgcgaccacgtaacccgttctacctgtcacctgcaaaaagtggagataaaaaacgtgacccctgatacagcctatagggatttttgtctggcgtttatcggcaagaagacactgacacatttgacgctggctggccacatcgagtgggagcgcactatgatgcttatgctgtgtgatctgctgagaaatcataaatgcaacttgcagtacctccggttagggggccattgtgcgaccccagagcagtgggccgagtttttctatgtgctgaaagcaaatcagtctcttaagcatcttcggttgagcgcaaacgtgttactggatgaaggggcaatgctcctatacaaaaccatgacccgcccaaagcattttctgcagatgctgtctcttgagaattgtaggcttactgaggcttcttgtaaggatttggcagccgtactggtggtgtctaagaagctcacacacctatgtcttgccaagaaccctatcggagatacaggagtgaagttcctgtgcgaaggtctgagctatcccgactgcaagctacagaccctggtgctgcagcagtgttctatcacaaaactcggttgtcgctacctaagcgaagcactccaagaggcttgttcactcactaacctggacctgagcattaatcagatcgcccgcggtctgtggatactctgccaggctctggagaacccgaattgtaatctgaaacatcttagactctggtcgtgtagcctaatgccgttttattgtcaacatctggggtccgcactgctttcaaatcagaaactcgagactttagatctgggccagaaccacctctggaagagtgggatcatcaagctctttggcgtacttcgacagcggaccgggagtttgaagattctgcggctgaagacctatgaaactaaccttgaaatcaagaagctgcttgaggaggtgaaggagaaaaatccgaagcttaccatcgattgcaacgcatcgggggcaaccgcccctccttgctgcgacttcttttgttag

SEQ ID NO: 238321 - DNA, 3030 bp, Artificial Sequence
  derived and/or modified sequence
atgacctctccccagctggagtggacgttgcaaacactgctggagcaactgaacgaggacgagcttaagtccttcaagagtcttctatgggcgttcccgctagaagacgttctgcagaagaccccttggagcgaggtcgaggaggccgacggcaaaaagctagctgaaatcctggtgaatacttcgagcgaaaactggattcgaaacgccactgttaatatattggaggaaatgaatctcaccgagctgtgcaagatggccaaagccgagatgatggaggatggccaggtgcaagaaattgacaaccctgaactaggcgatgcagaagaggattccgaactagccaagcccggagagaaggagggctggcgaaattctatggagaagcaatcgttggtgtggaagaacacattttggcagggagatatcgataattttcacgatgacgtcaccctaaggaatcagaggttcatcccattcctgaatcccagaacaccccgtaaactgactccctatacggtggtactgcacggcccagcaggcgtagggaagacgacccttgctaagaagtgtatgttagattggacggattgcaacctatccccaactctaagatatgccttctacttatcctgcaaagaactgagccgaatgggaccctgtagttttgctgaactgatctcaaaggactggcccgagcttcaggacgatatcccctccattctggcccaggcccagcgcatactattcgtggtggatggactggatgagttgaaagtcccaccaggcgcattgatccaagacatttgcggcgactgggaaaagaagaagccagtccccgttctactcggatccttactgaagaggaagatgctgcctcgcgcagccctccttgtcactacgcggccacgagcactgagagatctgcagctgttggcacagcagcctatctatgtgcgggtcgagggcttcctggaagaggatcggagggcctacttcctgaggcacttcggagatgaagatcaagcgatgagggctttcgagcttatgcgttccaacgcggcactctttcaactggggagtgctcccgctgtgtgttggattgtgtgtactaccctaaaacttcaaatggagaagggcgaggaccctgtccctacctgtctgaccaggacaggactgttcctccggttcctctgctctcggttccctcagggcgcacagcttagaggggctcttaggactctgtccctgctagccgctcaaggactgtgggcgcagatgtcagtatttcacagagaggatttagagcgtctgggcgtgcaggagtctgacctcagattgtttctggacggcgacatactaaggcaggaccgggtgagcaagggatgttactcattcatccacctatctttccagcagtttctgactgcattgttttatgctctggaaaaggaggaaggggaggatcgcgatggacacgcgtgggatatcggagatgtccaaaagttactatcaggtgaggagcgcctgaagaatcccgacctgatacaggtgggccactttctgtttgggctggctaacgagaaacgggctaaagaactcgaggcaaccttcggctgccgaatgtcacctgacatcaagcaggaacttttgcaatgtaaggctcatctgcacgccaataaacccttgtcggtgaccgatctgaaagaagtgctagggtgtctatacgaaagccaggaagaggaactcgccaaggtggtggtggcccctttcaaagagatctctattcatctcaccaacacctctgaagtcatgcactgttcattttcgttaaagcactgtcaggacttgcagaagctgtctctacaggtcgccaagggtgtcttcctggagaactatatggactttgagctggatattgagttcgagagctcaaattcgaatctgaaattcctggaggtgaaacagtccttcttgagtgattcaagtgttaggatcctctgcgaccacgtcacgaggagcacctgccacctgcagaaagtggagataaagaatgtgacccctgacaccgcatatcgcgacttttgtctggcatttatcgggaagaagaccctgacacacttgacactcgcaggccatatcgaatgggagcggactatgatgctcatgctctgtgatttactaagaaatcacaagtgtaacttacagtatctgcgcctggggggtcactgcgccacacctgaacagtgggctgaatttttctatgttcttaaagccaatcaatcactgaagcacctaagactttccgctaacgtccttcttgatgaaggggctatgctgctgtacaaaacaatgacccggccaaagcatttcctgcagatgttgtccctggagaactgtaggctgaccgaagcaagttgtaaggatcttgccgcagtcctcgtggtttcaaaaaagctcacccatctatgtcttgctaagaatccaattggcgacactggggtaaaattcctgtgcgaaggcctgtcttaccccgactgtaagctccagacactggtccttcagcagtgctcaatcactaaattaggctgtagatatctgtctgaggcgttacaggaggcctgcagccttacgaacttggacctttctattaaccagatcgcaagagggctctggatcctttgccaggccttggagaatcctaattgcaatctaaaacatctacggctgtggtcatgctcgctaatgccattttactgtcagcacctcggctctgcacttttatctaaccagaagctggaaactcttgacttggggcaaaaccacctgtggaaatccggcattatcaagctgtttggagttctccggcagcgcactggttccctaaaaatcctgcgcctgaagacatacgaaactaatcttgagattaaaaaattgctggaagaagtgaaagagaaaaacccgaaactcacaatcgactgcaatgcttcaggtgctaccgcacccccatgctgcgacttcttttgttag

SEQ ID NO: 238322 - DNA, 3030 bp, Artificial Sequence
  derived and/or modified sequence
atgacctcacctcagctggaatggaccctgcagactcttcttgaacaactgaacgaagatgagctgaagtcctttaagtctcttctgtgggcttttcctcttgaagatgtcctgcaaaagaccccatggtccgaagttgaggaagcagatggcaaaaagctggccgagatactcgtaaatacaagttcagaaaattggattcgcaacgcaaccgtgaacatactggaagagatgaatttaaccgaactctgcaagatggctaaagcagagatgatggaagatggccaggttcaagaaatcgacaatccagaacttggggatgccgaggaggactctgaactcgctaaaccgggtgagaaggaggggtggcgaaactccatggagaagcaatctttggtatggaaaaatacgttctggcagggcgacatcgacaattttcacgatgacgtgacacttagaaatcagaggtttatacccttcctgaacccaaggacccctcggaagcttacaccatacactgtggtgcttcatggccctgccggtgtcggcaagaccaccctcgcaaaaaaatgcatgctcgactggactgactgtaaccttagccctactctccgatatgccttttacttgtcatgcaaggaattatccagaatgggtccctgctcttttgccgaactgatttctaaggactggccagagcttcaggacgacatccccagcatcctggcgcaggcccagcggattttgtttgttgtagatggtctggacgagcttaaagtcccacccggtgccctcatacaggacatttgcggggactgggagaagaagaagcccgtgcctgtactgttaggatcgctgctgaaaagaaaaatgttgccccgtgccgcactactggtgacaacccggccacgcgcactgcgggatctccagttacttgcccaacaacccatctatgttcgggtggaaggattcctagaggaagacaggcgcgcttatttcctgcgtcactttggggatgaggaccaagcgatgcgggcatttgagctgatgcggagcaatgccgctctgtttcagttaggttcggcaccagccgtttgctggattgtgtgcactaccttgaaattacagatggaaaagggagaagatcctgtgcccacctgcctcactcgtaccgggttgttcctcaggttcctgtgttcaaggttcccacaaggagcccagttgcggggagccttaaggaccctgtcccttctagccgcacagggcttgtgggcgcagatgtccgtgtttcaccgtgaggatctcgagagacttggcgtccaggagagcgaccttagactgtttttagacggcgacatactgcgccaggaccgtgtatcgaaagggtgttactcattcatccatctgtcctttcagcagttcctcacagccttgttctatgcactcgagaaggaggaaggagaggaccgagatggccacgcctgggatattggtgatgtgcagaagcttctgtcaggcgaggaacggctgaagaacccggacctgatccaggtggggcatttcctgtttggcctggccaatgaaaaacgggctaaagaactcgaggcaacgttcggatgtcgtatgtcgccagatattaagcaggagctgctccagtgtaaagcccacctgcacgcaaataagcccctttccgtgaccgacctcaaggaggtgctcggttgtctctacgaaagtcaggaagaggaactggcaaaagtcgtcgtcgctccatttaaggagatttcaatccatctgaccaatacctccgaggtcatgcattgctcctttagtttgaagcattgccaagatctgcagaaactgtcattgcaggtggcaaagggtgtgtttctggagaattatatggactttgagctggacatcgagttcgagagctccaacagcaatcttaaattcttagaggtgaagcagtcattcctgtccgactcctctgtgaggattctgtgcgaccatgtcactcgctccacttgccacctgcagaaagtcgaaatcaagaatgtcaccccggacactgcctatagggatttctgccttgcctttattggtaagaagactctgacccatctcacgctggccggtcacattgaatgggagcgcacaatgatgcttatgctttgtgaccttttacgtaatcataaatgtaatctgcagtacctgcgactgggaggccactgtgctactccagaacagtgggccgaattcttttatgtgctcaaagcaaatcaaagcctgaaacacttaaggttgtccgcaaacgtgttgctcgacgagggggcaatgctgctgtacaaaacaatgacgaggcctaaacatttcctccaaatgttgagcctggagaattgtcggcttacggaagcatcctgtaaggatctggccgcagtactggtggtatcgaaaaagctgacacatctttgcctcgcgaagaatccaattggcgatacaggtgtgaaatttctctgcgaggggctctcgtatcctgactgtaaacttcagacacttgtgcttcaacagtgctcgatcacaaagttagggtgccgctacctctccgaggccctgcaggaagcttgcagcctcaccaacctggatctgtcaatcaatcagatagctagaggcctttggattttatgtcaagccttggaaaacccaaactgtaacctaaaacacctgcgcctttggtcttgttccctgatgcccttctactgccaacacctgggatctgccctcctatccaaccagaaactggagaccttggacttggggcaaaatcacctgtggaaatcaggcattataaaattgttcggcgtgttgcgccagcgaaccggctcactgaaaattctacggttaaagacttatgaaacaaatttggaaatcaagaagctgctggaggaggtcaaagagaaaaaccctaaacttaccattgactgcaacgcctctggtgcaacggccccaccatgttgcgacttcttttgttag

SEQ ID NO: 238323 - DNA, 3030 bp, Artificial Sequence
  derived and/or modified sequence
atgacctctcctcagttggagtggaccttacagaccctcctggagcagctgaacgaagacgagcttaaatccttcaagtccctgctgtgggcctttcccctcgaggacgtgctccagaaaacaccctggagcgaggttgaggaggcggatggaaaaaaacttgccgagattttagttaatacctcttccgaaaactggattcgaaatgccactgttaatattctggaggaaatgaatctgaccgagctttgcaagatggccaaggccgaaatgatggaggatggacaggttcaagaaattgacaatcccgagctgggagacgctgaagaagattctgagctggccaagcccggagaaaaagagggctggaggaactctatggagaagcagtcgctcgtctggaaaaacaccttttggcaaggcgatattgacaactttcacgatgacgtgaccttgcgcaatcagcggttcatcccttttctcaatccacggaccccgagaaagctgaccccttataccgtggtccttcatggacctgctggcgttggtaagaccaccctcgcaaaaaagtgtatgttagactggactgattgtaacttgagccccaccctccgctacgcattctacctgagctgcaaggagcttagccgcatggggccatgctcttttgccgagctgatatctaaggactggccggaattacaggatgatataccatctatcctggcccaggcccagcggattctgttcgttgtcgatggacttgacgagttgaaggtgccacccggagctctgattcaagatatttgcggggattgggagaagaaaaaacccgtcccagtgttattgggttccttactgaagaggaaaatgcttcctcgtgcggctcttctcgtcaccaccaggcctcgggcactgagagacttgcagctgctagcccagcaaccaatctatgttagagtagaagggttccttgaggaagaccgcagggcatacttcttgcggcacttcggggatgaggatcaggcaatgcgcgctttcgagttaatgcgatctaacgctgctctgtttcaactgggctctgctccagctgtatgctggatagtttgcaccactcttaaacttcagatggaaaagggagaggaccccgtgcctacctgccttacacgtacaggactattcctgagattcttatgttccagatttccgcagggggcacagttacggggagcactcaggaccctctccctgctcgccgctcaagggctctgggcccagatgagtgtgtttcacagagaagatcttgaaagactgggagtgcaggagagtgatctgaggctcttcctcgatggtgacatccttagacaagacagggtcagcaaagggtgttactcatttatccacttgtcttttcagcagtttctgaccgccctgttttatgcattggagaaggaagagggagaggatagggatggtcatgcttgggacattggagatgtgcagaagctcctctctggggaggagaggctcaagaatcctgaccttatacaggtcggacacttcctgtttggtctcgctaacgagaaaagagccaaagagctggaagcaacatttggatgtcgaatgtcccccgacatcaagcaagagctgctgcaatgcaaagcgcaccttcacgctaacaagcctctgagcgtgacggaccttaaagaggtgctcgggtgcctctacgaaagccaagaggaggagctggcaaaggtggtggtagccccatttaaagagatcagtatccatttgacgaatacatcagaggtgatgcattgttccttctcactaaagcactgtcaggacctacagaagttgtctcttcaggtggcaaaaggggtgttcctggagaactacatggactttgagcttgacatcgagttcgaaagtagcaactccaacctgaaattcctggaagttaagcagagctttttatcggactctagtgtgagaatcctttgtgatcatgttactcgatctacctgccacctacagaaagtggagattaagaatgtcactcccgataccgcctatcgggacttctgcctggccttcatcggcaagaaaacattgacccatttaaccctcgcgggtcatatcgaatgggaaaggaccatgatgttaatgctgtgcgatcttctccggaatcacaaatgcaacttgcagtatttaagactcggtggacattgcgctacgcccgagcagtgggcagaattcttttatgttctcaaagcgaaccagagcctgaaacacctccggctctcagccaatgtcctcctggacgagggcgctatgttgttgtataaaacaatgacccggccaaagcattttctccagatgttaagcctcgagaactgccgcctaactgaagcctcttgtaaggatctcgccgctgtcctcgtcgtgtctaagaagcttacacacttgtgtctcgcaaagaatccaattggagacacaggtgtaaagtttttatgcgaggggctttcttaccccgattgcaagctgcagaccctcgtactgcagcaatgctctataacaaaattagggtgtagatacctgagcgaggctctgcaggaggcatgctcattgaccaacctagacttgtctattaaccagattgctaggggcctgtggattctctgccaggccctggagaacccgaattgtaacctcaagcaccttagactgtggtcttgcagtcttatgcctttttactgccagcacctgggaagcgccctactaagtaaccagaagctcgagacgcttgacctgggacagaatcatttatggaagtctggcattatcaaactgttcggagtgctgcggcaaaggacaggaagtctgaagattctgaggctgaagacctacgaaacaaatctggaaattaagaagcttctggaggaggtcaaagagaaaaatcccaagctgaccattgactgtaacgcctccggggctaccgcgcctccttgttgcgatttcttctgttag

SEQ ID NO: 238324 - DNA, 3030 bp, Artificial Sequence
  derived and/or modified sequence
atgacctcccctcagttagagtggacattgcagacactcttagagcaactgaacgaggacgagttaaagtcatttaaaagcctgctgtgggcatttcctttggaggacgtgctccagaagaccccatggtccgaggtggaagaggccgatggcaaaaagttggctgagatcctggtgaacacttcgtcagagaattggattcgcaatgccactgtcaacatactagaagagatgaacctgaccgagctttgtaagatggcgaaagccgagatgatggaggatggacaggtgcaggaaattgacaaccctgaactgggcgatgccgaggaagatagtgaattagcaaagccgggagaaaaggaagggtggagaaattccatggagaagcagagtttagtgtggaagaacaccttttggcagggtgacattgataacttccacgatgacgtgactttaagaaatcagaggtttataccattcttgaatccacgcacccctagaaagttaaccccttacaccgttgtcctccatggacctgctggtgttgggaagaccacgctcgccaagaaatgcatgctggattggacagactgcaacctgtcaccaacactccggtatgccttctacttgtcgtgtaaagagcttagtaggatgggcccttgctcctttgccgaacttatttctaaggactggccggaattgcaggatgacatcccttctatcctggcacaggctcaacgaatcctcttcgtagtggacggactggacgagctgaaggtcccacccggtgctttaatccaggatatctgtggggattgggagaagaagaagccagtccccgtgctgctggggtctcttctcaagagaaagatgctgccgagggccgctctgttggtgactactaggcccagagcattaagagacttgcagcttctggctcagcaaccaatatatgtccgagtggaggggtttttagaggaggataggagggcgtatttccttcggcacttcggcgacgaggaccaggcgatgcgtgcctttgagttgatgcgttcaaatgccgcattattccaactaggtagtgccccagctgtatgctggatagtgtgcactaccctcaaattgcaaatggagaagggggaagatcccgttcctacctgtctgacacggaccggacttttcttgagatttctgtgttcacggtttccccagggggctcagcttcggggagctctgcggactctgtctttactggctgcgcaggggttatgggcacaaatgtccgtgtttcacagagaggatctcgaaaggctgggtgttcaggaatctgacctccgccttttcctcgacggcgacatactcagacaggatcgagtgtctaagggatgctacagcttcattcacctatcattccagcagttcctcacagcacttttctacgccttggaaaaagaagaaggagaggatagggatgggcacgcatgggacattggcgacgtgcaaaagttgctatccggggaggaacgcctgaaaaatccggacctcatacaggtggggcatttcctattcggcctggcgaacgaaaagcgggctaaggagctggaagctaccttcggatgccgtatgtcccctgatatcaagcaagaattgctgcagtgcaaagcccacttgcacgccaacaaacctttgtcagttaccgatttaaaggaggtgctcggttgtctctacgaatcccaagaagaggagctcgctaaggtagtggtggcccctttcaaggaaatatcgattcacttgacaaatacgtccgaagtcatgcactgcagtttcagcttaaagcactgccaggacttacagaagcttagcctccaggtcgccaagggtgtgttcctcgagaactacatggattttgagcttgacatcgaatttgagtccagtaacagcaacctgaaattcttggaagtgaaacagtctttcctgtccgatagctctgtgagaattctgtgcgatcacgtgacccgaagcacctgccacttgcagaaggtggaaatcaaaaacgtcactccagacaccgcttaccgagacttttgtctcgcctttattggaaagaagactctcacacacctgacgctcgccggacacatcgaatgggaacgcacaatgatgctgatgctctgcgacctgttacgcaaccataaatgtaacctgcagtacctgagactgggcggacactgcgcgactcccgagcagtgggccgaattcttctacgtgctgaaagccaatcagagcctgaagcacctgagactttccgccaacgtcctgcttgatgagggcgctatgttgctgtataagacaatgactcgaccgaagcattttctgcagatgctgagtctggagaactgccgcctcacagaggctagctgtaaggacctcgccgctgtcctggtggtgtcaaagaaactaacgcacctgtgtctagctaaaaaccctattggggacactggagtgaaattcctgtgtgaaggcttgtcctaccccgactgtaaactgcagaccctggtgctgcagcagtgctccatcacgaagcttgggtgcagatacctcagtgaggctctgcaggaagcctgctcgttgacaaatctggatttatcaatcaaccagatcgccagaggcctatggatactgtgtcaggcccttgaaaatcccaactgcaatcttaagcacctgcggctgtggagttgctccctgatgcccttctactgccagcatctggggagcgccctgctgagtaatcagaaactggagaccttggatctggggcagaaccacctttggaaaagtggaataatcaagctctttggagtgcttcggcagcggaccggcagcctgaaaattttacggctcaagacctacgaaacaaatttggaaataaagaagctgctggaggaggtaaaggagaagaaccctaagctgaccattgattgtaatgccagcggggcaaccgctccaccatgctgcgattttttctgctag

SEQ ID NO: 238325 - DNA, 3030 bp, Artificial Sequence
  derived and/or modified sequence
atgacgagcccccagctcgaatggactctacaaacactgttggaacagctgaatgaggatgagctgaagagctttaaatccttgctctgggcttttcctctggaggatgtgctgcagaaaaccccctggagcgaggttgaggaggccgacggcaagaaactcgccgagattcttgtgaatacctctagtgagaattggattaggaacgctacagtgaatatactagaggagatgaacctcacagagctctgcaaaatggcaaaagccgagatgatggaggacggccaggtccaggagattgataaccccgagctgggagatgcagaggaggactcggagctggccaagcctggagaaaaggaaggctggagaaactctatggaaaaacaatccctggtatggaagaatactttctggcaaggagacatcgacaactttcatgacgacgtcacactgagaaaccagaggttcattcccttcctgaatccgagaactccccgaaaactgaccccttacaccgtcgtcctgcatggtccagcaggggtgggcaaaaccaccctagccaaaaaatgtatgctcgactggaccgattgcaatctgtcacccacccttaggtacgctttttacctgtcatgtaaggagttatctcggatgggcccatgtagctttgccgagttaattagcaaggactggccggagctgcaggacgacattcctagcattctggcccaggcccagaggattctcttcgtggttgatggtcttgacgagctgaaggtaccccctggggctttaattcaggatatctgtggggactgggaaaaaaaaaagccagtccccgtcctcctgggttctcttttaaaacggaaaatgctgccccgtgctgccttactggttaccactagaccaagagcgctaagagacctgcagctgttagcacaacagcccatctacgtgagagtggagggcttcctagaggaagacagacgcgcttatttcctgagacacttcggggatgaagatcaggccatgcgagcctttgagctaatgcgctccaacgctgccctcttccaactgggtagcgcgccagcagtgtgctggatagtctgtaccacccttaagctgcagatggagaagggcgaagatcctgtgccaacctgcctgacccggaccggattgtttttaaggtttctgtgttcgaggtttccgcagggggcacagcttcgcggagccctgagaacgctatctctcctggctgcccaagggctgtgggcccagatgtcagttttccaccgagaggacttagaaagactcggggtgcaggaatctgatcttaggttgtttctggatggtgacattcttaggcaggatcgcgtatccaagggctgttacagttttatccacctcagttttcagcagttcctcaccgctctcttctatgcgttggagaaggaggagggggaagaccgtgatggtcacgcatgggatatcggcgacgtgcagaagctgctcagcggcgaagagcggctgaaaaatcccgatctgatacaggttggtcattttctgttcggactggcaaatgagaagagagcgaaagaacttgaagcgactttcggctgccgaatgagcccagacattaaacaggaacttctgcagtgtaaggcccatctccatgctaataagccgctcagcgtgaccgacctaaaagaggtgctgggctgcttatacgaaagtcaggaggaagagctggcaaaagttgtcgtcgcaccctttaaagagattagcatccacctcacaaatacctcggaggtcatgcactgtagcttttctctaaaacactgtcaagatctgcagaagttgtcactgcaagtggcaaagggagtctttctggaaaattatatggacttcgagctggacattgaatttgagagctccaattcaaatctgaagtttctggaggtgaaacaatcctttctttcggatagctctgtgaggatactgtgcgatcatgtgacgcgcagcacatgccacctgcagaaagtggagattaaaaacgttactccagacacggcttaccgggacttttgtctcgcctttatcggcaagaaaacacttacacacctgaccctcgccggtcacatcgaatgggagcggacgatgatgctgatgctctgtgacctcctgaggaatcataagtgcaatcttcaatacctccgcctggggggtcactgcgcaacaccggaacagtgggccgagttcttttacgtgctgaaggcaaatcagagtcttaagcatttgcgtctctcggcaaatgtactgcttgacgagggagccatgctgctgtacaagacaatgacacgccctaagcattttctgcagatgctctcgctggagaattgcagattgaccgaggcgtcatgcaaggatctggcggctgtgctggtggtcagcaagaagttgacacatctctgcctagccaaaaacccgatcggtgataccggagtaaaattcctttgtgaaggcctgtcctacccagattgcaagctccaaacgctggtcctgcagcagtgctccataacaaagctcggctgccgatatctgtctgaggcgctgcaagaagcatgttctctgaccaatctggacctgtccatcaaccaaatagctaggggtctatggattctatgccaagcactggaaaacccgaattgcaacttaaagcacctgcggctctggagctgttcgcttatgccattctactgccaacatcttggttcggcccttttaagtaatcaaaaacttgagaccttagacctggggcagaaccatctgtggaaaagcggcattataaagctgtttggcgttctacggcagaggactggttccttaaagattctgcgcttgaagacatacgaaaccaacctggagataaaaaagctcctggaggaggtcaaagagaagaatcctaagctgaccatagactgtaacgcgtctggagctacggcgcctccctgctgcgacttcttctgctag

SEQ ID NO: 238326 - DNA, 3030 bp, Artificial Sequence
  derived and/or modified sequence
atgacatccccccagcttgaatggacactgcagactctgctggagcaactgaacgaggatgaattgaaatcatttaagtctctactgtgggctttccctttagaggacgtattgcagaagacgccctggtcagaagtggaggaggccgacgggaaaaagcttgcggaaattctcgtgaacacttcgtctgagaattggattagaaatgccacagttaacatacttgaggagatgaacctgaccgagctgtgcaagatggccaaagctgagatgatggaggatggccaagtgcaggaaattgacaacccagaactcggcgatgctgaagaggacagcgagctggcaaaaccaggagagaaggaaggttggagaaactccatggagaagcagagcttagtatggaaaaatacgttctggcagggagatattgacaacttccacgacgatgtgactctgcggaaccagagattcatccccttcctgaaccccaggaccccgaggaagttgaccccgtacacggtggttctgcacggacccgcaggcgttggcaagaccacattggcaaagaaatgtatgctagactggactgactgtaatctaagtcctacattgagatacgccttctatctgtcatgcaaagaactgagtagaatggggccatgctcattcgccgaactgatcagcaaggactggcccgagctccaagacgatataccttctatcctggcgcaagcacaacggattttgtttgtggtcgatggcctggacgaacttaaagttcccccaggagccctgattcaggatatttgtggtgactgggagaagaagaaacctgttccagtcctgttgggctctttgctgaagagaaagatgctcccacgcgctgcgctgctggtcaccactcggccaagggcactccgtgacctgcagttgctggcccagcaaccgatttatgtgcgcgttgaaggcttcctagaagaagacagacgagcctatttcttgcgccactttggcgacgaagaccaggccatgcgggcttttgagctgatgcgttctaatgctgctcttttccaattgggtagcgcccctgccgtctgctggattgtgtgcacaacactgaaactgcaaatggaaaagggcgaagacccagttccgacctgtctgactcgaactgggcttttcctgcgctttttatgttctagattcccccagggtgctcagctgcgcggagccctccgaacacttagcctgttggccgcacaaggcctctgggctcagatgagtgttttccaccgcgaggatttagaaaggctcggagtgcaagagagcgatctgaggctgttccttgacggtgacatactgaggcaagacagggtgagtaaaggatgctactccttcatccacctctcattccaacaatttcttactgctctgttctatgcattggagaaagaggagggggaggatcgcgacgggcatgcttgggacattggcgacgtgcagaaattgctgtccggcgaagagagactgaagaaccctgatctaatccaagtgggacacttcctgttcggattagccaacgagaaacgtgctaaagagttggaagccactttcgggtgtagaatgagccctgatataaaacaggaactgctgcagtgcaaagcccacctgcacgccaacaagccactcagtgtgacggatctgaaagaagtcctggggtgcctgtacgagtcccaggaagaggagttggccaaggtcgtggtggccccattcaaagaaattagcatacacctcacaaatacaagcgaggtaatgcactgcagcttttccctgaagcattgccaggatcttcagaaactttccctgcaggttgcaaaaggagtgttcctggaaaattacatggactttgagctagatattgaattcgagtcatcaaattcgaatctgaagtttctcgaggtgaagcagagctttttgagtgattcttccgtgcgaatcctatgtgaccacgtcactcggagcacctgtcacctacagaaagtggagattaagaacgtgacccctgataccgcttacagggacttttgcctggccttcattgggaaaaaaacactcacacatctgacgctggctggtcatatcgagtgggaaaggactatgatgctgatgctttgcgacctactcaggaaccacaagtgtaacctgcagtacttacggttaggcggtcactgtgccactcccgagcagtgggcggagtttttttatgtgttaaaagccaatcagagcctgaagcatctgcgattatctgccaacgtcttgctggatgagggagcaatgcttttatacaagacaatgactcgcccaaaacactttttgcaaatgctgtctcttgagaattgccgccttacagaagccagctgtaaagatctggccgcagttttagttgtttctaaaaaattgactcatctgtgcctggctaaaaatccaattggcgacactggcgtgaagttcctgtgcgaaggcctctcttatccagactgcaagctgcaaaccctcgtgttgcagcagtgcagcataacaaaacttgggtgcaggtacctctctgaagccctccaggaagcctgctcacttaccaatctcgatctatcaataaatcagatagcccgtggactgtggattctgtgccaagccctggagaatcctaactgcaatctgaaacatcttcgtctatggagctgctcccttatgccattctactgccagcacctgggcagcgcactgctcagtaaccaaaaattggaaacgcttgacttgggccagaatcatttatggaagtccggcattattaaactatttggcgtcctcaggcagcgaacaggatccctaaagatactcaggctgaaaacttacgagacaaatcttgaaataaagaagttactggaagaggtcaaagagaagaatcccaagctgaccattgactgtaatgctagtggagccaccgctccaccctgttgcgacttcttttgctag

SEQ ID NO: 238327 - DNA, 3030 bp, Artificial Sequence
  derived and/or modified sequence
atgaccagccctcagctagaatggactcttcagacattactcgagcagctgaacgaggatgagctcaaatcattcaagagtcttctgtgggcttttcccttggaggacgttttacagaagacgccatggagtgaagtcgaagaagcagatgggaagaaattggccgagattttggtgaacacaagttcagagaattggatccggaatgctactgttaacatactggaagaaatgaatctcacagagctctgcaagatggcaaaagccgagatgatggaggatggccaagtacaggagatcgataacccagaacttggagacgctgaggaggatagtgagctggcaaaaccaggagaaaaagaaggctggcgcaactcaatggagaaacagtccttggtttggaagaacacattttggcagggcgacatcgacaatttccatgatgatgtcacactgcgcaaccagcggttcattccttttctgaatccgaggactccgcgaaaactgaccccttacacagtggtgctacatggacccgctggcgttggcaagacaaccctggctaaaaagtgcatgctagactggaccgactgtaatctgagcccaactctgagatatgcattttacctcagctgtaaagagctctccaggatgggaccctgctctttcgctgagttaataagcaaagactggcccgaattacaggatgacatcccttccatcctcgcccaggcacaacggatcctgtttgttgtcgatggcctggacgaactcaaggtaccccctggtgccctgatccaggatatttgcggagattgggagaagaaaaaacctgttcccgtgctcctaggttcgttgctgaagaggaagatgttgccccgtgctgccctgcttgtgactacacgtcccagggccctgagagacctgcaattactggctcaacagccaatttatgtgcgggtggaaggctttctggaagaggataggagagcatatttcttgagacactttggggatgaggatcaggcaatgcgggcatttgagctcatgcgttccaatgccgcactgtttcagttggggtccgccccagctgtgtgttggatagtgtgtacaaccctgaagttacagatggaaaaaggagaggaccctgtgccaacatgtctcaccaggaccgggctttttctgaggtttctttgtagcagattcccacaaggggctcagttgcgaggagccttgcgaacgctgtctctgctggctgcccagggtctttgggcacagatgagcgtgtttcaccgggaagatcttgagaggctgggcgtacaagagtctgacctgcggctgttcctcgatggcgacatactaaggcaggaccgcgtcagtaagggatgctactctttcattcatctttccttccagcagttcctgaccgccctcttttatgcactggagaaagaggagggcgaggaccgagacggtcatgcgtgggatattggcgatgtccagaaactgctgtccggcgaggagagactcaagaatcctgatctgatccaagtggggcacttcctttttggcctggcaaacgagaagcgggcaaaagagttggaggcaactttcgggtgccggatgagcccagatatcaaacaggagctcctgcagtgcaaggctcacctgcatgcaaacaagccattgtcagtgacggacctgaaggaggttttaggctgtctgtatgaaagccaggaggaggagctggctaaggtggtagttgcaccgttcaaggagatttccattcaccttacaaacacatccgaggttatgcactgctcttttagcctaaagcattgccaggatctgcaaaagctgtcgctacaagtagccaaaggtgtttttctagaaaattacatggactttgagctggacatcgagttcgagtcctccaatagtaatctcaaatttctcgaggtcaaacagtcctttctgagcgacagctccgtccgaattttgtgcgatcacgtgacccgttccacttgccatctgcagaaggtggagatcaagaacgtcacaccagacacagcttaccgagacttctgtttagccttcattgggaagaagacattgacccacttgactctggccggacacatcgaatgggagcgaactatgatgctcatgttgtgtgatctactcaggaaccataagtgcaacctgcagtacttgcgacttggaggacattgtgccaccccagagcagtgggcggaattcttttatgtcttaaaagccaaccagtccctaaaacatctgagactgtccgccaacgtcttgctggacgagggtgcaatgttgctgtacaaaaccatgaccaggccaaaacatttcttacagatgctgtctcttgagaattgtaggttgacagaggcttcatgtaaggatttagcagcggtgctggtggtttccaaaaagcttacacatctgtgtctggccaaaaatcccattggcgacacaggagttaaatttctgtgtgaaggtctgtcctatccggactgtaagctgcagacactggtcctgcaacaatgctcaataaccaagctcggttgtcgttacctgtctgaggccctgcaggaggcttgttctctgaccaacctggacctgtctataaaccagatagcacggggactatggatcctgtgccaagccttggaaaatcctaattgcaacttgaagcacctgagattgtggagttgttccctgatgccattctactgccagcacctcggctccgccttactgagcaaccagaagctggagacacttgacctggggcaaaaccacctctggaagagcggcattattaagctctttggggtacttcgacagcgcactggttctctgaaaatcctgcgtctgaaaacgtacgaaaccaacttggaaataaagaaactgttggaggaagtgaaagaaaagaatccaaagcttaccatcgattgcaatgctagcggggcaaccgctccaccctgctgtgatttcttctgttag

SEQ ID NO: 238328 - protein, 335 aa, Artificial Sequence
  derived and/or modified sequence
MLQGHSSVFQALLGTFFTWGMTAAGAALVFVFSSGQRRILDGSLGFAAGVMLAASYWSLLAPAVEMATSSGGFGAFAFFPVAVGFTLGAAFVYLADLLMPHLGAAEDPQTTLALNFGSTLMKKKSDPEGPALLFPESELSIRIDKSENGEAYQRKKAAATGLPEGPAVPVPSRGNLAQPGGSSWRRIALLILAITIHNVPEGLAVGVGFGAIEKTASATFESARNLAIGIGIQNFPEGLAVSLPLRGAGFSTWRAFWYGQLSGMVEPLAGVFGAFAVVLAEPILPYALAFAAGAMVYVVMDDIIPEAQISGNGKLASWASILGFVVMMSLDVGLG

SEQ ID NO: 238329 - DNA, 1008 bp, Artificial Sequence
  derived and/or modified sequence
atgctgcagggccacagcagcgtgttccaggccctgctgggcaccttcttcacctggggcatgaccgccgccggcgccgccctggtgttcgtgttcagcagcggccagagaagaatcctggacggcagcctgggcttcgccgccggcgtgatgctggccgccagctactggagcctgctggcccccgccgtggagatggccaccagcagcggcggcttcggcgccttcgccttcttccccgtggccgtgggcttcaccctgggcgccgccttcgtgtacctggccgacctgctgatgccccacctgggcgccgccgaggacccccagaccaccctggccctgaacttcggcagcaccctgatgaagaagaagagcgaccccgagggccccgccctgctgttccccgagagcgagctgagcatcagaatcgacaagagcgagaacggcgaggcctaccagagaaagaaggccgccgccaccggcctgcccgagggccccgccgtgcccgtgcccagcagaggcaacctggcccagcccggcggcagcagctggagaagaatcgccctgctgatcctggccatcaccatccacaacgtgcccgagggcctggccgtgggcgtgggcttcggcgccatcgagaagaccgccagcgccaccttcgagagcgccagaaacctggccatcggcatcggcatccagaacttccccgagggcctggccgtgagcctgcccctgagaggcgccggcttcagcacctggagagccttctggtacggccagctgagcggcatggtggagcccctggccggcgtgttcggcgccttcgccgtggtgctggccgagcccatcctgccctacgccctggccttcgccgccggcgccatggtgtacgtggtgatggacgacatcatccccgaggcccagatcagcggcaacggcaagctggccagctgggccagcatcctgggcttcgtggtgatgatgagcctggacgtgggcctgggctag

SEQ ID NO: 238330 - DNA, 1008 bp, Artificial Sequence
  derived and/or modified sequence
atgctgcagggacactcatcggtcttccaggccctgttgggcaccttttttacttggggaatgacagctgcaggggccgcgttagtctttgtgttctcttctggacagcgtcgcattctggatggttccctgggatttgccgccggggttatgctggccgcctcctattggtcccttctggccccagcagttgagatggccacatcatcgggagggtttggcgcatttgcatttttcccagtcgcagtaggtttcaccctcggcgcagcttttgtctacttggccgatctgctcatgcctcatcttggcgccgcagaggacccgcagacaactttggcactgaacttcggtagcactcttatgaagaagaaatccgatcccgaaggccccgccctgctgtttcctgaaagtgagctttcaattagaattgacaaatccgaaaacggggaggcctatcagcggaagaaagcagcagcaaccgggctacctgagggacccgctgtcccagtgcccagtcgcggtaatttggctcaacctggcggctcatcttggaggagaattgctctcctcatcctcgccattacgatccacaacgtcccggagggccttgccgttggcgtgggttttggcgctatcgagaaaaccgcctcagccactttcgagagcgctaggaatctggcaatcggaatcggaattcagaatttccccgagggactggccgtctccctgcctttgaggggggctggcttctcaacttggcgggcattctggtacggccagcttagtggtatggtggaaccccttgccggagttttcggtgctttcgcagtggtcctcgctgagccaatcctgccgtacgcactggccttcgcggcaggcgctatggtgtatgtggtgatggacgatattataccagaggctcagatcagtgggaacgggaagcttgcatcatgggcttccattcttggatttgtggtcatgatgtccctggatgtgggactcggctag

SEQ ID NO: 238331 - DNA, 1008 bp, Artificial Sequence
  derived and/or modified sequence
atgctgcagggccacagctctgtgttccaggccctgctgggcaccttcttcacctggggcatgacagctgctggggccgccctggtgtttgtgttcagcagcggccagaggcgcatcctggatggcagcctgggctttgctgctggggtgatgctggccgccagctactggagcctgctggccccagctgtggagatggccaccagcagcggcggctttggagcctttgccttcttccctgtggccgtgggcttcaccctgggcgccgcctttgtgtacctggccgacctgctgatgccccacctgggcgctgctgaggacccccagaccaccctggccctgaactttggcagcaccctgatgaagaagaagagtgaccctgagggccctgccctgctcttccctgagagcgagctgagcatcagaattgacaagtcagaaaatggagaggcctaccagaggaagaaggccgccgccaccggcctgcctgagggccctgctgtgcctgtgcccagccggggcaacctggcccagcccggcggcagctcctggaggagaattgccctgctgatcctggccatcaccatccacaacgtgcctgagggcctggccgtgggcgtgggctttggagccatcgagaagacagccagcgccacctttgagagcgccaggaacctggccatcggcatcggcatccagaacttccctgagggcctggccgtgtccctgcccctgcggggggccggcttcagcacctggagggccttctggtacggccagctgagcggcatggtggagcccctggccggcgtgtttggagcctttgctgtggtgctggccgagcccatcctgccctatgccctggcctttgctgctggggccatggtgtatgtggtgatggatgacatcatccctgaggcccagatctctggaaatggcaagctggcctcctgggccagcatcctgggctttgtggtgatgatgagcctggatgtgggcctgggctag

SEQ ID NO: 238332 - DNA, 1008 bp, Artificial Sequence
  derived and/or modified sequence
atgctgcagggccacagcagcgtgttccaggccctgctgggcacctttttcacatggggcatgactgccgcgggcgccgcccttgtgtttgtgttcagctcgggtcaaagaagaatcctcgacggctcgctagggtttgcagcaggtgtcatgctggctgcatcttattggtctttgctcgctccagctgttgaaatggctacctcttcaggcggctttggagcctttgcttttttcccagtggcagtgggattcacgctcggggcagcattcgtctacctggctgacctgctcatgccacatctgggcgctgcagaagatccccagacgacattggcactgaatttcggtagtactttgatgaaaaagaagtctgacccagaggggccagctcttctatttccggagtccgagttgtctattagaatcgacaaaagcgaaaacggagaggcttatcaacgcaagaaggctgccgccacaggattgccggaagggcccgctgtacctgtgccttcacggggaaacctggctcagccgggaggcagtagctggagaaggatcgcactgctgatcctagctatcactattcacaacgtgccagaggggctagccgttggcgtgggcttcggagccatcgaaaagacggccagcgctacttttgagtctgcgaggaacctggccatcgggatcggcatccagaacttccctgaagggctagcggtttccctacctcttcggggggcggggttctccacctggcgagccttttggtatggacagctctccggaatggtcgagcctctggcaggggtgtttggtgcattcgctgtggtgctggccgagccgatactgccttacgcgcttgctttcgccgctggggctatggtttacgttgtgatggacgacattattcccgaggcccagattagcggcaacggtaagcttgcctcctgggccagtatacttggcttcgtcgtgatgatgagcctggacgtggggttaggatag

SEQ ID NO: 238333 - DNA, 1008 bp, Artificial Sequence
  derived and/or modified sequence
atgctacaagggcacagttctgtgtttcaggccctcctgggtacatttttcacgtggggcatgaccgccgctggtgcggctctcgtgtttgtatttagtagcggccagcgacggattctggacggcagcctgggttttgcggcaggagtgatgcttgctgcgagttattggtccctactggcccctgctgtagagatggctacgagctctgggggattcggggctttcgcctttttcccggtcgccgttggcttcactcttggcgcagcatttgtatatctggctgatctcctaatgcctcaccttggggctgcggaggatccacagaccacgctggccctgaacttcggttccacgctgatgaagaaaaagtcagacccggagggccctgcactcctgtttcctgagtcagagctgagcattcgtatagacaagtcagaaaacggagaagcataccaacgcaaaaaagccgctgctaccggcctacctgagggacccgcagtgcccgtgccttctaggggcaatctagcccagcccggtggcagctcatggcgcaggatcgcattattgatactcgccataaccattcataatgtgcctgagggcctggcggtgggtgtgggattcggtgcaatcgaaaaaaccgcttccgcaactttcgagagtgccaggaacttagcgataggcatcggaattcaaaactttcctgaggggctagccgtgtctttgccactccgcggagccggttttagcacctggcgtgccttctggtatggccaactcagcggcatggtggaacctctggcaggcgtgttcggcgctttcgctgtggtccttgccgagccaattttaccttatgccctcgccttcgcagccggagctatggtgtatgtggtgatggacgatataattcccgaggctcagatcagtggcaatgggaagttggccagctgggcctccattctcggttttgtagtgatgatgagtttagacgtcggtttggggtag

SEQ ID NO: 238334 - DNA, 2760 bp, Artificial Sequence
  derived and/or modified sequence
acgtgtgcgggagggaagcaggaagtgactgcgggagtggagccggcgagagagtggcagcgggggctgatggaagtgcagtgggggctggagagggcaccctactgtatccagcatgctccaaggccacagctctgtgttccaggccttgctggggaccttcttcacctgggggatgacagcagctggggcagctctcgtgttcgtattctctagtggacagaggcggatcttagatggaagtcttggctttgctgcaggggtcatgttggcagcttcctattggtctcttctggccccagcagttgagatggccacgtcctctgggggcttcggtgcctttgccttcttccctgtggctgttggcttcacccttggagcggcttttgtctacttggctgacctcctgatgcctcacttgggtgcagcagaagacccccagacgaccctggcactgaacttcggctctacgttgatgaagaagaagtctgatcctgagggtcccgcgctgctcttccctgagagtgaactttccatccggatagacaagagtgagaatggtgaggcatatcagagaaagaaggcggcagccactggccttccagagggtcctgctgtccctgtgccttctcgagggaatctggcacagcccggcggcagcagctggaggaggatcgcactgctcatcttggccatcactatacacaacgttccagagggtctcgctgttggagttggatttggggctatagaaaagacggcatctgctacctttgagagtgccaggaatttggccattggaatcgggatccagaatttccccgagggcctggctgtcagccttcccttgcgaggggcaggcttctccacctggagagctttctggtatgggcagctgagcggcatggtggagcccctggccggggtctttggtgcctttgccgtggtgctggctgagcccatcctgccctacgctctggcctttgctgccggtgccatggtctacgtggtcatggacgacatcatccccgaagcccagatcagtggtaatgggaaactggcatcctgggcctccatcctgggatttgtagtgatgatgtcactggacgttggcctgggctagggctgagacgcttcggaccccgggaaaggccatacgaagaaacagcagtggttggcttctatgggacaacaagcttctttcttcacattaaaacttttttccttcctctcttcttcatctcattatcctgattgactctgattataatagaaccatttttactttgctttgagggagatttttgatttaatggggaattttaaggtgtcatggaaatacagattctttgttttggccactgaatggactctctcttcagtgggattatcaaggaacttcagatcagggaaatctccacttcgggaccttctatctgcctcccaactcctcaaggtcacctatagaagcgagctaccaaaagacgtctcctaagcattttggtggcctagtgactcagggcagagtggccagcacacctctcatccgcccctcctgctccatcactgctgagcctctccccatctagaatgttggaactggagcatcataaagatagcaagctaccttccaaggccgagccagcccagagaggagcatgtcttcctttacctccccctaaggagatactacatgggagggggacacagaaaaagggaaggaaattggctagtctggctttttttttttttttttttaaaggcaaagattgacattattgaaggaaaggggatgaggacaactgtgaactcacagtgagccctgtggaaagaagagacagacagagtgtgggtttgttcggaggcctctgctgtcaatggattccaggagcaaggccatttgtcgcgctttccaaatttcttaggcatttattttgataagtttatagccatcatgtttctaagagacttggagacaccagcaaactgctagaactcaaactcttcaattactcaaagaaggagccatttcagttaactcaagtgaatgaaagagttttggaatctgctgtgggtccttccctgttgaccatttggtaacttataatctgacaaaaactcttgagctgcaacaggccttgccagagggctcaggatgggaaaggaagaaggggataggaaaagaagaggtaattttacatttcccctttaaagtaaattttagccaactcatcattctgaaatgtccctataaagaatgagtcgaactagaccagaagccagcctactccttcttacatagcttctccaacaggggtagcaatgacctgtccacttcaaacacagataaggcctgccatcctcattggttaaaggcacacgtgagactttcagtgggctctgctgagaaggaaggcagcccaggagtcaggtatgcaggcattgcattgtcagtgtctgctctcagagtttacacattcaattgcttccaagggtgaatctcctgctctgtgaatgctatcagaccccaaaggccaaccttgggctgggtctatgtacgttcttccgaagcactgatgatcaaaattgaagacacattcagaggtttgattggttgagattaactggtgtggtggttggtgtatgtatgttttatttttatgtctttgtatgtagttctacataatgcaaattgtgctttctgatggacaagacctcataactgtgattaatatcaataaaaaggggatgttgtggatg

SEQ ID NO: 238335 - protein, 286 aa, Artificial Sequence
  derived and/or modified sequence
MEEKRRRARVQGAWAAPVKSQAIAQPATTAKSHLHQKPGQTWKNKEHHLSDREFVFKEPQQVVRRAPEPRVIDREGVYEISLSPTGVSRVCLYPGFVDVKEADWILEQLCQDVPWKQRTGIREDITYQQPRLTAWYGELPYTYSRITMEPNPHWHPVLRTLKNRIEENTGHTFNSLLCNLYRNEKDSVDWHSDDEPSLGRCPIIASLSFGATRTFEMRKKPPPEENGDYTYVERVKIPLDHGTLLIMEGATQADWQHRVPKEYHSREPRVNLTFRTVYPDPRGAPW

SEQ ID NO: 238336 - protein, 170 aa, Artificial Sequence
  derived and/or modified sequence
MEEKRRRARVQGAWAAPVKSQAIAQPATTAKSHLHQKPGQTWKNKEHHLSDREFVFKEPQQVVRRAPEPRVIEEGVYEISLSPTGVSRVCLYPGFVDVKEADWILEQLCQDVPWKQRTGIREDSILQLTFKKSAPVSGTATAPQSCWYERPSPPHIPGPAILTRTRLWAP

SEQ ID NO: 238337 - protein, 60 aa, Artificial Sequence
  derived and/or modified sequence
MEEKRRRARVQGAWAAPVKSQAIAQPATTAKSHLHQKPGQTWKNKEHHLSDREFVFKEPQ

SEQ ID NO: 238338 - DNA, 861 bp, Artificial Sequence
  derived and/or modified sequence
atggaggagaaaagacgtagggcccgagtacagggcgcttgggccgcccccgtcaagtctcaagcgatcgcccagcccgctaccaccgccaagtctcacctccatcagaaacctggccaaacctggaagaacaaagaacaccacctgtccgaccgggagtttgtctttaaggagccacagcaggtggtgaggcgggctccagaaccacgagtcattgacagagaaggagtctacgagattagcctttcccctaccggcgtgtctcgggtttgtctgtaccccggattcgtggatgtgaaggaagccgactggattctggagcagctttgtcaagatgtgccctggaaacagaggactggaatcagggaagatattacttaccagcagccacgcttaaccgcctggtatggcgaactgccctatacttattcaaggattaccatggagcccaatccacactggcatcccgtcctgagaactctgaaaaatcggatcgaagaaaacactgggcacacgttcaacagccttctgtgtaacctgtaccggaacgaaaaagatagcgtagactggcactccgatgatgagcccagtctgggaagatgtcccatcattgctagcctctcatttggtgccacccggacctttgagatgcgaaagaagcccccgcctgaagaaaacggcgactacacgtatgtcgaaagagtgaaaatcccactggaccacggcacgctgctgatcatggagggtgcgacacaggccgattggcagcatcgagtccccaaggaataccactctagggagccgagagtgaatctaactttccgcactgtgtatcccgaccctcggggggccccgtggtag

SEQ ID NO: 238339 - DNA, 513 bp, Artificial Sequence
  derived and/or modified sequence
atggaagagaagagaagacgagcacgggttcagggagcctgggcagcacctgtgaagtctcaggccatagcccagccagccacaaccgctaagtctcacctgcatcagaaacccggccagacatggaagaacaaggagcaccacctgtcagaccgcgaatttgtgttcaaagaaccccagcaagtagttagacgagcccctgaaccgagggtcattgaagaaggcgtgtacgagataagcctgtcacctacaggtgtgtcccgagtttgcttatatccggggttcgtagacgttaaagaggctgactggatattagaacagttgtgccaggatgtgccctggaagcagcggaccggcatcagagaggatagcatccttcagctcacctttaaaaagtccgcacctgtgtctggaaccgctaccgctccccagtcttgttggtatgaacggcccagtcctccccacatacctgggcctgctatacttaccaggacgcggctttgggcgccctag

SEQ ID NO: 238340 - DNA, 183 bp, Artificial Sequence
  derived and/or modified sequence
atggaagagaaaagacgccgtgctcgggtgcagggtgcgtgggctgcacccgtcaaatcccaagccatcgctcaaccagctacgacggcgaagtcccatctgcaccagaaacccggacagacatggaagaataaggaacatcatctttccgatcgcgagttcgtcttcaaagagccgcagtag

SEQ ID NO: 238341 - DNA, 861 bp, Artificial Sequence
  derived and/or modified sequence
atggaggagaagagaagaagagcccgggtgcagggcgcctgggccgcccctgtgaagagccaggccatcgcccagcctgccaccacagccaagagccacctgcaccagaagccaggccagacctggaagaacaaggagcaccacctgagtgaccgggagtttgtgttcaaggagccccagcaggtggtgcggcgggcccctgagcccagggtcatcgaccgggagggcgtgtatgagatcagcctgagccccactggagtgtcccgggtgtgcctgtacccaggctttgtggatgtgaaggaggccgactggatcctggagcagctgtgccaggatgtgccctggaagcagaggacaggcatccgggaggacatcacctaccagcagccccggctgacagcctggtacggggagctgccctacacctacagccgcatcaccatggagcccaacccccactggcaccctgtgctgcggaccctgaagaacagaattgaagaaaatacaggccacaccttcaacagcctgctgtgcaacctgtacagaaatgagaaggacagcgtggactggcacagtgatgatgagcccagcctgggccgctgccccatcatcgccagcctgagctttggagccaccaggacctttgagatgaggaagaagcccccaccagaagaaaatggagactacacctacgtggagcgggtgaagatccccctggaccacggcaccctgctgatcatggagggcgccacccaggccgactggcagcaccgggtgcccaaggagtaccacagccgggagccccgggtgaacctgaccttcagaacagtgtacccagaccccaggggggccccctggtag

SEQ ID NO: 238342 - DNA, 513 bp, Artificial Sequence
  derived and/or modified sequence
atggaggagaagagaagaagagcccgggtgcagggcgcctgggccgcccctgtgaagagccaggccatcgcccagcctgccaccacagccaagagccacctgcaccagaagccaggccagacctggaagaacaaggagcaccacctgagtgaccgggagtttgtgttcaaggagccccagcaggtggtgcggcgggcccctgagcccagggtcatcgaggagggcgtgtatgagatcagcctgagccccaccggggtgtcccgggtgtgcctgtacccaggctttgtggatgtgaaggaggccgactggatcctggagcagctgtgccaggatgtgccctggaagcagaggacaggcatccgggaggacagcatcctgcagctgaccttcaagaagagcgcccctgtgtctggaacagccacagccccccagagctgctggtatgaaagacccagccccccccacatccctggccctgccatcctgaccaggacccggctgtgggccccctag

SEQ ID NO: 238343 - DNA, 183 bp, Artificial Sequence
  derived and/or modified sequence
atggaggagaagagaagaagagcccgggtgcagggcgcctgggccgcccctgtgaagagccaggccatcgcccagcctgccaccacagccaagagccacctgcaccagaagccaggccagacctggaagaacaaggagcaccacctgagtgaccgggagtttgtgttcaaggagccccagtag

SEQ ID NO: 238344 - DNA, 1474 bp, Artificial Sequence
  derived and/or modified sequence
ggttccgatcacagactgcggagtgggtcaggggctgcgagggctgccccaagtcctaccgggtttgcacgggcgcgcccggctccgcccgcaagtgcgccttcctgacttactgctgggtgcgcggggctgggggtgcgagtaccacccctgaagtctcttcctgggcgacctccggggcctcattctaggcctccttaaagagaaggatctaaattaggaaaaggaagtgcccttatccacgaccaagctcttccacctgcggagctcgcttagtctgcacctcaaccgtgcggaaagtgactgccctgtttactgaggaaaaactggggctcagaaagataccatggagtagtttgaaacaggaacaaaatcttctgaaagctcggagcagaagcctttttggtcaacatggaggaaaaaagacggcgagcccgagttcagggagcctgggctgcccctgttaaaagccaggccattgctcagccagctaccactgctaagagccatctccaccagaagcctggccagacctggaagaacaaagagcatcatctctctgacagagagtttgtgttcaaagaacctcagcaggtagtacgtagagctcctgagccacgagtgattgacagagagggtgtgtatgaaatcagcctgtcacccacaggtgtatctagggtctgtttgtatcctggctttgttgacgtgaaagaagctgactggatattggaacagctttgtcaagatgttccctggaaacagaggactggcatcagagaggatataacttatcagcaaccaagacttacagcatggtatggagaacttccttacacttattcaagaatcactatggaaccaaatcctcactggcaccctgtgctgcgcacactaaagaaccgcattgaagagaacactggccacaccttcaactccttactctgcaatctttatcgcaatgagaaggacagcgtggactggcacagtgatgatgaaccctcactagggaggtgccccattattgcttcactaagttttggtgccacacgcacatttgagatgagaaagaagccaccaccagaagagaatggagactacacatatgtggaaagagtgaagatacccttggatcatgggaccttgttaatcatggaaggagcgacacaagctgactggcagcatcgagtgcccaaagaataccactctagagaaccgagagtgaacctgacctttcggacagtctatccagaccctcgaggggcaccctggtgacgtcagagctttgagagagaagcttcactgaaacggagcaaaccttccactgagaagccacttcaagaggctggtgctgctagatctcatgatgtggctgttgggaagatggtggggtttgtttgccagcttggagtcctattaaatgaaagccagcaactcatgttggtaataggtctactgtgggaacagttatccctaa

SEQ ID NO: 238345 - DNA, 918 bp, Artificial Sequence
  derived and/or modified sequence
gatcacagactgcggagtgggtcaggggctgcgagggctgccccaagtcctaccgggtttgcacgggcgcgcccggctccgcccgcaagtgcgccttcctgacttactgctgggtgcgcggggctgggggtgcgagtaccacccctgaagtctcttcctgggcgacctccggggcctcattctaggcctccttaaagagaaggatctaaattaggaaaaggaagtgcccttatccacgaccaagctcttccacctgcggagctcgcttagtctgcacctcaaccgtgcggaaagtgactgccctgtttactgaggaaaaactggggctcagaaagataccatggagtagtttgaaacaggaacaaaatcttctgaaagctcggagcagaagcctttttggtcaacatggaggaaaaaagacggcgagcccgagttcagggagcctgggctgcccctgttaaaagccaggccattgctcagccagctaccactgctaagagccatctccaccagaagcctggccagacctggaagaacaaagagcatcatctctctgacagagagtttgtgttcaaagaacctcagcaggtagtacgtagagctcctgagccacgagtgattgaagagggtgtgtatgaaatcagcctgtcacccacaggtgtatctagggtctgtttgtatcctggctttgttgacgtgaaagaagctgactggatattggaacagctttgtcaagatgttccctggaaacagaggactggcatcagagaggattccatattgcaactaacctttaagaagtcagcacctgttagtggaaccgcgactgctccgcagagctgctggtatgagcgcccgtcgccaccccacatcccaggcccagccattctgacaagaactagactttgggctccttga

SEQ ID NO: 238346 - DNA, 842 bp, Artificial Sequence
  derived and/or modified sequence
tgcggagtgggtcaggggctgcgagggctgccccaagtcctaccgggtttgcacgggcgcgcccggctccgcccgcaagtgcgccttcctgacttactgctgggtgcgcggggctgggggtgcgagtaccacccctgaagtctcttcctgggcgacctccggggcctcattctaggcctccttaaagagaaggatctaaattaggaaaaggaagtgcccttatccacgaccaagctcttccacctgcggagctcgcttagtctgcacctcaaccgtgcggaaagtgactgccctgtttactgaggaaaaactggggctcagaaaggtgaagtcatttgccatgggccatgcagctgggaagtgacagatctggattcaaagcgagttctggctggcgccagagtccttgtattttacagcactggttctcaagctttatgtgcattaagaattcctgggttgagggtggcgttagttaacaaattctgggactctacaaattgagtagatctgggatggggctctggaatctattttcaacaattgttccctggcaaataacatatggctccccagtgaatggagcaagaagataccatggagtagtttgaaacaggaacaaaatcttctgaaagctcggagcagaagcctttttggtcaacatggaggaaaaaagacggcgagcccgagttcagggagcctgggctgcccctgttaaaagccaggccattgctcagccagctaccactgctaagagccatctccaccagaagcctggccagacctggaagaacaaagagcatcatctctctgacagagagtttgtgttcaaagaacctcag

SEQ ID NO: 238347 - DNA, 861 bp, Artificial Sequence
  derived and/or modified sequence
atggaggagaagcggcggcgggcccgggtgcagggcgcctgggccgcgcccgtcaaatcacaggcaattgctcaaccggctactactgcaaaaagccatctgcaccagaaacctgggcaaacgtggaagaacaaggagcatcatttgtccgatcgtgaattcgtatttaaagaaccgcagcaggttgttaggagagctccagagccaagagtaatcgatcgggagggggtgtacgagatcagccttagtcctaccggggtctcccgggtttgcttgtacccgggttttgttgatgttaaagaggccgattggatacttgaacagctgtgccaggatgtgccatggaaacaacgcacaggaatccgggaggatatcacctaccagcaacccagattgacagcatggtacggggagctgccttacacgtattcaagaattacaatggaacccaacccacattggcatcctgttctccggacgctcaagaatcgaatcgaggagaatacaggacacaccttcaacagcttgttgtgtaacttgtaccgaaatgagaaggattccgtggattggcattccgacgatgaaccctcattggggcggtgccctatcattgcaagcttgtcttttggagctactagaacatttgagatgaggaaaaaaccaccccccgaagagaatggggactacacctacgtggagcgagtgaagatcccgctagaccatgggacccttctgattatggagggagcaacccaagcggactggcaacatcgcgtgccaaaggaataccactcacgagaaccaagggttaacctgacgttccgcaccgtttaccctgacccccgaggcgctccttggtag

SEQ ID NO: 238348 - DNA, 513 bp, Artificial Sequence
  derived and/or modified sequence
atggaggagaagcggcggcgggcccgggtgcagggcgcctgggccgcaccggttaagtcccaggccatcgctcaacccgctactactgccaaatcccatcttcatcaaaaacccgggcagacctggaaaaacaaggagcatcacttgtcagaccgcgagttcgtatttaaggagccccaacaagtcgtgaggcgggcacctgagccaagagtaatcgaggagggagtgtatgagatttcattgtcacccacgggtgtttccagagtttgtctctaccctggtttcgtggatgtcaaagaggctgactggatcttggagcagttatgccaagacgtgccttggaagcaacggactggcattagggaggactcgatcttgcagctgacgttcaaaaaaagtgcacctgtctctggcacagccacggctccccagtcctgctggtacgagcgaccatcaccaccgcatatccctggccctgccatcttgactcgcacccggctgtgggcaccgtag

SEQ ID NO: 238349 - DNA, 183 bp, Artificial Sequence
  derived and/or modified sequence
atggaggagaagcggcggcgggcccgggtgcagggcgcctgggccgcccccgttaagtcccaagccatcgcccagccggctactacagcgaaatcacacctgcaccagaaaccaggacaaacttggaagaacaaggagcaccatttgtctgacagggaattcgtgttcaaagaaccccagtag

SEQ ID NO: 238350 - DNA, 861 bp, Artificial Sequence
  derived and/or modified sequence
atggaagaaaagcggagacgagccagggtccagggtgcctgggcagctcccgtcaaaagtcaggcgatcgcccagccagcgaccaccgcaaagagccatttgcaccagaaacccggtcagacatggaagaacaaagaacatcatttgagcgaccgggaattcgtcttcaaggagcctcagcaggtggtgcggagggctccggagccgagagtgattgatagggagggagtgtacgaaatttcattgagccctacgggggtatcacgcgtatgtttataccccggttttgtggatgtcaaagaggctgactggatcctcgagcaactctgccaggacgtgccctggaaacagcggacgggaatccgcgaagacatcacttaccagcagcctaggctcactgcttggtacggagaattaccatatacttattccagaattaccatggagccgaatccccattggcatcctgtcctccggactctgaagaataggattgaagagaatactggccataccttcaactctttactgtgcaacctgtaccgaaatgaaaaagattctgtagactggcacagtgatgacgaaccctccctcggacggtgccctataattgccagcctgtccttcggggcaacgcggacatttgaaatgcgtaagaagccaccaccagaagagaatggggattatacctatgtggaacgagtgaaaatccccttagatcacggcaccctgcttataatggaaggcgcaacccaggcggattggcagcaccgcgtgcccaaagagtaccattcacgcgaaccgagagttaatcttacattccgtaccgtgtatccagaccccagaggcgctccatggtag

SEQ ID NO: 238351 - DNA, 513 bp, Artificial Sequence
  derived and/or modified sequence
atggaagaaaagcggaggcgcgcaagagtgcagggagcatgggcagctcccgtcaagtcccaggctatagcccagcctgccactacggccaagtctcacttacaccagaagcctgggcagacctggaaaaataaggagcatcaccttagtgacagagagttcgtttttaaggagccgcagcaggtggtgcgccgagccccagagccaagggtgatagaagagggggtttacgagatcagcctgagcccgactggggtgtcaagagtttgtctctaccctgggtttgtggacgtaaaggaagccgattggatattggagcagctgtgtcaggatgtgccttggaagcaacggaccggcatcagggaggactcaatcctgcaattgacatttaagaaatccgccccagtctctggaactgctaccgcccctcagtcctgctggtacgaacgaccgtccccccctcacattcccggtccagcaatcttgactcgcaccagactgtgggcaccttag

SEQ ID NO: 238352 - DNA, 183 bp, Artificial Sequence
  derived and/or modified sequence
atggaggagaaacggagaagggctcgcgtacagggggcatgggcagctcccgtcaaatcccaggcgatcgctcaacctgcaaccacggccaagtcccacctgcatcagaagccaggccagacgtggaaaaacaaggaacatcacctgagcgatcgcgaatttgtcttcaaggagccacagtag

SEQ ID NO: 238353 - DNA, 861 bp, Artificial Sequence
  derived and/or modified sequence
atggaggagaagagaagaagagccagagtgcagggcgcctgggccgcccccgtgaagagccaggccatcgcccagcccgccaccaccgccaagagccacctgcaccagaagcccggccagacctggaagaacaaggagcaccacctgagcgacagagagttcgtgttcaaggagccccagcaggtggtgagaagagcccccgagcccagagtgatcgacagagagggcgtgtacgagatcagcctgagccccaccggcgtgagcagagtgtgcctgtaccccggcttcgtggacgtgaaggaggccgactggatcctggagcagctgtgccaggacgtgccctggaagcagagaaccggcatcagagaggacatcacctaccagcagcccagactgaccgcctggtacggcgagctgccctacacctacagcagaatcaccatggagcccaacccccactggcaccccgtgctgagaaccctgaagaacagaatcgaggagaacaccggccacaccttcaacagcctgctgtgcaacctgtacagaaacgagaaggacagcgtggactggcacagcgacgacgagcccagcctgggcagatgccccatcatcgccagcctgagcttcggcgccaccagaaccttcgagatgagaaagaagcccccccccgaggagaacggcgactacacctacgtggagagagtgaagatccccctggaccacggcaccctgctgatcatggagggcgccacccaggccgactggcagcacagagtgcccaaggagtaccacagcagagagcccagagtgaacctgaccttcagaaccgtgtaccccgaccccagaggcgccccctggtag

SEQ ID NO: 238354 - DNA, 513 bp, Artificial Sequence
  derived and/or modified sequence
atggaggagaagagaagaagagccagagtgcagggcgcctgggccgcccccgtgaagagccaggccatcgcccagcccgccaccaccgccaagagccacctgcaccagaagcccggccagacctggaagaacaaggagcaccacctgagcgacagagagttcgtgttcaaggagccccagcaggtggtgagaagagcccccgagcccagagtgatcgaggagggcgtgtacgagatcagcctgagccccaccggcgtgagcagagtgtgcctgtaccccggcttcgtggacgtgaaggaggccgactggatcctggagcagctgtgccaggacgtgccctggaagcagagaaccggcatcagagaggacagcatcctgcagctgaccttcaagaagagcgcccccgtgagcggcaccgccaccgccccccagagctgctggtacgagagacccagccccccccacatccccggccccgccatcctgaccagaaccagactgtgggccccctag

SEQ ID NO: 238355 - DNA, 183 bp, Artificial Sequence
  derived and/or modified sequence
atggaggagaagagaagaagagccagagtgcagggcgcctgggccgcccccgtgaagagccaggccatcgcccagcccgccaccaccgccaagagccacctgcaccagaagcccggccagacctggaagaacaaggagcaccacctgagcgacagagagttcgtgttcaaggagccccagtag

SEQ ID NO: 238356 - protein, 1235 aa, Artificial Sequence
  derived and/or modified sequence
MATGTGKHKLLSTGPTEPWSIREKLCLASSVMRSGDQNWVSVSRAIKPFAEPGRPPDWFSQKHCASQYSELLETTETPKRKRGEKGEVVETVEDVIVRKLTAERVEELKKVIKETQERYRRLKRDAELIQAGHMDSRLDELCNDIATKKKLEEEEAEVKRKATDAAYQARQAVKTPPRRLPTVMVRSPIDSASPGGDYPLGDLTPTTMEEATSGVNESEMAVASGHLNSTGVLLEVGGVLPMIHGGEIQQTPNTVAASPAASGAPTLSRLLEAGPTQFTTPLASFTTVASEPPVKLVPPPVESVSQATIVMMPALPAPSSAPAVSTTESVAPVSQPDNCVPMEAVGDPHTVTVSMDSSEISMIINSIKEECFRSGVAEAPVGSKAPSIDGKEELDLAEKMDIAVSYTGEELDFETVGDIIAIIEDKVDDHPEVLDVAAVEAALSFCEENDDPQSLPGPWEHPIQQERDKPVPLPAPEMTVKQERLDFEETENKGIHELVDIREPSAEIKVEPAEPEPVISGAEIVAGVVPATSMEPPELRSQDLDEELGSTAAGEIVEADVAIGKGDETPLTNVKTEASPESMLSPSHGSNPIEDPLEAETQHKFEMSDSLKEESGTIFGSQIKDAPGEDEEEDGVSEAASLEEPKEEDQGEGYLSEMDNEPPVSESDDGFSIHNATLQSHTLADSIPSSPASSQFSVCSEDQEAIQAQKIWKKAIMLVWRAAANHRYANVFLQPVTDDIAPGYHSIVQRPMDLSTIKKNIENGLIRSTAEFQRDIMLMFQNAVMYNSSDHDVYHMAVEMQRDVLEQIQQFLATQLIMQTSESGISAKSLRGRDSTRKQDASEKDSVPMGSPAFLLSLFMGHEWVWLDSEQDHPNDSELSNDCRSLFSSWDSSLDLDVGNWRETEDPEAEELEESSPEREPSELLVGDGGSEESQEAARKASHQNLLHFLSEVAYLMEPLCISSNESSEGCCPPSGTRQEGREIKASEGERELCRETEELSAKGDPLVAEKPLGENGKPEVASAPSVICTVQGLLTESEEGEAQQESKGEDQGEVYVSEMEDQPPSGECDDAFNIKETPLVDTLFSHATSSKLTDLSQDDPVQDHLLFKKTLLPVWKMIASHRFSSPFLKPVSERQAPGYKDVVKRPMDLTSLKRNLSKGRIRTMAQFLRDLMLMFQNAVMYNDSDHHVYHMAVEMRQEVLEQIQVLNIWLDKRKGSSSLEGEPANPVDDGKPVF

SEQ ID NO: 238357 - DNA, 3708 bp, Artificial Sequence
  derived and/or modified sequence
atggccaccggcaccggcaagcacaagctgctgagcaccggccccaccgagccctggagcatcagagagaagctgtgcctggccagcagcgtgatgagaagcggcgaccagaactgggtgagcgtgagcagagccatcaagcccttcgccgagcccggcagaccccccgactggttcagccagaagcactgcgccagccagtacagcgagctgctggagaccaccgagacccccaagagaaagagaggcgagaagggcgaggtggtggagaccgtggaggacgtgatcgtgagaaagctgaccgccgagagagtggaggagctgaagaaggtgatcaaggagacccaggagagatacagaagactgaagagagacgccgagctgatccaggccggccacatggacagcagactggacgagctgtgcaacgacatcgccaccaagaagaagctggaggaggaggaggccgaggtgaagagaaaggccaccgacgccgcctaccaggccagacaggccgtgaagaccccccccagaagactgcccaccgtgatggtgagaagccccatcgacagcgccagccccggcggcgactaccccctgggcgacctgacccccaccaccatggaggaggccaccagcggcgtgaacgagagcgagatggccgtggccagcggccacctgaacagcaccggcgtgctgctggaggtgggcggcgtgctgcccatgatccacggcggcgagatccagcagacccccaacaccgtggccgccagccccgccgccagcggcgcccccaccctgagcagactgctggaggccggccccacccagttcaccacccccctggccagcttcaccaccgtggccagcgagccccccgtgaagctggtgcccccccccgtggagagcgtgagccaggccaccatcgtgatgatgcccgccctgcccgcccccagcagcgcccccgccgtgagcaccaccgagagcgtggcccccgtgagccagcccgacaactgcgtgcccatggaggccgtgggcgacccccacaccgtgaccgtgagcatggacagcagcgagatcagcatgatcatcaacagcatcaaggaggagtgcttcagaagcggcgtggccgaggcccccgtgggcagcaaggcccccagcatcgacggcaaggaggagctggacctggccgagaagatggacatcgccgtgagctacaccggcgaggagctggacttcgagaccgtgggcgacatcatcgccatcatcgaggacaaggtggacgaccaccccgaggtgctggacgtggccgccgtggaggccgccctgagcttctgcgaggagaacgacgacccccagagcctgcccggcccctgggagcaccccatccagcaggagagagacaagcccgtgcccctgcccgcccccgagatgaccgtgaagcaggagagactggacttcgaggagaccgagaacaagggcatccacgagctggtggacatcagagagcccagcgccgagatcaaggtggagcccgccgagcccgagcccgtgatcagcggcgccgagatcgtggccggcgtggtgcccgccaccagcatggagccccccgagctgagaagccaggacctggacgaggagctgggcagcaccgccgccggcgagatcgtggaggccgacgtggccatcggcaagggcgacgagacccccctgaccaacgtgaagaccgaggccagccccgagagcatgctgagccccagccacggcagcaaccccatcgaggaccccctggaggccgagacccagcacaagttcgagatgagcgacagcctgaaggaggagagcggcaccatcttcggcagccagatcaaggacgcccccggcgaggacgaggaggaggacggcgtgagcgaggccgccagcctggaggagcccaaggaggaggaccagggcgagggctacctgagcgagatggacaacgagccccccgtgagcgagagcgacgacggcttcagcatccacaacgccaccctgcagagccacaccctggccgacagcatccccagcagccccgccagcagccagttcagcgtgtgcagcgaggaccaggaggccatccaggcccagaagatctggaagaaggccatcatgctggtgtggagagccgccgccaaccacagatacgccaacgtgttcctgcagcccgtgaccgacgacatcgcccccggctaccacagcatcgtgcagagacccatggacctgagcaccatcaagaagaacatcgagaacggcctgatcagaagcaccgccgagttccagagagacatcatgctgatgttccagaacgccgtgatgtacaacagcagcgaccacgacgtgtaccacatggccgtggagatgcagagagacgtgctggagcagatccagcagttcctggccacccagctgatcatgcagaccagcgagagcggcatcagcgccaagagcctgagaggcagagacagcaccagaaagcaggacgccagcgagaaggacagcgtgcccatgggcagccccgccttcctgctgagcctgttcatgggccacgagtgggtgtggctggacagcgagcaggaccaccccaacgacagcgagctgagcaacgactgcagaagcctgttcagcagctgggacagcagcctggacctggacgtgggcaactggagagagaccgaggaccccgaggccgaggagctggaggagagcagccccgagagagagcccagcgagctgctggtgggcgacggcggcagcgaggagagccaggaggccgccagaaaggccagccaccagaacctgctgcacttcctgagcgaggtggcctacctgatggagcccctgtgcatcagcagcaacgagagcagcgagggctgctgcccccccagcggcaccagacaggagggcagagagatcaaggccagcgagggcgagagagagctgtgcagagagaccgaggagctgagcgccaagggcgaccccctggtggccgagaagcccctgggcgagaacggcaagcccgaggtggccagcgcccccagcgtgatctgcaccgtgcagggcctgctgaccgagagcgaggagggcgaggcccagcaggagagcaagggcgaggaccagggcgaggtgtacgtgagcgagatggaggaccagccccccagcggcgagtgcgacgacgccttcaacatcaaggagacccccctggtggacaccctgttcagccacgccaccagcagcaagctgaccgacctgagccaggacgaccccgtgcaggaccacctgctgttcaagaagaccctgctgcccgtgtggaagatgatcgccagccacagattcagcagccccttcctgaagcccgtgagcgagagacaggcccccggctacaaggacgtggtgaagagacccatggacctgaccagcctgaagagaaacctgagcaagggcagaatcagaaccatggcccagttcctgagagacctgatgctgatgttccagaacgccgtgatgtacaacgacagcgaccaccacgtgtaccacatggccgtggagatgagacaggaggtgctggagcagatccaggtgctgaacatctggctggacaagagaaagggcagcagcagcctggagggcgagcccgccaaccccgtggacgacggcaagcccgtgttctag

SEQ ID NO: 238358 - DNA, 3708 bp, Artificial Sequence
  derived and/or modified sequence
atggctacagggactggaaagcataaactcctcagtactgggcctactgaaccttggtctatccgcgagaaactctgcttggcttcctcagtgatgagaagtggggaccaaaactgggttagtgtgtcgcgcgcgattaaaccttttgctgagccaggacgccctcccgattggttcagccagaaacattgcgcctctcagtatagcgaacttctggagaccacggagactcccaagagaaaacgaggtgagaaaggagaggttgttgagaccgtagaagatgttatcgtaaggaaactgactgccgaaagggtcgaggagctgaaaaaagtcattaaagagacacaagagagataccggagattaaagagggatgccgaactaatccaggcagggcatatggatagcaggctggacgaactctgcaatgacattgcgacgaagaaaaagctggaggaggaggaggcggaggttaaacggaaagccaccgatgctgcttatcaggcgcgccaagccgtcaagacccccccccgcaggttaccaacagttatggtgcgatcacctatcgattccgcctcaccaggtggcgattatccactcggagatctgaccccaaccacgatggaagaggctacgtccggggtcaatgagtccgagatggccgttgcgtccggacacctaaattctaccggggtactgctggaggtcggtggagtgttacctatgatccatggcggcgagattcaacaaactcccaatacagtagctgcttccccagctgcgtccggagcgccaactctttcccggctgctggaagcaggaccgacgcaattcacgacacccctggcaagctttacaaccgtagctagcgagcctcccgtgaaactggtccccccaccagtggagagcgtatctcaggccactatcgtgatgatgcctgcactgcctgcgccaagcagtgcaccagctgtaagtacaactgaatcagtggctcctgtctcgcagcctgacaattgcgtgcctatggaagccgtgggtgaccctcacaccgtgactgtttccatggactcatctgaaatctccatgattatcaattctataaaggaagaatgcttccgaagcggggttgctgaagccccagtaggaagcaaagctcccagcatagacggcaaggaggagctggatctagccgagaagatggatatcgcggtcagctacactggcgaagaacttgacttcgaaaccgttggggatattattgctattatcgaggataaggtggatgatcaccctgaggtactcgacgtagctgcggtggaagcggccctaagcttttgtgaggagaacgatgaccctcaaagtctgcccggaccctgggagcaccccattcagcaggagcgtgacaagccggtgccacttcctgccccggagatgacagtcaaacaagagcggctggattttgaagagaccgaaaacaaaggaatccatgaattagtcgacatcagagaaccctccgctgagattaaggtggagcccgccgagcctgaaccagttatttcgggggccgagattgtggctggtgtggtccccgccacctccatggaaccccctgagcttcgcagccaggatctggatgaggagctcggaagtacagctgcaggggagattgtggaggccgacgtagcaatcgggaagggagatgaaactcctctcacaaacgtgaaaacagaagcgtcaccggaaagtatgctttcccctagccacggttcaaatccgattgaagatcccttggaagcagaaacccaacacaagtttgaaatgtctgatagtcttaaggaagagtccgggaccatcttcggatcccaaattaaagatgcgcctggcgaggacgaggaagaggacggagtgagcgaagccgcaagccttgaagagccgaaggaagaggaccaaggcgaagggtatttgtctgaaatggacaacgagccccccgtgtcagagtcggacgatggattctctatccacaatgccacgcttcagtctcacactctggctgattcaattccgtcctcccctgccagtagccagttcagcgtctgctctgaggatcaggaagcgattcaggcccagaaaatctggaagaaggcaatcatgttggtgtggcgtgcggctgcaaaccaccgctatgcaaatgtttttttacaacccgtcactgacgacatcgcccccggataccactctatagtgcagcggcccatggaccttagtaccattaagaaaaatattgaaaatggtctaatccgcagcacagccgaattccagcgggatatcatgctgatgttccaaaatgcggttatgtacaacagctccgatcacgatgtctaccacatggctgtggagatgcagcgagacgtcctggaacagattcaacagtttctggcaacccagctcatcatgcaaacgtccgaaagcggcattagtgccaaaagcctccgtggccgcgacagtaccagaaaacaggatgcctcagagaaagatagcgtcccaatggggtcccctgcgttccttctctccctgttcatgggccacgaatgggtgtggctagactccgagcaagatcatcccaacgactcggaattgagcaatgattgtcgttccctgttttcttcatgggatagctccctggaccttgatgtggggaactggagagaaaccgaagatccagaggcagaggagttagaagaaagctcacccgagcgcgagccttcggaacttcttgtgggtgatggcggcagtgaagagtcccaagaggctgcaagaaaggcatcccatcaaaatctactccacttcctctccgaagtggcatacctgatggagcctctgtgtatttcctccaacgagtcgagcgagggttgctgcccacccagcggaacgcgccaagaggggcgagaaatcaaggcttctgaaggggagcgcgagttgtgccgcgaaactgaggagctctcagctaagggagaccccctggtcgcggagaagccacttggagagaatggcaagcctgaggtggcctctgcaccgagcgtgatctgtactgtacagggtctgttaaccgaatccgaagaaggagaggcacaacaagaatctaaaggggaggatcagggagaagtctacgtctccgagatggaagaccagccgcccagcggtgagtgcgatgatgctttcaatatcaaggaaaccccccttgtcgacacactattttcccacgccacatccagtaaactgacagacctgtcccaggacgaccccgtccaggatcacctattatttaagaagacactcctgcctgtatggaaaatgattgccagtcatcggttttcgtctcctttcctgaagccggtgtccgagcgtcaggctccaggatataaggatgtggtcaagagaccaatggatcttactagcttaaaacgcaatttgtccaagggtaggattaggaccatggcccagttcctgcgcgatttgatgttaatgtttcagaatgccgtgatgtacaacgactcagaccaccatgtgtaccatatggctgtcgaaatgagacaagaggtactggaacagatccaggtcctgaacatatggcttgataaaaggaaaggctcaagcagcctcgagggggagcccgctaaccccgtagacgatggaaagcctgtcttttag

SEQ ID NO: 238359 - DNA, 3708 bp, Artificial Sequence
  derived and/or modified sequence
atggccactggaacaggcaagcacaagctgctgagcacaggccccacagagccctggagcatccgggagaagctgtgcctggccagctctgtgatgaggtctggggaccagaactgggtgtctgtgtcccgggccatcaagccctttgctgagcccggccggcccccagactggttcagccagaagcactgtgccagccagtacagcgagctgctggagaccacagagacccccaagaggaagagaggagagaagggggaggtggtggagaccgtggaggatgtgattgtgaggaagctgacagctgagcgggtggaggagctgaagaaggtgatcaaggagacccaggagcgctaccgccgcctgaagagagatgctgagctgatccaggccggccacatggacagccggctggatgagctgtgcaatgacatcgccaccaagaagaagctggaggaggaggaggccgaggtgaagaggaaggccacagatgctgcctaccaggcccggcaggccgtgaagaccccaccccggcggctgcccaccgtgatggtgcgcagccccattgattctgccagccctggaggagactaccccctgggggacctgacccccaccaccatggaggaggccaccagcggcgtgaatgaaagtgagatggctgtggccagcggccacctgaacagcactggagtgctgctggaggtgggcggcgtgctgcccatgatccacggcggggagatccagcagacccccaacacagtggccgccagccctgctgccagcggggcccccaccctgagccggctgctggaggccggccccacccagttcaccacccccctggccagcttcaccaccgtggccagcgagccccctgtgaagctggtgcccccacctgtggagagcgtgtcccaggccaccatcgtgatgatgcctgccctgcctgcccccagcagcgccccagctgtgtccaccacagaatctgtggcccctgtgtcccagcctgacaactgtgtgcccatggaggccgtgggggacccccacacagtgacagtgtccatggacagcagcgagatctccatgatcatcaacagcatcaaggaggagtgcttccgcagcggcgtggccgaggcccctgtgggcagcaaggcccccagcattgatggcaaggaggagctggacctggccgagaagatggacattgctgtgtcctacacaggagaggagctggactttgaaacagtgggggacatcatcgccatcatcgaggacaaggtggatgaccaccctgaggtgctggatgtggccgctgtggaggccgccctgtccttctgtgaggagaatgatgacccccagagcctgcccggcccctgggagcaccccatccagcaggagcgggacaagcctgtgcccctgcctgcccctgagatgacagtgaagcaggagcggctggactttgaggagacagaaaataaaggcatccacgagctggtggacatccgggagcccagcgctgagatcaaggtggagcctgctgagcctgagcctgtgatcagcggggctgagatcgtggccggcgtggtgcctgccacctccatggagcccccagagctgcggagccaggacctggatgaggagctgggcagcacagctgctggggagatcgtggaggctgatgtggccatcggcaaaggagatgagacccccctgaccaacgtgaagacagaggccagccctgagagcatgctgagccccagccacggcagcaaccccatcgaggaccccctggaggccgagacccagcacaagtttgagatgtctgacagcctgaaggaggagagcggcaccatcttcggcagccagatcaaggatgcccctggagaagatgaggaggaggatggagtgtctgaggccgccagcctggaggagcccaaggaggaggaccagggcgagggctacctgtctgagatggacaatgagccccctgtgtctgagagtgatgatggcttcagcatccacaatgccaccctgcagagccacaccctggccgacagcatccccagcagccctgccagcagccagttctctgtgtgcagcgaggaccaggaggccatccaggcccagaagatctggaagaaggccatcatgctggtgtggagggctgctgccaaccacagatatgccaacgtgttcctgcagcctgtgacagatgacatcgcccctggctaccacagcatcgtgcagaggcccatggacctgagcaccatcaagaagaacattgaaaatggcctcatccgcagcacagctgagttccagagggacatcatgctgatgttccagaatgctgtgatgtacaacagcagtgaccatgatgtgtaccacatggctgtggagatgcagagagatgtgctggagcagatccagcagttcctggccacccagctgatcatgcagaccagcgagagcggcatcagcgccaagagcctgcggggccgggacagcaccaggaagcaggatgccagcgagaaggacagcgtgcccatgggcagccctgccttcctgctgagcctcttcatgggccacgagtgggtgtggctggacagcgagcaggaccaccccaatgattctgagctgagcaatgactgccgcagcctcttcagctcctgggacagcagcctggacctggatgtgggcaactggagggagacagaagatcctgaggccgaggagctggaggagagcagccctgagcgggagcccagcgagctgctggtgggagatggcggcagcgaggagagccaggaggccgccaggaaggccagccaccagaacctgctgcacttcctgtctgaggtggcctacctgatggagcccctgtgcatcagcagcaatgaaagcagcgagggctgctgccccccatctggcacccggcaggagggccgggagatcaaggccagcgagggggagcgggagctgtgccgggagacagaggagctgagcgccaagggggaccccctggtggccgagaagcccctgggagaaaatggcaagccagaggtggccagcgcccccagcgtcatctgcaccgtgcagggcctgctgacagagagcgaggagggggaggcccagcaggagagcaagggggaggaccagggcgaggtgtatgtgtctgagatggaggaccagccccccagcggggagtgtgatgatgccttcaacatcaaggagacccccctggtggacaccctcttcagccacgccaccagcagcaagctgacagacctgagccaggatgatcctgtgcaggaccacctgctcttcaagaagaccctgctgcctgtgtggaagatgattgccagccaccgcttcagcagccccttcctgaagcctgtgtctgagcggcaggcccctggctacaaggatgtggtgaagaggcccatggacctgaccagcctgaagaggaacctgagcaagggccgcatccgcaccatggcccagttcctgcgggacctgatgctgatgttccagaatgctgtgatgtacaatgacagcgaccaccacgtgtaccacatggctgtggagatgaggcaggaggtgctggagcagatccaggtgctgaacatctggctggacaagaggaagggcagcagcagcctggagggggagcccgccaaccctgtggatgatggcaagcctgtgttctag

SEQ ID NO: 238360 - DNA, 3708 bp, Artificial Sequence
  derived and/or modified sequence
atggccaccggcaccggcaagcacaagctgctgagcaccggccccaccgaaccatggtcaatccgggagaagctctgccttgcaagctccgtaatgagaagtggcgatcaaaattgggtgagcgtctctagagccattaaaccattcgccgagcctggaaggcccccagactggttttcacagaaacactgcgccagtcagtactcggagctcctagaaaccactgagacgcccaagcgaaagaggggcgagaaaggcgaagtggtagaaactgtggaggatgtgatagtcaggaagctcacagccgagcgtgtggaggaactgaagaaggtcataaaggagacacaggaaaggtaccggcgtctgaaaagagacgctgagcttattcaagcggggcacatggactcccggctggacgagctctgcaatgatatcgccaccaaaaagaagctcgaagaggaggaggcggaagtaaaacgtaaggccacagacgccgcctatcaggccaggcaggctgtgaaaaccccccctcgtcgactgccaactgttatggttagatctcctattgatagtgctagcccggggggagattaccccctgggagacctgactcccaccaccatggaggaggcaacttccggcgtcaacgaaagcgagatggcagtggctagtggtcatttaaacagtaccggagtgctgctggaggttggaggagtgctcccaatgattcatggaggcgagatccagcagacacctaacacagttgctgcttcgccggccgcttctggagctccgaccctgtccagattgctagaagccggccccacacagttcaccacaccattagcttctttcactaccgtggcatcagaaccacccgtgaagctggtccccccccctgtggagagcgtctctcaagcaacaatcgtgatgatgcctgctctgcccgcgccctcctctgctcctgccgtgtcaaccaccgagtcggtggccccagtctctcagcccgataactgtgttcccatggaggctgtgggcgatccgcacaccgtgacagtatccatggactcatccgaaatttccatgattataaacagtattaaagaggagtgtttccgcagcggcgtagctgaagcccctgtgggcagcaaagcaccaagtatcgatggtaaagaggagctcgatctggcggagaaaatggacattgcagtcagctatacaggtgaagaattggatttcgagactgtgggcgacattatcgccatcatcgaggataaagtagacgaccaccccgaggtccttgatgtcgccgccgtggaggcagcgctgtccttctgtgaagaaaatgatgatccccaatcattacctggaccttgggaacatccaatccagcaggaaagggataagcctgtccctctgccggcccctgaaatgacagtgaagcaggaaagactcgattttgaggaaacagaaaacaaagggatccacgaactcgtagacattcgtgaaccttccgccgagataaaagtggagcctgccgagccagaaccagtgattagcggtgccgagatagtcgccggagtagtgccggcgacctccatggaaccacccgaactgcgatcacaggacttggacgaagaactaggctccacagccgccggcgagatagtggaagccgacgttgccattggaaagggagatgaaacacccctgactaatgtcaaaacggaagccagccccgagtccatgttgagtcccagtcacgggagtaatccgatcgaagacccccttgaagcggaaacgcagcacaagttcgagatgagtgactcacttaaggaagaaagtgggaccatcttcggctctcagatcaaagatgcccctggtgaagacgaggaagaggatggtgtcagcgaagccgccagcctggaagaaccaaaggaggaggaccagggagaaggctatttgagtgagatggacaacgaaccacccgtgagcgaatcagacgacggcttttcgattcacaatgccactctgcagtcccataccctggccgattcaattccatcctcaccggcttcaagccagttctctgtttgctctgaagatcaggaggcgatccaagctcagaaaatttggaaaaaagctatcatgctggtgtggagagcagcagccaaccataggtacgcaaatgtgttcttacagccggtaaccgatgacatcgcacccgggtaccactcgattgtacagcggcccatggatctgtccaccattaaaaagaacattgaaaatgggctcatacgtagcacggcggagtttcagcgtgatatcatgctgatgtttcagaacgctgtcatgtataattctagcgaccacgatgtttatcacatggccgtggagatgcagcgagacgtcttggagcagatccagcagttcctcgccactcagctgatcatgcagactagcgagtcgggtatttccgccaagtccctacgtgggagagatagtacgcgcaaacaggatgcatccgagaaggactctgttccgatgggctcacccgccttcctgctgtcgctcttcatggggcacgaatgggtatggctagacagtgaacaggatcatccgaatgacagcgaactaagcaacgattgtcggtccttattttcttcatgggattccagtctcgatctggacgttgggaattggagggagaccgaagatcccgaagccgaggaactggaggaatcatcccccgaaagggaacccagcgaattgctggtgggcgatggcggctctgaagagagccaagaagcagcacggaaagcaagtcaccagaatctcctgcacttcctctctgaggttgcctacctcatggaacccctatgtatctcatcaaatgagtcttcagagggttgttgccctccctcgggaacaagacaggagggtagagaaatcaaggcttctgaaggcgagagggagttgtgtagggaaacggaagaactctccgctaaaggcgacccactggtcgctgagaaacctctgggcgaaaacgggaaacctgaggtagcatccgcccccagtgttatctgcacagttcagggcctgctcactgaaagtgaagaaggggaagcgcagcaggagtcaaaaggtgaagatcagggagaagtgtatgtgtctgaaatggaggatcagcccccaagcggggagtgtgatgatgcctttaatatcaaggagactcccttggtggataccttattcagccatgcaacctcctctaagctgaccgatctgagccaggacgaccccgtgcaggaccatctgctcttcaagaaaactctgctacctgtctggaagatgatcgccagccacaggttcagtagcccatttctgaaacctgtctctgaacgacaggcccctggttataaagatgtcgtgaagcggcctatggatctgactagcctcaaaaggaacctgagcaaggggagaataaggaccatggctcagttcctgagagaccttatgctcatgtttcaaaatgccgtgatgtacaacgatagcgatcatcacgtgtatcacatggccgtggaaatgaggcaggaggtattagagcagatccaggtcctgaatatttggttagataagcgcaaggggagcagttcattagaaggagagccagcaaatccggtggacgacgggaagccagtgttctag

SEQ ID NO: 238361 - DNA, 3708 bp, Artificial Sequence
  derived and/or modified sequence
atggcgaccggaacaggcaagcataaactgctgtccacaggtcctaccgagccttggtccatccgcgagaagttgtgccttgcctcgtcggttatgcgctctggagatcagaactgggtatctgtgtcacgcgctattaagccttttgccgagcctggaaggcccccagattggttttcacagaagcattgcgcgtcacaatatagcgaactgcttgaaaccactgagacacccaagaggaagaggggggagaagggagaggtggtggagactgtggaggatgtgatcgtccgcaaattgaccgctgaacgggtggaagaactcaaaaaagttatcaaggagacccaggagcgataccggcgactgaagagggacgccgagctcattcaggcaggtcatatggatagcaggttagatgagctttgtaatgatatcgccaccaaaaaaaaactggaagaggaagaggcggaagtcaagagaaaagcaaccgacgctgcctaccaagcgagacaagcagttaagactccgccacgcagattacctacagtgatggtgaggtcgccaatagattcagcgagtccaggcggtgattatccgctgggcgacctgactcccacaaccatggaggaagctacttccggcgtgaacgaaagcgaaatggccgtggcatccggacacctcaattcaaccggggtgctcctggaagtgggaggggtgctgcccatgatacacgggggtgagattcaacagactccaaatacggtagccgcatcccccgctgcatcgggcgctccaaccctgagtcgcctgctggaggccggacccacacagttcaccacaccactagcctcgttcacgacagttgcatccgagcccccagtgaaactagtgccaccccctgtggaaagcgtgagccaggcgactattgtgatgatgcccgctctgcctgcacccagctcagcccctgccgtgtcgaccactgagtcagtagccccagtgtcgcaaccagacaactgtgtccccatggaagctgtgggtgatccgcacaccgtaacagtgagcatggacagctcggagatctccatgatcatcaactctattaaagaggagtgcttcagatccggcgtagcagaagctcccgtggggtctaaggccccttctatcgatggcaaggaggaactggaccttgctgagaaaatggatattgcggtttcttacaccggggaggaactggactttgagaccgtgggtgacatcatcgccataatcgaagacaaggttgacgatcacccagaggtgctggacgtggccgcagtagaggcggcactgagcttctgcgaagaaaacgatgaccctcagtctctgccaggtccttgggaacacccaatacagcaggagcgggacaagcctgtgcccctgcctgctccagaaatgactgtgaagcaggaaaggctcgactttgaagaaaccgaaaataagggcatacacgaattggtcgatatccgcgaacctagcgctgagattaaggtggaacccgcagaacccgagcctgtaatttctggtgctgagattgtggccggtgtcgttcccgcaacatctatggagccacctgaacttcggagccaggatcttgatgaagagctaggatccactgccgctggcgaaatcgtagaggccgacgtagccatcggaaagggcgacgagacaccactgacaaatgtgaagacagaggcgtctcccgaatcaatgctgtctcctagtcacggaagcaatccaattgaggatcccctcgaggccgagacccagcacaagtttgagatgagcgatagcctgaaggaggaatccggaactatctttggaagccagatcaaagatgcaccaggcgaggacgaggaggaggacggcgtctctgaagctgcctcactagaagaaccaaaggaagaggaccagggcgaaggatatctgtccgagatggacaatgaaccgccagtatcggaatccgatgatggatttagcattcacaacgccacattgcagtctcataccctggctgattccattcccagcagccccgcttccagccaattttcagtctgctctgaggatcaggaagccatacaggcccagaaaatctggaagaaggcaattatgctggtgtggcgggcagccgcaaaccaccgttatgcaaatgttttcttgcaaccagtgactgacgacatcgcccctgggtatcatagtatcgttcagcgcccaatggatctttcaacgattaagaagaatattgagaacggtctgatccgaagcactgccgagttccagcgtgatatcatgctgatgtttcaaaatgcagtcatgtacaactcaagtgaccacgacgtctatcatatggctgtcgagatgcaaagagacgtcttggaacaaatacaacagtttcttgctacccagctgatcatgcagactagtgagtccggaattagcgcaaagtcccttcgagggagagacagtactagaaagcaagacgcttcagagaaggacagtgtgccgatgggcagtcccgcatttctactgtccttgttcatgggtcatgaatgggtgtggctagacagtgagcaagatcatccaaacgacagcgagctgtctaacgattgcaggtctttgttttcttcctgggacagctctctggacttggatgtaggcaactggcgcgagacagaggatcctgaagccgaggagctggaggagtcctccccagaaagggaaccaagcgaactactcgttggtgatggcggatcggaagaaagccaggaagctgcacggaaggccagtcatcagaacctattgcatttcctgtctgaagtagcctatctgatggagcccctctgcatttctagcaacgagtctagtgaggggtgctgccctccctctggcacccggcaggaaggaagagaaattaaggcaagcgagggcgaacgcgagctgtgccgagaaacggaagagcttagcgcaaaaggcgacccattggttgccgaaaagccactcggcgagaacgggaaacctgaagtcgccagtgcaccttctgttatttgtaccgtgcagggactgctgactgagagtgaagagggcgaggcccagcaggagtccaaaggtgaggaccagggtgaggtttatgtgagcgagatggaggatcaaccaccttccggcgaatgcgacgacgcttttaacattaaagagactccgctcgtggatacactgtttagccatgccacatcaagcaagctcactgatttgtctcaggacgatccagtgcaagaccacctcctctttaaaaaaacactcctgcctgtgtggaaaatgatagcaagtcataggttttcaagtccctttctcaaacctgtttcggaaaggcaggcacccggatacaaggatgtggtgaagcgtcctatggacctgacatcactgaagaggaacctgagcaaaggtagaatacgcaccatggcgcaattcttacgcgacctcatgctcatgttccagaacgccgtgatgtataatgacagcgaccatcacgtatatcatatggctgtggagatgcggcaagaagtgctagaacagattcaagtgctaaacatatggctcgataagagaaaaggttcctcttctctggagggagagcctgccaatcctgtggatgacggcaaacccgttttctag

SEQ ID NO: 238362 - DNA, 4388 bp, Artificial Sequence
  derived and/or modified sequence
aattccagtcgttcgcttctgcttgacctctgagttctaatgtgggtccgggttaccaactgtcgtggattcgcacttattttgcctgggattcttccaacttaacctttttccttgaaccttagacatttcttacctaagagcctaaaggaaatcttgaggcttcagcagccaactcctgtccttccttagcaacaatcttaacaggagtgcacagggtaactggtttagggtgcttgctttgtcttaaggggaaaaacgacatttcccaggaggcaccgcgaaccaacgccggtacactatttcccagaattccagggtttcggcccttccagaccgtctctcctcagggttggagacttcggggccaagatggcgacgggaacgggcaaacacaagctgctaagcactggccccacagagccatggtccatccgagagaagctatgtttagcatcttctgtcatgagaagtggcgatcaaaattgggtatcagttagcagagcaatcaagccctttgcagaacctggccgccctccagactggttctctcaaaaacattgtgcttcccagtactcggagcttttagagaccactgagacaccaaaacggaaacgaggtgaaaagggagaagtggtggaaactgttgaagatgttattgttcggaaattgactgctgagcgagttgaagaactaaagaaagtgataaaggaaacccaggagagatatagacggctaaagagagatgcagaactaattcaagctggacacatggacagcagactggatgagctttgcaatgacattgcaacgaaaaagaaattggaagaagaggaggctgaagtaaagaggaaggctacagatgctgcataccaggctcgtcaagcagtaaaaacacccccccggaggttacccactgtgatggttcgctctcctatagattctgcctccccaggaggtgattatccacttggggacttgactccaaccactatggaagaggctacctctggggtcaatgagagtgaaatggctgtggcttctggccacctgaacagtacaggtgtcctcctggaggtaggcggggtccttcccatgatacatggtggggagatacagcaaacacccaatactgttgcagcctcccctgctgcatcaggtgctcccactctttcccggcttttagaagctggtcctacacagttcaccacacctcttgcttccttcactactgttgccagtgagcctccagttaaacttgtgccaccccctgtagagtctgtgtcccaagctaccattgtcatgatgcctgcgctgccagcaccatcctctgctccggctgtctccactactgaaagtgtagctccagtgagtcaacccgacaactgtgttcccatggaggctgtgggggatccacatactgtgactgtttccatggacagcagtgaaatatccatgatcatcaattctatcaaagaagagtgttttcgatcaggggtagcagaggctcctgttggatcaaaggctcccagcatagatgggaaggaagaattagatctggctgagaagatggatattgctgtgtcttacacaggtgaagagctggattttgagactgttggagacatcattgccatcattgaggacaaggtagatgatcatcctgaagtgctggatgtggcagcagtggaagcagcactgtcattttgtgaagaaaatgatgatcctcagtccctgcctggcccctgggagcatcctatccagcaggagcgggacaagccagtacctctccctgcaccagaaatgacggtcaagcaagagagactggactttgaggaaacggaaaacaagggaatacatgaactggtggacatcagggagcccagtgcagagatcaaggtggaacctgcagaaccagagccagtcatttcaggagccgaaatagtagctggagttgttccagccacaagtatggagccaccagaactcaggagtcaggacttagatgaggaactgggaagtactgcagctggagagattgttgaagcagatgttgccattgggaaaggcgatgagactccacttacaaatgtgaagacagaggcatcccctgaaagcatgttgtctccatcacatggctcaaatcccattgaagatcctttagaggcagagactcagcacaagtttgaaatgtcagactcattgaaagaagaatcagggactatttttggaagccagataaaggatgccccaggtgaggatgaggaggaagatggtgtcagtgaagcggccagcctagaggagcctaaggaagaggatcaaggagaaggctacttgtcagaaatggataatgaacctcctgtgagcgagagtgatgatggcttcagcatacacaatgctacactgcagtcacacacactggcagactccatccccagcagccctgcttcttcacagttctctgtctgtagtgaggatcaggaagctattcaggcacagaaaatttggaagaaagccatcatgcttgtatggagagctgcagctaatcataggtatgccaatgtcttcctgcagcctgttacagatgacatagcacctggctaccacagcattgtgcagaggcctatggatttgtcaactattaagaaaaacatagaaaatggactgatccgaagcacagctgaatttcagcgtgacattatgctgatgtttcagaatgctgtaatgtacaatagctcagaccatgatgtctatcacatggcagtggagatgcagcgagatgtcttggaacagatccagcaattcttggccacgcagttgattatgcaaacatccgagtctgggatcagtgctaaaagtcttcgagggagagattctacccgcaaacaggatgcttcagagaaggacagtgtcccaatgggctctcctgccttccttctctctctctttatgggacacgagtgggtttggctggattctgaacaagatcatcccaatgactctgagttgagcaatgactgcaggtccctcttcagctcatgggactccagtctggatcttgatgtgggcaactggagggaaactgaggatccagaggctgaggaactagaggaaagcagcccggagagagaacctagtgaactgcttgttggggatggaggcagtgaggaatctcaggaagcggcaaggaaagccagccaccagaacctcctccactttctctctgaggtagcttatttaatggagcccttgtgcatcagcagcaacgaatcaagtgaaggctgctgccctccatctggtaccagacaagaaggaagggaaattaaagctagcgaaggagaaagggagctctgcagagagactgaagagctttcagctaaaggagaccccttagtagctgaaaagccactgggagaaaatggaaagccagaggtggcttcagctccctcagttatttgtacagttcagggactactcacagagagtgaagagggggaggctcagcaagaatccaaaggggaggaccagggtgaagtatatgtgtcagagatggaagaccagcccccttcaggcgagtgtgatgatgcctttaacattaaggagactcccttggtggatacacttttcagccatgctacctcctcaaagctgactgatctaagccaggatgaccctgttcaggatcatttgctatttaagaagactctcctgccagtctggaagatgattgccagtcacaggttcagcagtccatttctgaagcctgtgtcagaaaggcaggccccagggtacaaggatgtggtgaaaagacccatggacttaactagcctgaagagaaatctctctaagggtcggattcgcaccatggcccaattcctgcgagacctgatgctgatgttccaaaatgctgtaatgtacaatgactctgatcatcatgtataccatatggctgtggagatgcggcaagaagtcctggagcagattcaggtactgaatatctggttagacaaaagaaaaggctcaagtagtctggaaggagaaccagctaacccagtggatgatggaaaacctgttttctaacctggagctgctatcctgactttttctagagtttgaatctctcccggaactctgacctagagaggatcctggtacttctttgccatgtcctcattttcttttccaacaagaataataccttaactcacaaccaacgagtcaaagatgcatgtggacataatataaagaaaaaaaggggaagctgaggtttggatttatgccataaatgttgcccacatctttgttccatcggcttgatttaaagacaattccattagatcttttctaagccttttactctataaataaatgtatttacacaataggaa

SEQ ID NO: 238363 - protein, 471 aa, Artificial Sequence
  derived and/or modified sequence
MSKRLRSSEVCADCSGPDPSWASVNRGTFLCDECCSVHRSLGRHISQVRHLKHTPWPPTLLQMVETLYNNGANSIWEHSLLDPASIMSGRRKANPQDKVHPNKAEFIRAKYQMLAFVHRLPCRDDDSVTAKDLSKQLHSSVRTGNLETCLRLLSLGAQANFFHPEKGNTPLHVASKAGQILQAELLAVYGADPGTQDSSGKTPVDYARQGGHHELAERLVEIQYELTDRLAFYLCGRKPDHKNGQHFIIPQMADSSLDLSELAKAAKKKLQSLSNHLFEELAMDVYDEVDRRETDAVWLATQNHSALVTETTVVPFLPVNPEYSSTRNQGRQKLARFNAHEFATLVIDILSDAKRRQQGSSLSGSKDNVELILKTINNQHSVESQDNDQPDYDSVASDEDTDLETTASKTNRQKSLDSDLSDGPVTVQEFMEVKNALVASEAKIQQLMKVNNNLSDELRIMQKKLLGKDAN

SEQ ID NO: 238364 - DNA, 1416 bp, Artificial Sequence
  derived and/or modified sequence
atgtcaaagaggctacgctcttctgaggtatgtgctgactgctctgggccggaccctagctgggcgagtgtgaaccgcggtacatttttgtgcgacgaatgttgcagcgtgcatagatcactcggtagacatatttcgcaagttaggcacctgaagcacactccatggcctcctaccctccttcaaatggtagagacactgtacaacaacggagctaattccatttgggagcatagcctcctggacccagcaagcattatgtccgggagaagaaaggcaaacccacaggataaggtccatcccaataaagctgagttcattcgggcgaaataccagatgctcgccttcgtccataggctgccttgccgagatgatgactcagtaactgccaaggatctgtctaagcagctccactcatccgtgcggacagggaatctcgaaacctgtctgaggcttttgtctctcggggcccaagctaatttctttcaccctgagaagggaaatacacccctgcatgtagccagcaaagcaggacagatcttacaggccgagctgttggcagtctacggcgccgatccgggcactcaggattcatccgggaagacgccggttgattatgcccgtcaaggggggcaccacgaactcgcagagcgtctggttgaaattcagtatgaactgacggacagacttgccttctacttgtgcgggaggaaacccgaccataagaatggacaacatttcatcatacctcagatggccgattcatccctcgacctgtccgaactcgcaaaagcagctaagaaaaaactgcagagcctgtccaaccacctttttgaggagcttgccatggatgtgtacgacgaggtagatcggcgggaaactgacgcagtctggttggccacacagaaccacagcgctctcgttaccgagaccactgtcgtgccattccttcctgtgaacccagagtactcatcaactagaaatcagggtagacagaaactcgctaggtttaatgctcacgagttcgccacgctggtcattgatattctgtctgatgccaagaggaggcagcagggcagcagtctgagcggatcaaaggacaacgtggagttgattctcaagactattaataaccagcacagcgtggagtcccaggacaacgaccagcccgattatgactcagtagcttccgacgaggacaccgacctcgaaacaaccgcaagcaagacgaatcggcagaaaagcctggactcagacctgagtgacggccctgtgaccgtccaggagtttatggaggtgaagaatgccctggttgcctccgaggccaagatacagcagttgatgaaagtgaataataatctgagcgatgagctccgcatcatgcagaagaaactacttgggaaagatgccaattag

SEQ ID NO: 238365 - DNA, 1416 bp, Artificial Sequence
  derived and/or modified sequence
atgagcaagaggctgcggagcagcgaggtgtgtgccgactgcagcggccctgaccccagctgggcctctgtgaacagaggcaccttcctgtgtgatgagtgctgcagcgtgcacaggagcctgggccgccacatcagccaggtgcgccacctgaagcacaccccctggccacccaccctgctgcagatggtggagaccctgtacaacaacggggccaacagcatctgggagcacagcctgctggaccctgccagcatcatgagcggccgcaggaaggccaacccccaggacaaggtgcaccccaacaaggccgagttcatccgggccaagtaccagatgctggcctttgtgcaccggctgccctgcagagatgatgattctgtgacagccaaggacctgagcaagcagctgcacagctctgtgaggactggaaacctggagacctgcctgcggctgctgagcctgggcgcccaggccaacttcttccaccctgagaagggcaacacccccctgcacgtggccagcaaggccggccagatcctgcaggccgagctgctggccgtgtatggagctgaccccggcacccaggacagcagcggcaagacccctgtggactatgcccggcagggcggccaccacgagctggccgagcggctggtggagatccagtatgagctgacagaccggctggccttctacctgtgtggcaggaagccagaccacaagaatggccagcacttcatcatcccccagatggctgacagcagcctggacctgtctgagctggccaaggccgccaagaagaagctgcagagcctgagcaaccacctgtttgaggagctggccatggatgtgtatgatgaggtggacagaagagaaacagatgctgtgtggctggccacccagaaccacagcgccctggtgacagagaccaccgtggtgcccttcctgcctgtgaaccctgagtacagcagcaccaggaaccagggccggcagaagctggcccgcttcaatgcccacgagtttgccaccctggtgattgacatcctgagtgatgccaagaggcggcagcagggcagcagcctgagcggcagcaaggacaacgtggagctgatcctgaagaccatcaacaaccagcacagcgtggagagccaggacaatgaccagcctgactatgacagcgtggccagtgatgaggacacagacctggagaccacagccagcaagaccaaccggcagaagagcctggacagcgacctgagtgatggccctgtgacagtgcaggagttcatggaggtgaagaatgccctggtggccagcgaggccaagatccagcagctgatgaaggtgaacaacaacctgagtgatgagctgcgcatcatgcagaagaagctgctgggcaaggatgccaactag

SEQ ID NO: 238366 - DNA, 1416 bp, Artificial Sequence
  derived and/or modified sequence
atgagcaagcggctgcggagcagcgaggtgtgcgccgactgcagcggtcctgaccccagttgggctagcgttaatagggggacattcctctgtgacgaatgttgctccgtgcaccgtagccttggccgccacatttcacaggtccgacatttaaaacacacaccttggcccccgacacttctgcagatggtagagaccctgtacaacaatggcgctaattctatctgggagcatagtttgctggaccccgcttctattatgtcaggtagaagaaaggctaacccgcaagataaagttcatcctaataaagccgagttcatacgggccaagtatcagatgcttgcttttgtccacagattgccttgccgggacgacgatagcgtaacagccaaggacctgagcaagcagctccacagcagtgttaggaccggaaatctagaaacgtgtctgcgtctgttaagtctgggggcccaggccaattttttccatcccgaaaaggggaacacaccactccacgtagcctcaaaggcagggcagatcttacaggctgagcttctagcggtctatggtgccgacccaggaacccaggattcctctgggaaaactcctgtcgattatgcgcgtcaggggggccaccacgaacttgcagaaaggctcgtggagatacagtatgagctaacagacagacttgctttctacctttgcggccggaagccagatcacaagaacggccagcactttatcattccacagatggcagattcttctcttgatctgtccgagctagcgaaagcagctaagaagaaattgcagtctctgtccaaccacctgttcgaggagctggccatggacgtttacgatgaagttgaccgtagggagactgacgcagtctggctggccacccagaatcactcggccttggttacagagacaacagtagttccgtttttgcccgtgaatccagagtactccagcacacggaaccagggcaggcagaaactggctcgcttcaacgcccatgagttcgctaccctggtgatcgacatcctgagcgatgctaagaggcggcagcaaggtagctccctttccggctcgaaggataacgtcgagctgatcttaaagactattaacaatcagcactccgtggaatcccaggacaacgatcaacctgattacgactccgtcgcctctgacgaagatacagacctggagacgactgcttccaagacaaatcgacagaaaagtctggactcagaccttagtgatggccccgttaccgtccaggagttcatggaagttaagaacgctctggtggcctccgaagccaaaatacagcagctcatgaaagttaataataatctgtctgatgaacttagaataatgcagaagaaacttctgggcaaggatgctaactag

SEQ ID NO: 238367 - DNA, 1416 bp, Artificial Sequence
  derived and/or modified sequence
atgagcaagaggctccgctcttccgaggtatgtgcagactgcagcggaccagacccctcctgggcatccgtcaatcgcggaactttcctgtgcgacgagtgctgtagtgtacaccggagcttgggaagacacatcagtcaggtccgccatctgaaacacacaccctggccacccaccctcctacagatggtggagaccttgtacaacaatggcgcaaattcaatatgggagcactctcttcttgaccccgctagcatcatgagcgggcgtcgtaaggctaatccccaggacaaggtgcatccaaataaagcagagttcatccgcgcaaaataccagatgctcgcatttgtgcacagactgccttgcagggatgacgactccgtgacagcaaaagatttatctaaacagttacatagctcggtgaggacaggaaacctcgagacttgcctcaggttgctgagcctgggcgctcaggcaaattttttccatcctgagaaaggaaatacacctctgcatgtggcctcaaaggccggtcagattctgcaggctgagctgctcgcagtttatggtgctgatccaggcacgcaggatagcagtggaaagacacctgtggattatgctcgacaaggaggacatcacgagctggctgagcggcttgttgagattcaatacgagctgactgatcggctagctttctatttatgtgggagaaagcccgatcacaaaaacgggcagcacttcatcatcccccaaatggcggacagtagtctggatttgtccgaacttgccaaggctgccaaaaagaagttgcagtccttatccaatcacctgtttgaagagttagcaatggatgtatatgacgaggtagaccgcagggaaaccgacgctgtttggctggctacacagaaccactccgcactcgtgacagaaactaccgtcgtcccttttctccccgttaatccagagtattctagcacgcggaaccaggggagacagaagctggctcggttcaatgctcacgaattcgcgactctcgttatcgacatcctttccgacgctaaaaggagacagcagggaagtagcctatctggaagcaaggacaacgtggagttaattctaaagacaatcaacaaccaacacagcgttgaatctcaagacaatgaccagcctgactacgattccgtggcgagcgacgaagacaccgatctcgagactaccgcatctaagacaaatcgtcagaagagcttggattctgacttaagcgacggccctgttaccgttcaggagttcatggaggtgaaaaatgcattagtggcgagtgaggcgaaaatccagcaactcatgaaagtgaataataatctatcagacgaactaaggatcatgcagaaaaagctgctgggcaaagacgcgaattag

SEQ ID NO: 238368 - DNA, 2989 bp, Artificial Sequence
  derived and/or modified sequence
ggaagcgccgccgccaccgccgcctttgctgtcccccggcctctagttccccgcaggtgggaggtgggagccatgtcgaaacggctccggagcagcgaggtgtgcgctgactgcagcgggccggatccttcctgggcatcagtaaataggggaacgtttttatgtgatgagtgctgcagtgtccatcggagtctagggcgccatatctcccaagtgaggcatctgaaacacacaccgtggcctccaacactgcttcagatggttgagaccttgtataataacggtgctaactctatatgggagcattctttgctggaccctgcgtctattatgagtggaagacgtaaagctaatccacaggataaagtacatcccaataaagcggaattcatcagagccaagtatcagatgttagcgttcgtccatcgcttgccctgccgggatgacgatagtgtgactgccaaagatcttagcaagcaactccattcgagcgtgagaacagggaatcttgaaacctgtttgagactgttatctttaggagcacaagccaacttctttcatcctgaaaaaggaaacaccccactccatgttgcctccaaagcagggcagattttacaggctgaattattggcagtatatggagcagacccaggcacacaggattctagtgggaaaactcccgttgattatgcaaggcaaggagggcaccatgagctggcagagcgcctcgtggaaatacagtatgagctaacggacagactagccttctatctctgtggcaggaaaccagatcacaaaaatggacagcactttataatacctcaaatggcagacagcagcctggatttgtctgaattggcaaaagctgctaagaagaaacttcaatctctaagtaatcatttgtttgaagaacttgccatggatgtgtacgatgaagttgacaggcgagagacggatgcagtctggcttgccacgcaaaaccacagcgccctggtaaccgagacaacggtcgtcccctttcttccggtcaatcctgagtactcatcaacacgaaatcagggcagacagaagttagctcggttcaacgcccatgagtttgccacgctggtcattgacattctcagtgacgccaagaggagacagcagggcagttctctctcgggttcaaaagacaatgtggagctcatactgaaaaccatcaataaccagcacagcgttgagagtcaagacaacgatcagcccgactatgacagcgtggcatcagacgaagacacagatttggaaaccactgcaagcaaaacaaaccggcagaagagcctagattcagatttatcagatggaccagtcactgtacaggaatttatggaggtcaaaaacgctctagtggcttctgaggccaagatacagcagctaatgaaggtgaataacaacttgagtgacgagctgagaattatgcagaaaaagttgcttggaaaagatgctaattaatgaagaggagcaactactattggtgtatttttcacagattggtgctttctaaataaaaattgaaagtaactcctaacattgaatgggtttgctactgaaaaagtaatgatcttctggtgcaaacagttgcttgtggacttaaaccttggcactggtggggaatttggtcagattttacaatctctgtcaaagagtagacagctgaactcacaccacacccagcttatagaatgtccatggaagatgaaggcgcaccagaagggaaggaccctgcgcagaatggacgtggtgaatggtgtttaaaatgccagatgccaaagagtaacacgattccctgctgaccccttaactctaatccatccagcaccatggagcagcctgcatgtgaggaatggaaggagcattcagggcctccaagtgacagtctctaaaatggggtggtgccaggcagattagcatgttcaaagctgacaccactgaggtcgtgttttttgggtgacaaagccaaaggagagaaaggccaaatattccagccctggccgaaagatgatcactcaccagacggaagcaagcgtgctgcgtggagcatccatgcgaagatgtcaattccatagatcaataggtttccagttttcttcgtgatatgttaatatagcaaacttaccatgatccggttttctcttttttctttttttttttacaaagtgctgaattgtttggaatatcaagagtattatgtaataaaaacttgttgatcataatttttcttgttggctttttggaaagcaataggcgatctgatttttcacaagctgaacttctgtctttcttgctttgcaaagcaaccctagtcatctttgtgctgcttccatggtgtctgctgtcatttttggcctttacaaattgctcagggctcatttgaaaagcaagttacctaaatgatgttttaatgatctcgaactcttgcttgaaacagccttagtaataatccagtgtacagcttgcctgcaaacatttcccagccccaccatgacaaattttaaagtggttagacattttgttttgaggaagtccaaaccacaacttttccacattcagaaatgaagctatttaatttgcttacgtgatgaagggagttgattgtgtttcacccaatccagaagaaagggtccttgtttgtattggctttttactttcagcccggctagctgttactgtccttattgtttaaaactggtagttgtattcatttacttggtgtttgctttttctgcttgctgtaaaaaaacacagtcccactgccaaacatttctttcagcttcaaacactccagagtgaaaattcgaacctcaggaaacaggccacaaccaatgtatatcaggtgcaaactggttctgagtacacagacacttccaaccactcttccttaaagagacgtccgtctgcccggggcagtaggcccatgtccatgtacgagaccggatcaggtcagaaaccatat

SEQ ID NO: 238369 - DNA, 1416 bp, Artificial Sequence
  derived and/or modified sequence
atgagcaagagactgagaagcagcgaggtgtgcgccgactgcagcggccccgaccccagctgggccagcgtgaacagaggcaccttcctgtgcgacgagtgctgcagcgtgcacagaagcctgggcagacacatcagccaggtgagacacctgaagcacaccccctggccccccaccctgctgcagatggtggagaccctgtacaacaacggcgccaacagcatctgggagcacagcctgctggaccccgccagcatcatgagcggcagaagaaaggccaacccccaggacaaggtgcaccccaacaaggccgagttcatcagagccaagtaccagatgctggccttcgtgcacagactgccctgcagagacgacgacagcgtgaccgccaaggacctgagcaagcagctgcacagcagcgtgagaaccggcaacctggagacctgcctgagactgctgagcctgggcgcccaggccaacttcttccaccccgagaagggcaacacccccctgcacgtggccagcaaggccggccagatcctgcaggccgagctgctggccgtgtacggcgccgaccccggcacccaggacagcagcggcaagacccccgtggactacgccagacagggcggccaccacgagctggccgagagactggtggagatccagtacgagctgaccgacagactggccttctacctgtgcggcagaaagcccgaccacaagaacggccagcacttcatcatcccccagatggccgacagcagcctggacctgagcgagctggccaaggccgccaagaagaagctgcagagcctgagcaaccacctgttcgaggagctggccatggacgtgtacgacgaggtggacagaagagagaccgacgccgtgtggctggccacccagaaccacagcgccctggtgaccgagaccaccgtggtgcccttcctgcccgtgaaccccgagtacagcagcaccagaaaccagggcagacagaagctggccagattcaacgcccacgagttcgccaccctggtgatcgacatcctgagcgacgccaagagaagacagcagggcagcagcctgagcggcagcaaggacaacgtggagctgatcctgaagaccatcaacaaccagcacagcgtggagagccaggacaacgaccagcccgactacgacagcgtggccagcgacgaggacaccgacctggagaccaccgccagcaagaccaacagacagaagagcctggacagcgacctgagcgacggccccgtgaccgtgcaggagttcatggaggtgaagaacgccctggtggccagcgaggccaagatccagcagctgatgaaggtgaacaacaacctgagcgacgagctgagaatcatgcagaagaagctgctgggcaaggacgccaactag

SEQ ID NO: 238370 - protein, 377 aa, Artificial Sequence
  derived and/or modified sequence
MTQEPFREELAYDRMPTLERGRQDPASYAPDAKPSDLQLSKRLPPCFSHKTWVFSVLMGSCLLVTSGFSLYLGNVFPAEMDYLRCAAGSCIPSAIVSFTVSRRNANVIPNFQILFVSTFAVTTTCLIWFGCKLVLNPSAININFNLILLLLLELLMAATVIIAARSSEEDCKKKKGSMSDSANILDEVPFPARVLKSYSVVEVIAGISAVLGGIIALNVDDSVSGPHLSVTFFWILVACFPSAIASHVAAECPSKCLVEVLIAISSLTSPLLFTASGYLSFSIMRIVEMFKDYPPAIKPSYDVLLLLLLLVLLLQAGLNTGTAIQCVRFKVSARLQGASWDTQNGPQERLAGEVARSPLKEFDKEKAWRAVVVQMAQ

SEQ ID NO: 238371 - protein, 347 aa, Artificial Sequence
  derived and/or modified sequence
MTQEPFREELAYDRMPTLERGRQDPASYAPDAKPSDLQLSKRLPPCFSHKTWVFSVLMGCIPSAIVSFTVSRRNANVIPNFQILFVSTFAVTTTCLIWFGCKLVLNPSAININFNLILLLLLELLMAATVIIAARSSEEDCKKKKGSMSDSANILDEVPFPARVLKSYSVVEVIAGISAVLGGIIALNVDDSVSGPHLSVTFFWILVACFPSAIASHVAAECPSKCLVEVLIAISSLTSPLLFTASGYLSFSIMRIVEMFKDYPPAIKPSYDVLLLLLLLVLLLQAGLNTGTAIQCVRFKVSARLQGASWDTQNGPQERLAGEVARSPLKEFDKEKAWRAVVVQMAQ

SEQ ID NO: 238372 - protein, 325 aa, Artificial Sequence
  derived and/or modified sequence
MTQEPFREELAYDRMPTLERGRQDPASYAPDAKPSDLQLSKRLPPCFSHKTWVFSVLMGSCLLVTSGFSLYLGNVFPAEMDYLRCAAGSINFNLILLLLLELLMAATVIIAARSSEEDCKKKKGSMSDSANILDEVPFPARVLKSYSVVEVIAGISAVLGGIIALNVDDSVSGPHLSVTFFWILVACFPSAIASHVAAECPSKCLVEVLIAISSLTSPLLFTASGYLSFSIMRIVEMFKDYPPAIKPSYDVLLLLLLLVLLLQAGLNTGTAIQCVRFKVSARLQGASWDTQNGPQERLAGEVARSPLKEFDKEKAWRAVVVQMAQ

SEQ ID NO: 238373 - protein, 298 aa, Artificial Sequence
  derived and/or modified sequence
MDYLRCAAGSCIPSAIVSFTVSRRNANVIPNFQILFVSTFAVTTTCLIWFGCKLVLNPSAININFNLILLLLLELLMAATVIIAARSSEEDCKKKKGSMSDSANILDEVPFPARVLKSYSVVEVIAGISAVLGGIIALNVDDSVSGPHLSVTFFWILVACFPSAIASHVAAECPSKCLVEVLIAISSLTSPLLFTASGYLSFSIMRIVEMFKDYPPAIKPSYDVLLLLLLLVLLLQAGLNTGTAIQCVRFKVSARLQGASWDTQNGPQERLAGEVARSPLKEFDKEKAWRAVVVQMAQ

SEQ ID NO: 238374 - protein, 343 aa, Artificial Sequence
  derived and/or modified sequence
MTQEPFREELAYDRMPTLERGRQDPASYAPDAKPSDLQLSKRLPPCFSHKTWVFSVLMGSCLLVTSGFSLYLGNVFPAEMDYLRCAAGSCIPSAIVSFTVSRRNANVINFNLILLLLLELLMAATVIIAARSSEEDCKKKKGSMSDSANILDEVPFPARVLKSYSVVEVIAGISAVLGGIIALNVDDSVSGPHLSVTFFWILVACFPSAIASHVAAECPSKCLVEVLIAISSLTSPLLFTASGYLSFSIMRIVEMFKDYPPAIKPSYDVLLLLLLLVLLLQAGLNTGTAIQCVRFKVSARLQGASWDTQNGPQERLAGEVARSPLKEFDKEKAWRAVVVQMAQ

SEQ ID NO: 238375 - DNA, 1134 bp, Artificial Sequence
  derived and/or modified sequence
atgactcaggaaccttttagggaagaattggcatacgatcggatgccgaccttggagcgtggtcggcaagaccccgcctcttacgctcccgatgctaaaccaagcgacctgcagctatcaaaacggctccccccttgcttttcgcacaaaacatgggtgttcagcgttcttatgggctcttgccttctcgttacgtccgggttctctctctatcttggaaatgttttcccagcggagatggattacctcaggtgcgccgccgggtcctgcatcccctccgccattgtgtcctttacagtttctcggaggaatgctaatgtgatcccaaacttccagattctctttgtgtctacattcgcagtaaccacgacatgtcttatttggttcggatgtaagttggtgctgaatccctcagctattaacatcaacttcaacctgattctgctgctgctgctcgaacttctcatggcagccactgtgatcatagccgcaagaagctctgaggaggattgcaagaagaaaaagggctcgatgtcagattcggccaatattttagatgaggtgccctttcccgctagggttctcaaatcttatagcgtcgtcgaggtgatcgctggcataagtgccgtgcttggtggcattatcgccctgaatgtggacgattcagtttctggtcctcatctgtccgttacctttttctggattctggtcgcatgttttccctccgcaattgccagccatgtggcagccgaatgcccaagcaagtgccttgttgaggtgctcattgccatttcatcactcaccagccctctgcttttcaccgccagcggctacctctcattttctatcatgcggattgtggagatgttcaaagactatccgccagcaataaaaccgtcttatgacgtgctgctccttctgctcttgttagttttacttttgcaagccggtctgaacactgggactgcaatacagtgcgtgcgttttaaggtgtctgctaggctccagggggccagctgggacacccagaacggccctcaggagcgcctggccggcgaggtcgctcgatccccactgaaagagtttgacaaagagaaagcgtggagggcggtggtggtgcagatggctcaatag

SEQ ID NO: 238376 - DNA, 1134 bp, Artificial Sequence
  derived and/or modified sequence
atgacccaggagccttttcgggaagaactggcctacgatcgaatgcctaccctcgaacgcggtaggcaggatcctgcttcgtacgcaccagatgccaagcccagtgatttgcaactaagcaagaggttgcccccttgcttttcgcataaaacctgggtattcagcgtgctcatgggatcttgccttctcgtcacaagcggtttctccctctacctggggaacgtctttcccgccgagatggattatcttagatgcgcggccggaagctgcatacctagtgctatcgtctcgttcaccgtaagtagaagaaacgccaatgtgattccaaactttcagatactgttcgtgtccacgttcgcagtgacaactacttgtcttatatggttcggctgtaagttggtcttaaacccgagcgccatcaacattaatttcaacctgatactgctcctcctgctggaattgttaatggctgctactgtgatcatagctgcgcgttccagtgaggaagactgtaaaaagaagaagggatcgatgtccgattcagcaaacatcctcgatgaggttcccttcccagcgcgagtcctcaaatcatactccgtcgtggaggtgatcgcaggcatcagcgcagtgctagggggcataatagccctgaacgtcgatgactcagtctccggaccccacctctctgtgaccttcttctggatcctggtcgcctgcttcccttctgcaattgcttctcatgtcgccgccgagtgccctagtaagtgtcttgtggaggtgctcattgctataagcagcctgaccagcccacttctattcaccgctagcggctatctctctttctctatcatgcggatagtggaaatgtttaaggactatccccctgcgatcaaaccaagctacgacgtactgcttctgctccttttgctggtgcttctccttcaagcgggcctcaacacaggaaccgcaatacagtgtgtgcggttcaaggtcagcgcccgtcttcagggagccagttgggacacacagaacggcccccaggaacgcctagccggtgaggtggccaggtcacccctgaaagagtttgacaaggagaaagcttggcgcgccgtggtcgtacagatggcccagtag

SEQ ID NO: 238377 - DNA, 1044 bp, Artificial Sequence
  derived and/or modified sequence
atgacccaagagccattccgcgaggagcttgcctatgacagaatgccaacgctggaaagaggtcggcaagatcccgcttcatacgcaccagacgccaagcccagcgatctgcagttgtcgaaaaggctacccccatgcttctcccacaagacgtgggtgttctcagttcttatgggctgcattcctagtgccatagtgagcttcacagtctcacgtagaaacgcaaacgtgattcccaactttcagattctcttcgtatccacattcgcagtcaccaccacttgtcttatttggtttggttgcaaactcgtccttaatccatcagcaatcaatataaactttaacttaatcctgctgttactcttagagctcctcatggctgctactgtcatcatcgcagcaaggagcagtgaggaggactgtaaaaagaagaagggaagtatgtccgactctgcaaacattctcgacgaggtgccattccccgcgcgggtcctaaagtcttactccgtagtcgaggttatagccggaatctccgctgtgctcggcggaataatagctctgaatgtggacgattccgtgagcgggccccacctgtcggtcaccttcttttggatactggtggcatgttttccaagcgctatcgcatcgcatgtggccgcagaatgcccaagcaagtgtctggtggaggtgctgatagccatttcttccctcacctcgcctctgctgtttaccgcttctgggtatctgagctttagtattatgcgcatcgtggaaatgtttaaggactacccacctgctatcaagccctcatacgatgtactgctgttgttgctactcttggttctgctgctgcaggctggcctgaacaccggcactgcaatccagtgcgtgcggttcaaagtatcggcgagattgcagggtgccagctgggacacccaaaatggcccacaggaacgcttagccggagaagtcgcacgttctccattaaaggagttcgataaggaaaaagcctggcgcgccgtcgtggtgcagatggcccaatag

SEQ ID NO: 238378 - DNA, 978 bp, Artificial Sequence
  derived and/or modified sequence
atgacccaggaaccgtttagagaggaactcgcttacgatcggatgcctacccttgaacgtggccgccaggatcctgcctcatacgcccccgacgctaagcccagcgacctccaactgagcaaaaggctgccaccctgcttttctcacaagacgtgggtgttctcagtgctaatggggtcttgtctgttagttacaagcggtttctcgctgtacctggggaacgtgttcccagctgaaatggactatttaaggtgcgccgccgggtcaatcaatttcaatctaatcttactgctgctgctggaactgctgatggcggccactgtgatcattgcggcaaggagcagcgaggaggattgtaaaaagaaaaagggttctatgtccgactccgctaacatactcgacgaggtaccatttcccgccagggtgctgaagtcttattcagtagtcgaggtgattgctggaatctcagcagtactcggagggattatagctctgaatgtagatgatagtgtaagtggccctcacctgtcggttacattcttttggattctggttgcttgcttcccgtccgccatagcctctcatgtagctgccgaatgtccaagtaagtgcctggtggaggtgttgattgctatttctagtttgaccagtccactgctttttacggcatccgggtacctgagtttctccattatgcggattgtcgaaatgttcaaggactaccctcccgccatcaaaccctcttatgacgtccttttgctgctcctccttctcgtattgcttttgcaggccggcttaaacaccgggacggcaatccaatgtgttcgcttcaaagtcagtgcccgcctccaaggggcctcttgggacactcagaacgggcctcaggagcgtctcgccggcgaggtcgcaaggagtccgctgaaggagtttgataaggagaaggcctggcgcgccgtggtcgtccagatggcccagtag

SEQ ID NO: 238379 - DNA, 897 bp, Artificial Sequence
  derived and/or modified sequence
atggactacttgaggtgcgccgccgggagttgcattccttccgctatcgtgtcatttacagtgagccggcggaacgctaacgtgataccaaacttccagattctttttgtttccactttcgcagtcacaaccacatgcctgatatggtttggctgcaaactcgtgcttaacccttccgcaatcaatattaatttcaacttaatccttcttttactgctcgagctgttaatggctgccaccgtaataatcgccgccaggtcatctgaggaggattgtaaaaagaaaaaggggtcaatgtccgacagcgccaatattctcgacgaggtgcctttccctgcaagagttctcaagagctatagcgttgtcgaagtgatagccgggatctccgctgtccttggaggaataatagcccttaacgtggacgactcagtgtccggacctcacctgagcgtgacattcttctggattcttgtcgcttgcttccccagcgctattgcttcacacgtggccgctgagtgccccagtaagtgcctcgtggaagtgttgatcgcaattagcagtttaaccagcccacttctcttcaccgcctcagggtacctgtctttcagtattatgaggatcgtagagatgttcaaggattatccgccagcgattaagccatcctacgatgtgctgttactgctgctgcttctggtgttgctgttgcaagcaggtctgaacacaggcacagccatccagtgtgtccgcttcaaggtgagtgcccgacttcagggagctagctgggacacacagaacgggccccaagagcgattagcaggcgaagtggcccgcagtcctctgaaggaattcgacaaagagaaagcatggagagccgtagtggtccagatggcccagtag

SEQ ID NO: 238380 - DNA, 1032 bp, Artificial Sequence
  derived and/or modified sequence
atgacgcaggaaccttttcgggaagagcttgcttacgatcgaatgcctaccttagaaagaggcaggcaggacccagcctcttacgccccagacgccaaacctagcgatttgcaattgagtaagagactaccaccctgcttcagtcacaagacttgggtattcagtgttctaatgggcagttgtctcctagtaacgtctggttttagcctatacttgggaaacgtcttcccggcagaaatggactatctgcgctgtgccgcggggtcctgcatcccaagtgctatcgttagctttaccgtctccaggcggaacgctaacgtgataaacttcaacttgatcctcttgctccttctggaactcttaatggcagcaacagtgattatcgccgcgcggtcatccgaggaggactgcaaaaaaaagaagggtagtatgtccgacagcgccaacattttggacgaagtgccttttccagcacgcgtgttaaaaagttactccgtggtggaggtgattgctggcattagcgcggtgttaggtggcattattgcactgaacgtagacgattcggtctcgggcccccaccttagtgttacattcttttggatcctggtcgcctgcttcccgtcagctatagcgtcccatgtcgccgctgagtgcccatccaagtgtctcgtagaggtactgatcgccatttctagcttgacatccccgctgctcttcacagcctcaggctatctgtctttcagtattatgcggattgtcgagatgttcaaagactatccacctgctatcaagccatcctacgatgtcctcctcctccttctcctcttggtgcttctgctgcaggcagggctgaacaccggaacggccatccaatgtgtgcgatttaaggtgtccgcaagactgcagggcgcatcatgggatacccaaaatggaccgcaggagagactggccggggaagtcgcaagatcccctcttaaggagttcgataaggagaaagcctggcgtgccgtcgttgtgcaaatggcgcaatag

SEQ ID NO: 238381 - DNA, 1134 bp, Artificial Sequence
  derived and/or modified sequence
atgacccaggagcccttccgggaggagctggcctatgacaggatgcccaccctggagcggggccggcaggaccctgccagctatgccccagatgccaagcccagcgacctgcagctgagcaagaggctgcccccctgcttcagccacaagacctgggtgttttctgtgctgatgggcagctgcctgctggtgaccagcggcttcagcctgtacctgggcaatgtgtttcctgctgagatggactacctgcgctgtgccgccggcagctgcatccccagcgccatcgtgtccttcaccgtgtccagaagaaatgccaacgtcatccccaacttccagatcctgtttgtgtccacctttgctgtgaccaccacctgcctgatctggtttggctgcaagctggtgctgaaccccagcgccatcaacatcaacttcaacctgatcctgctgctgctgctggagctgctgatggccgccaccgtcatcatcgccgcccggagcagcgaggaggactgcaagaagaagaagggctccatgtctgattctgccaacatcctggatgaggtgcccttccctgcccgggtgctgaagagctacagcgtggtggaggtgattgctggcatctctgctgtgctgggcggcatcatcgccctgaatgtggatgacagcgtgtctggcccccacctgtctgtgaccttcttctggatcctggtggcctgcttccccagcgccatcgccagccacgtggccgcagaatgtcccagcaagtgcctggtggaggtgctgattgccatcagcagcctgaccagccccctgctcttcaccgccagcggctacctgtccttcagcatcatgagaattgtggagatgttcaaggactaccccccagccatcaagcccagctatgatgtgctgctgctgctgctgctgctggtgctgctgctgcaggccggcctgaacacaggaacagccatccagtgtgtgcgcttcaaggtgtctgcccggctgcagggcgcctcctgggacacccagaatggcccccaggagcggctggccggggaggtggcccggagccccctgaaggagtttgacaaggagaaggcctggagggctgtggtggtgcagatggcccagtag

SEQ ID NO: 238382 - DNA, 1044 bp, Artificial Sequence
  derived and/or modified sequence
atgacccaggagcccttccgggaggagctggcctatgacaggatgcccaccctggagcggggccggcaggaccctgccagctatgccccagatgccaagcccagcgacctgcagctgagcaagaggctgcccccctgcttcagccacaagacctgggtgttttctgtgctgatgggctgcatccccagcgccatcgtgtccttcaccgtgtccagaagaaatgccaacgtcatccccaacttccagatcctgtttgtgtccacctttgctgtgaccaccacctgcctgatctggtttggctgcaagctggtgctgaaccccagcgccatcaacatcaacttcaacctgatcctgctgctgctgctggagctgctgatggccgccaccgtcatcatcgccgcccggagcagcgaggaggactgcaagaagaagaagggctccatgtctgattctgccaacatcctggatgaggtgcccttccctgcccgggtgctgaagagctacagcgtggtggaggtgattgctggcatctctgctgtgctgggcggcatcatcgccctgaatgtggatgacagcgtgtctggcccccacctgtctgtgaccttcttctggatcctggtggcctgcttccccagcgccatcgccagccacgtggccgcagaatgtcccagcaagtgcctggtggaggtgctgattgccatcagcagcctgaccagccccctgctcttcaccgccagcggctacctgtccttcagcatcatgagaattgtggagatgttcaaggactaccccccagccatcaagcccagctatgatgtgctgctgctgctgctgctgctggtgctgctgctgcaggccggcctgaacacaggaacagccatccagtgtgtgcgcttcaaggtgtctgcccggctgcagggcgcctcctgggacacccagaatggcccccaggagcggctggccggggaggtggcccggagccccctgaaggagtttgacaaggagaaggcctggagggctgtggtggtgcagatggcccagtag

SEQ ID NO: 238383 - DNA, 978 bp, Artificial Sequence
  derived and/or modified sequence
atgacccaggagcccttccgggaggagctggcctatgacaggatgcccaccctggagcggggccggcaggaccctgccagctatgccccagatgccaagcccagcgacctgcagctgagcaagaggctgcccccctgcttcagccacaagacctgggtgttttctgtgctgatgggcagctgcctgctggtgaccagcggcttcagcctgtacctgggcaatgtgtttcctgctgagatggactacctgcgctgtgccgccggcagcatcaacttcaacctgatcctgctgctgctgctggagctgctgatggccgccaccgtcatcatcgccgcccggagcagcgaggaggactgcaagaagaagaagggctccatgtctgattctgccaacatcctggatgaggtgcccttccctgcccgggtgctgaagagctacagcgtggtggaggtgattgctggcatctctgctgtgctgggcggcatcatcgccctgaatgtggatgacagcgtgtctggcccccacctgtctgtgaccttcttctggatcctggtggcctgcttccccagcgccatcgccagccacgtggccgcagaatgtcccagcaagtgcctggtggaggtgctgattgccatcagcagcctgaccagccccctgctcttcaccgccagcggctacctgtccttcagcatcatgagaattgtggagatgttcaaggactaccccccagccatcaagcccagctatgatgtgctgctgctgctgctgctgctggtgctgctgctgcaggccggcctgaacacaggaacagccatccagtgtgtgcgcttcaaggtgtctgcccggctgcagggcgcctcctgggacacccagaatggcccccaggagcggctggccggggaggtggcccggagccccctgaaggagtttgacaaggagaaggcctggagggctgtggtggtgcagatggcccagtag

SEQ ID NO: 238384 - DNA, 897 bp, Artificial Sequence
  derived and/or modified sequence
atggactacctgcgctgtgccgccggcagctgcatccccagcgccatcgtgtccttcaccgtgtccagaagaaatgccaacgtcatccccaacttccagatcctgtttgtgtccacctttgctgtgaccaccacctgcctgatctggtttggctgcaagctggtgctgaaccccagcgccatcaacatcaacttcaacctgatcctgctgctgctgctggagctgctgatggccgccaccgtcatcatcgccgcccggagcagcgaggaggactgcaagaagaagaagggctccatgtctgacagcgccaacatcctggatgaggtgcccttccctgcccgggtgctgaagagctacagcgtggtggaggtgattgctggcatctctgctgtgctgggcggcatcatcgccctgaatgtggatgattctgtgtctggcccccacctgtctgtgaccttcttctggatcctggtggcctgcttccccagcgccatcgccagccacgtggccgctgagtgccccagcaagtgcctggtggaggtgctgattgccatcagcagcctgaccagccccctgctcttcaccgccagcggctacctgtccttcagcatcatgagaattgtggagatgttcaaggactaccccccagccatcaagcccagctatgatgtgctgctgctgctgctgctgctggtgctgctgctgcaggccggcctgaacacaggaacagccatccagtgtgtgcgcttcaaggtgtctgcccggctgcagggcgcctcctgggacacccagaatggcccccaggagcggctggccggggaggtggcccggagccccctgaaggagtttgacaaggagaaggcctggagggctgtggtggtgcagatggcccagtag

SEQ ID NO: 238385 - DNA, 1032 bp, Artificial Sequence
  derived and/or modified sequence
atgacccaggagcccttccgggaggagctggcctatgacaggatgcccaccctggagcggggccggcaggaccctgccagctatgccccagatgccaagcccagcgacctgcagctgagcaagaggctgcccccctgcttcagccacaagacctgggtgttttctgtgctgatgggcagctgcctgctggtgaccagcggcttcagcctgtacctgggcaatgtgtttcctgctgagatggactacctgcgctgtgccgccggcagctgcatccccagcgccatcgtgtccttcaccgtgtccagaagaaatgccaacgtcatcaacttcaacctgatcctgctgctgctgctggagctgctgatggccgccaccgtcatcatcgccgcccggagcagcgaggaggactgcaagaagaagaagggctccatgtctgattctgccaacatcctggatgaggtgcccttccctgcccgggtgctgaagagctacagcgtggtggaggtgattgctggcatctctgctgtgctgggcggcatcatcgccctgaatgtggatgacagcgtgtctggcccccacctgtctgtgaccttcttctggatcctggtggcctgcttccccagcgccatcgccagccacgtggccgcagaatgtcccagcaagtgcctggtggaggtgctgattgccatcagcagcctgaccagccccctgctcttcaccgccagcggctacctgtccttcagcatcatgagaattgtggagatgttcaaggactaccccccagccatcaagcccagctatgatgtgctgctgctgctgctgctgctggtgctgctgctgcaggccggcctgaacacaggaacagccatccagtgtgtgcgcttcaaggtgtctgcccggctgcagggcgcctcctgggacacccagaatggcccccaggagcggctggccggggaggtggcccggagccccctgaaggagtttgacaaggagaaggcctggagggctgtggtggtgcagatggcccagtag

SEQ ID NO: 238386 - DNA, 3933 bp, Artificial Sequence
  derived and/or modified sequence
aaagggggcagcaggaccgggcccaccagccatccgggctgcccacgcaaaccacagggccgaatccggagccgcccaaggccacacagctaagccgagtgcgtgaatgcttatgtgaccgtgtgaaggaggttcccaccgtgtggctgtgggggatggaaaaaggctacttggaaagatgtagaagaccttcgagtaaacagttacgtttcagaaacagagcctgctcagaatgtgtacttggtgggattctattcttagggacgcttctttcttctgagagacccgagctctgtggcgagtggcacaggcagggccccttcctttcctagttgggttctgacagctccgaggcagtggtttacacaaccaacacgaaacatttctacgatccacccgattcctcccctcattgatattcaggaagcagctctccttcccctgccttcagctcaagtttgctgagcttttgtttcatttgtgaatacttcttgctggaagtccctcacccagagaccagtgctcccaacggcagagcagcgggggagataaagaactggtgacacgtggctgtacattcagcacagctgtggtgtccccaagtgccatgacccaggagccattcagagaggagctggcctatgaccggatgcccacgctggagcggggccggcaagaccccgccagctatgccccagacgcgaagccgagcgacctgcagctgtcgaagagactgcccccctgcttcagccacaagacgtgggtcttctctgtgctgatggggagctgcctcctggtgacctcggggttttcgctgtacctggggaacgtgttcccggctgagatggattacttgcgctgtgctgcaggctcttgcatcccctcggcaattgtgagcttcaccgtctccaggaggaacgccaatgtgattcccaactttcagatattgtttgtttccacgtttgctgtgaccactacgtgtttaatttggtttggatgcaaactagtcctgaacccatcagcaataaacatcaacttcaacctcatcctgctgctcctgctggagctgctcatggcggccacggtgatcatcgctgcacggtccagcgaggaggactgcaagaaaaagaagggctccatgtctgacagcgccaacattctggacgaagtgccatttcctgctcgggtcctgaaatcttactcagtcgtcgaggtaatcgcaggcatctctgccgtcctcggggggatcattgccctgaacgtggatgactcagtttcaggcccacacctctcagtgacgttcttttggatcctagtggcctgctttccaagtgccattgccagtcatgtggcagcagagtgtcccagcaagtgtctggtggaggtcctgattgccataagcagcctcacgtctccgctgctgttcacagcctctggatatctgtcattcagcatcatgagaatcgtggagatgtttaaggattacccgccagccataaaaccatcctacgatgtgctgctgctgctgctgctgctagtgctcctgctgcaggccggcctcaacacgggcaccgccatccagtgcgtgcgcttcaaggtcagtgcaaggctgcagggtgcatcctgggacacccagaacggcccgcaggagcgcctggctggggaggtggccaggagccccctgaaggagttcgacaaggagaaagcctggagagccgtcgtggtgcaaatggcccagtgacccccagacgcggaaaccgggtggcagcgcccagcctggccccaagcatggaaacgcacaacccctaatcgccctgagctactgcttctaacacctcttttcccttgtgtgagggcaaaccaggctgcaggtggggttttcacttcctagggtagtttaattttaaaataggccaatgttggctagtctgtgcctcagtgagatcagtcagctccgagtggctcccgtgtcgtaacagcaggagcatggccgcaacttcccaggccgaggaagggcccccggctcggcctcttgagagccccacccctgaactggccccagctcctcttcctgcctctctcatggcttgggctggagtgggctctctggacctgaccagactgtgggtccctgcgtctcctgcccactctgaccgggcttcctccctccacgcttagggtctgtcccgggtactcagtcagcccagtgggatcttacccacttccctgcaaggtgcacctgccccaggctcaggctgcccagcggctcttcctggacagtgagagcagggctgggcgcctctgtcctggcccgggagccgcaggggcccctcctccagagcctgggcgcaagcgacacaggctgccgctgctctcccaggtgaaatccacaccagtccacgccgggtcgcctgccctgtctccctacttagacccagtcattctagagggatccaccgccacactggccggcccacgtcctgggtgctgtcatgcccagcttggagtgccacgtggccgctgcccacgtcccgggcactgtcatgcccagcttggagtgccacatggccgctgcccacgtcccgggcactgtcatgcccagcttggagtgccacgtggccgctgctgtgacaggcagtgttcttgggggtggggctgcatccaaggctttgtaaaccggctggaccacgtctccctggccccagtgaccgggggaagctgagcccctccctcctgtgtttgctcccattactcaaaatgcaggacagatcaggtcagagcccaggaattctcacaggttcacccagcgccctctacctcctagcaagtactttgtcttgatcctcactgagaaggccccagggcagcggtcttctccatctccgctgttttggggtcttagggtacagcccaggcggtcactgcccacctgccaggctgcagggacagttgggtgtgagaataacactggctttgggtagtgccatggccaggagtgggtttccctgcgtctcctcgtcccgagggcgcctgggtcctcccagctgacggcagtaaatccacagtgagttggggcgactgtgaaactggaatgctgttactttgataattactttccagcaggtgttttccttcacaatggttttgtttctttccttctgatctgagaagacatgaacgttttctcttcaccgccgtggggtgtattgactggtcccccatgggctgctggaaaggcccggagatgcatctgtggcctggggccatcaagatcaaagaaccaggaggcctgggagatgcagctggatggggcggcctgcagaccctgccagggggtttgaggaccctcccaggtttcccactgcggaacaggagtgactctggctgccaagataccttcatggtgttcatgacaagtggaatcattattttcaaccattgaagggggatgcaggcaagacaccttcccagctgctcctagaggggacaagccaggccctctctgcagtcctcggcagctccggaaggacacagtcaggggccgggcaaacactttggccacagccccaaacaagcgccaccgtgggagaggagaggctgctgtcactggtaccggatgcagaccccaccctgtctgcaggccacccccacctccctgcagctttgaggctggcggggtctgctcctgggaatggggtgggagccacagggacgacccggggcgggctgatgtcttcttgggggcagaccagagagctcaagtttcagagtcagaattaggcacttggagcgtttttgctggcttgcactttcttattttcttattttagagcgcttaaaaaatccggaaaaatggggtttaaaagaactgtctctttcagtctacatttttgtttaatacgcttgagcaataaacgctgacttgcagacgtg

SEQ ID NO: 238387 - DNA, 3601 bp, Artificial Sequence
  derived and/or modified sequence
gtaagtgctcagacattaagccgttgagtagaggcatgttttgcaatctctcgtttagctaccaattggagcagtttaacgtgcttgagtccccggcgtgatgtgttcatggacgaagttgccgatggatgttgtcaggtgttgcacctggagggcccagatggatcaatgaggcatttaaagtgtagaatctcaccctgaacccagactattcagataaagaactggtgacacgtggctgtacattcagcacagctgtggtgtccccaagtgccatgacccaggagccattcagagaggagctggcctatgaccggatgcccacgctggagcggggccggcaagaccccgccagctatgccccagacgcgaagccgagcgacctgcagctgtcgaagagactgcccccctgcttcagccacaagacgtgggtcttctctgtgctgatggggagctgcctcctggtgacctcggggttttcgctgtacctggggaacgtgttcccggctgagatggattacttgcgctgtgctgcaggctcttgcatcccctcggcaattgtgagcttcaccgtctccaggaggaacgccaatgtgattcccaactttcagatattgtttgtttccacgtttgctgtgaccactacgtgtttaatttggtttggatgcaaactagtcctgaacccatcagcaataaacatcaacttcaacctcatcctgctgctcctgctggagctgctcatggcggccacggtgatcatcgctgcacggtccagcgaggaggactgcaagaaaaagaagggctccatgtctgacagcgccaacattctggacgaagtgccatttcctgctcgggtcctgaaatcttactcagtcgtcgaggtaatcgcaggcatctctgccgtcctcggggggatcattgccctgaacgtggatgactcagtttcaggcccacacctctcagtgacgttcttttggatcctagtggcctgctttccaagtgccattgccagtcatgtggcagcagagtgtcccagcaagtgtctggtggaggtcctgattgccataagcagcctcacgtctccgctgctgttcacagcctctggatatctgtcattcagcatcatgagaatcgtggagatgtttaaggattacccgccagccataaaaccatcctacgatgtgctgctgctgctgctgctgctagtgctcctgctgcaggccggcctcaacacgggcaccgccatccagtgcgtgcgcttcaaggtcagtgcaaggctgcagggtgcatcctgggacacccagaacggcccgcaggagcgcctggctggggaggtggccaggagccccctgaaggagttcgacaaggagaaagcctggagagccgtcgtggtgcaaatggcccagtgacccccagacgcggaaaccgggtggcagcgcccagcctggccccaagcatggaaacgcacaacccctaatcgccctgagctactgcttctaacacctcttttcccttgtgtgagggcaaaccaggctgcaggtggggttttcacttcctagggtagtttaattttaaaataggccaatgttggctagtctgtgcctcagtgagatcagtcagctccgagtggctcccgtgtcgtaacagcaggagcatggccgcaacttcccaggccgaggaagggcccccggctcggcctcttgagagccccacccctgaactggccccagctcctcttcctgcctctctcatggcttgggctggagtgggctctctggacctgaccagactgtgggtccctgcgtctcctgcccactctgaccgggcttcctccctccacgcttagggtctgtcccgggtactcagtcagcccagtgggatcttacccacttccctgcaaggtgcacctgccccaggctcaggctgcccagcggctcttcctggacagtgagagcagggctgggcgcctctgtcctggcccgggagccgcaggggcccctcctccagagcctgggcgcaagcgacacaggctgccgctgctctcccaggtgaaatccacaccagtccacgccgggtcgcctgccctgtctccctacttagacccagtcattctagagggatccaccgccacactggccggcccacgtcctgggtgctgtcatgcccagcttggagtgccacgtggccgctgcccacgtcccgggcactgtcatgcccagcttggagtgccacatggccgctgcccacgtcccgggcactgtcatgcccagcttggagtgccacgtggccgctgctgtgacaggcagtgttcttgggggtggggctgcatccaaggctttgtaaaccggctggaccacgtctccctggccccagtgaccgggggaagctgagcccctccctcctgtgtttgctcccattactcaaaatgcaggacagatcaggtcagagcccaggaattctcacaggttcacccagcgccctctacctcctagcaagtactttgtcttgatcctcactgagaaggccccagggcagcggtcttctccatctccgctgttttggggtcttagggtacagcccaggcggtcactgcccacctgccaggctgcagggacagttgggtgtgagaataacactggctttgggtagtgccatggccaggagtgggtttccctgcgtctcctcgtcccgagggcgcctgggtcctcccagctgacggcagtaaatccacagtgagttggggcgactgtgaaactggaatgctgttactttgataattactttccagcaggtgttttccttcacaatggttttgtttctttccttctgatctgagaagacatgaacgttttctcttcaccgccgtggggtgtattgactggtcccccatgggctgctggaaaggcccggagatgcatctgtggcctggggccatcaagatcaaagaaccaggaggcctgggagatgcagctggatggggcggcctgcagaccctgccagggggtttgaggaccctcccaggtttcccactgcggaacaggagtgactctggctgccaagataccttcatggtgttcatgacaagtggaatcattattttcaaccattgaagggggatgcaggcaagacaccttcccagctgctcctagaggggacaagccaggccctctctgcagtcctcggcagctccggaaggacacagtcaggggccgggcaaacactttggccacagccccaaacaagcgccaccgtgggagaggagaggctgctgtcactggtaccggatgcagaccccaccctgtctgcaggccacccccacctccctgcagctttgaggctggcggggtctgctcctgggaatggggtgggagccacagggacgacccggggcgggctgatgtcttcttgggggcagaccagagagctcaagtttcagagtcagaattaggcacttggagcgtttttgctggcttgcactttcttattttcttattttagagcgcttaaaaaatccggaaaaatggggtttaaaagaactgtctctttcagtctacatttttgtttaatacgcttgagcaataaacgctgacttgcagacgtg

SEQ ID NO: 238388 - DNA, 1594 bp, Artificial Sequence
  derived and/or modified sequence
tttgtgaatacttcttgctggaagtccctcacccagagaccagtgctcccaacggcagagcagcgggggagataaagaactggtgacacgtggctgtacattcagcacagctgtggtgtccccaagtgccatgacccaggagccattcagagaggagctggcctatgaccggatgcccacgctggagcggggccggcaagaccccgccagctatgccccagacgcgaagccgagcgacctgcagctgtcgaagagactgcccccctgcttcagccacaagacgtgggtcttctctgtgctgatggggtgcatcccctcggcaattgtgagcttcaccgtctccaggaggaacgccaatgtgattcccaactttcagatattgtttgtttccacgtttgctgtgaccactacgtgtttaatttggtttggatgcaaactagtcctgaacccatcagcaataaacatcaacttcaacctcatcctgctgctcctgctggagctgctcatggcggccacggtgatcatcgctgcacggtccagcgaggaggactgcaagaaaaagaagggctccatgtctgacagcgccaacattctggacgaagtgccatttcctgctcgggtcctgaaatcttactcagtcgtcgaggtaatcgcaggcatctctgccgtcctcggggggatcattgccctgaacgtggatgactcagtttcaggcccacacctctcagtgacgttcttttggatcctagtggcctgctttccaagtgccattgccagtcatgtggcagcagagtgtcccagcaagtgtctggtggaggtcctgattgccataagcagcctcacgtctccgctgctgttcacagcctctggatatctgtcattcagcatcatgagaatcgtggagatgtttaaggattacccgccagccataaaaccatcctacgatgtgctgctgctgctgctgctgctagtgctcctgctgcaggccggcctcaacacgggcaccgccatccagtgcgtgcgcttcaaggtcagtgcaaggctgcagggtgcatcctgggacacccagaacggcccgcaggagcgcctggctggggaggtggccaggagccccctgaaggagttcgacaaggagaaagcctggagagccgtcgtggtgcaaatggcccagtgacccccagacgcggaaaccgggtggcagcgcccagcctggccccaagcatggaaacgcacaacccctaatcgccctgagctactgcttctaacacctcttttcccttgtgtgagggcaaaccaggctgcaggtggggttttcacttcctagggtagtttaattttaaaataggccaatgttggctagtctgtgcctcagtgagatcagtcagctccgagtggctcccgtgtcgtaacagcaggagcatggccgcaacttcccaggccgaggaagggcccccggctcggcctcttgagagccccacccctgaactggccccagctcctcttcctgcctctctcatggcttgggctggagtgggctctctggacctgaccagactgtgggtccctgcgtctcctgcccactctgaccgggctt

SEQ ID NO: 238389 - DNA, 1287 bp, Artificial Sequence
  derived and/or modified sequence
gcgtgatgtgttcatggacgaagttgccgatggatgttgtcaggtgttgcacctggagggcccagatggatcaatgaggcatttaaagtgtagaatctcaccctgaacccagactattcagataaagaactggtgacacgtggctgtacattcagcacagctgtggtgtccccaagtgccatgacccaggagccattcagagaggagctggcctatgaccggatgcccacgctggagcggggccggcaagaccccgccagctatgccccagacgcgaagccgagcgacctgcagctgtcgaagagactgcccccctgcttcagccacaagacgtgggtcttctctgtgctgatggggagctgcctcctggtgacctcggggttttcgctgtacctggggaacgtgttcccggctgagatggattacttgcgctgtgctgcaggctctatcaacttcaacctcatcctgctgctcctgctggagctgctcatggcggccacggtgatcatcgctgcacggtccagcgaggaggactgcaagaaaaagaagggctccatgtctgacagcgccaacattctggacgaagtgccatttcctgctcgggtcctgaaatcttactcagtcgtcgaggtaatcgcaggcatctctgccgtcctcggggggatcattgccctgaacgtggatgactcagtttcaggcccacacctctcagtgacgttcttttggatcctagtggcctgctttccaagtgccattgccagtcatgtggcagcagagtgtcccagcaagtgtctggtggaggtcctgattgccataagcagcctcacgtctccgctgctgttcacagcctctggatatctgtcattcagcatcatgagaatcgtggagatgtttaaggattacccgccagccataaaaccatcctacgatgtgctgctgctgctgctgctgctagtgctcctgctgcaggccggcctcaacacgggcaccgccatccagtgcgtgcgcttcaaggtcagtgcaaggctgcagggtgcatcctgggacacccagaacggcccgcaggagcgcctggctggggaggtggccaggagccccctgaaggagttcgacaaggagaaagcctggagagccgtcgtggtgcaaatggcccagtgacccccagacgcggaaaccgggtggcagcgcccagcctggccccaagcatggaaacgcacaacccctaatcgccctgagctactgcttctaacacctcttttcccttgtgtgagggcaaaccaggctgca

SEQ ID NO: 238390 - DNA, 1336 bp, Artificial Sequence
  derived and/or modified sequence
gaatacttcttgctggaagtccctcacccagagaccagtgctcccaacggcagagcagcgggggagctgcctcctggtgacctcggggttttcgctgtacctggggaacgtgttcccggctgagatggattacttgcgctgtgctgcaggctcttgcatcccctcggcaattgtgagcttcaccgtctccaggaggaacgccaatgtgattcccaactttcagatattgtttgtttccacgtttgctgtgaccactacgtgtttaatttggtttggatgcaaactagtcctgaacccatcagcaataaacatcaacttcaacctcatcctgctgctcctgctggagctgctcatggcggccacggtgatcatcgctgcacggtccagcgaggaggactgcaagaaaaagaagggctccatgtctgacagcgccaacattctggacgaagtgccatttcctgctcgggtcctgaaatcttactcagtcgtcgaggtaatcgcaggcatctctgccgtcctcggggggatcattgccctgaacgtggatgactcagtttcaggcccacacctctcagtgacgttcttttggatcctagtggcctgctttccaagtgccattgccagtcatgtggcagcagagtgtcccagcaagtgtctggtggaggtcctgattgccataagcagcctcacgtctccgctgctgttcacagcctctggatatctgtcattcagcatcatgagaatcgtggagatgtttaaggattacccgccagccataaaaccatcctacgatgtgctgctgctgctgctgctgctagtgctcctgctgcaggccggcctcaacacgggcaccgccatccagtgcgtgcgcttcaaggtcagtgcaaggctgcagggtgcatcctgggacacccagaacggcccgcaggagcgcctggctggggaggtggccaggagccccctgaaggagttcgacaaggagaaagcctggagagccgtcgtggtgcaaatggcccagtgacccccagacgcggaaaccgggtggcagcgcccagcctggccccaagcatggaaacgcacaacccctaatcgccctgagctactgcttctaacacctcttttcccttgtgtgagggcaaaccaggctgcaggtggggttttcacttcctagggtagtttaattttaaaataggccaatgttggctagtctgtgcctcagtgagatcagtcagctccgagtggctcccgtgtcgtaacagcaggagcatggccgcaacttcccaggccgaggaagggcccccggctcggcctcttgagagccccacccctgaactgg

SEQ ID NO: 238391 - DNA, 1656 bp, Artificial Sequence
  derived and/or modified sequence
agagaccagtgctcccaacggcagagcagcgggggagataaagaactggtgacacgtggctgtacattcagcacagctgtggtgtccccaagtgccatgacccaggagccattcagagaggagctggcctatgaccggatgcccacgctggagcggggccggcaagaccccgccagctatgccccagacgcgaagccgagcgacctgcagctgtcgaagagactgcccccctgcttcagccacaagacgtgggtcttctctgtgctgatggggagctgcctcctggtgacctcggggttttcgctgtacctggggaacgtgttcccggctgagatggattacttgcgctgtgctgcaggctcttgcatcccctcggcaattgtgagcttcaccgtctccaggaggaacgccaatgtgatcaacttcaacctcatcctgctgctcctgctggagctgctcatggcggccacggtgatcatcgctgcacggtccagcgaggaggactgcaagaaaaagaagggctccatgtctgacagcgccaacattctggacgaagtgccatttcctgctcgggtcctgaaatcttactcagtcgtcgaggtaatcgcaggcatctctgccgtcctcggggggatcattgccctgaacgtggatgactcagtttcaggcccacacctctcagtgacgttcttttggatcctagtggcctgctttccaagtgccattgccagtcatgtggcagcagagtgtcccagcaagtgtctggtggaggtcctgattgccataagcagcctcacgtctccgctgctgttcacagcctctggatatctgtcattcagcatcatgagaatcgtggagatgtttaaggattacccgccagccataaaaccatcctacgatgtgctgctgctgctgctgctgctagtgctcctgctgcaggccggcctcaacacgggcaccgccatccagtgcgtgcgcttcaaggtcagtgcaaggctgcagggtgcatcctgggacacccagaacggcccgcaggagcgcctggctggggaggtggccaggagccccctgaaggagttcgacaaggagaaagcctggagagccgtcgtggtgcaaatggcccagtgacccccagacgcggaaaccgggtggcagcgcccagcctggccccaagcatggaaacgcacaacccctaatcgccctgagctactgcttctaacacctcttttcccttgtgtgagggcaaaccaggctgcaggtggggttttcacttcctagggtagtttaattttaaaataggccaatgttggctagtctgtgcctcagtgagatcagtcagctccgagtggctcccgtgtcgtaacagcaggagcatggccgcaacttcccaggccgaggaagggcccccggctcggcctcttgagagccccacccctgaactggccccagctcctcttcctgcctctctcatggcttgggctggagtgggctctctggacctgaccagactgtgggtccctgcgtctcctgcccactctgaccgggcttcctccctccacgcttagggtctgtcccgggtactcagtcagcccagtgggatcttacccacttccctgcaaggtgcacctgccccaggctcaggctgcccagcggctc

SEQ ID NO: 238392 - DNA, 1134 bp, Artificial Sequence
  derived and/or modified sequence
atgacccaggagcccttccgggaggagctggcctacgaccggatgcccacactggagcggggaagacaggatccggccagctacgcaccagatgcgaagcccagtgacctgcagctgagtaagcgacttcctccctgcttctcccacaagacttgggtgttcagcgtgttgatggggagctgcctgctggttaccagtggtttttcactgtacttgggcaatgtctttcccgctgagatggattatctcagatgtgctgcaggaagctgcatcccaagcgccattgtctcatttaccgtgtcacggcgcaacgcgaacgtgattccaaattttcagatactgttcgtgagcacctttgctgttacaactacctgcctgatatggtttggatgcaaactggtcttgaacccatccgcaatcaatattaatttcaatctgatccttctactacttttggagctcttgatggctgctactgttatcattgctgctagatccagtgaagaggattgtaagaagaagaaagggtccatgtccgattcagctaacatactggatgaagtcccttttccagcacgggtcctgaagtcttattccgttgtggaggtgatcgctgggatctccgccgtcctaggcgggatcatcgccctcaacgtagatgattcagtgtctggccctcacctgagcgtgactttcttttggattctggtcgcttgcttcccctccgctatcgcctcacatgtggcggctgagtgcccatctaaatgtttggtggaagtgctcatcgccatatctagcctgaccagcccacttctcttcaccgcttctggttatctctcgttctctattatgaggattgtcgagatgttcaaggactaccctccggctataaagcctagctacgatgttctgctcctgctgctactgctagtgttgctcctacaagctggcctaaataccggtactgccattcagtgtgttcgatttaaagtgagcgccagactgcagggcgcctcctgggatacccaaaacggccctcaggaaaggctggccggcgaagtagcccgctcaccactgaaagagtttgacaaggaaaaggcctggcgcgctgtagtggtgcaaatggcacaatag

SEQ ID NO: 238393 - DNA, 1134 bp, Artificial Sequence
  derived and/or modified sequence
atgacccaggagcccttccgggaggagctggcctacgaccggatgccaaccctggagcgcggtcggcaggatcccgcgtcctacgccccagacgcaaaacccagcgacctgcagctgtctaaacgactgcccccttgtttttcccataagacatgggtgttctcggttctcatggggtcatgcctcttggtgacttccggcttctctctgtacctcgggaatgtctttcctgccgagatggactatctgcgctgtgcagctgggtcttgcatcccatcagccatcgtgtcctttacggtctccagacgcaacgctaatgtgatacccaactttcagattctattcgtgtcgaccttcgcggtaacgacaacctgcctgatttggtttggctgtaagcttgtccttaatccttccgctatcaacattaattttaacctcattctcctcctgcttttggagctgctgatggctgcaactgtgattattgctgcgcgctcaagtgaggaggactgtaaaaaaaaaaagggctcaatgtctgacagcgccaacattttggatgaggtgcctttcccggctagggtgcttaaatcctactccgtcgtcgaagtgatcgcggggatctcggccgtactcggagggattatagctctgaatgtagacgactctgtctctggacctcacctcagcgtgaccttcttctggatcctggtagcctgtttcccctccgccatagcctctcacgtcgcagctgagtgtccctctaagtgcttggtagaggttctgatcgccatatctagcctgacttctccacttctgttcaccgcctccgggtacctctcattttctattatgagaattgtcgaaatgtttaaggattacccacccgccataaagccttcatatgacgtcctcctccttctcttactcctggtgctcctccttcaggccggcctgaacaccggaactgctattcaatgcgttaggtttaaggtgtcagctaggctgcagggggctagctgggatactcagaacgggccgcaggaaagactcgctggcgaggtggcacggagcccgctgaaggaattcgataaagagaaggcatggagagccgtggtagttcagatggcccagtag

SEQ ID NO: 238394 - DNA, 1044 bp, Artificial Sequence
  derived and/or modified sequence
atgacccaggagcccttccgggaggagctggcctacgaccggatgcctaccctagaacgcggcagacaggatcctgccagctatgccccagacgccaaaccgagtgacctgcaactatctaagaggctgcccccctgtttctcccacaagacatgggtattcagtgtgctcatgggctgcattcccagcgcaattgtgagttttaccgtgtccaggagaaatgccaacgtcatccccaatttccagattctgttcgtatctacttttgccgtgacaaccacctgtctgatatggttcggatgcaagctggttctcaacccctccgcaatcaatataaatttcaatctcattttactattgctgctggagctgctcatggccgctaccgtgattatcgctgccagatcctccgaggaagactgtaaaaaaaagaaaggctctatgtcagatagtgcaaatattcttgatgaggtgcctttccctgcaagggtgctcaaatcctacagcgtcgtggaggttatcgccgggattagcgccgtactgggcggaatcatcgctcttaatgtagacgactctgtctcaggtccacacctgtctgtaacctttttctggattctggtcgcatgcttcccaagcgcaattgcctcacacgtagccgctgagtgccctagcaaatgcttggtcgaggtcctcattgctatctcttcactgacttcgccactcctcttcactgcttcaggatacttaagttttagcattatgcggatcgtcgagatgtttaaggattacccacccgcgatcaaaccttcatacgacgtgttacttctgttattattgctggtgctgctgctgcaggcaggactgaacacaggcaccgccatccaatgtgtgagatttaaagtgagtgctcggttgcaaggggcgagctgggacactcagaacgggccccaggaacggctggcaggcgaagtagcccgatcaccgctcaaagagttcgataaagagaaagcatggcgtgccgtagttgtgcagatggcccagtag

SEQ ID NO: 238395 - DNA, 978 bp, Artificial Sequence
  derived and/or modified sequence
atgacccaggagcccttccgggaggagctggcctacgaccggatgcctactctagaacgggggcggcaggatccagcaagttacgctcctgacgccaagccgtccgatctgcaactgtctaaacggctccctccctgcttcagtcacaaaacgtgggtgtttagcgtcttgatgggcagctgtttattagttacaagcggtttctctctgtacctgggaaatgtttttccagccgaaatggactacctgagatgcgcagccgggtccattaatttcaatctgattctgctgctcttgttggagcttctgatggctgctaccgtgataatagcggcacggagttccgaagaggactgtaagaagaaaaaaggttcaatgtccgacagtgcaaacattttagacgaggtgccctttcctgcccgcgtcctcaaatcctatagcgtcgtagaagtgattgccggcatctcggccgtgttaggaggtattatcgctctaaacgtcgatgatagtgtgagcggcccgcacctctcagtgactttcttctggatcctggtggcctgtttccctagtgccatcgcgtctcacgtagccgccgagtgcccaagcaaatgtctggtggaggttttaatcgccatttcaagcttaacatcaccattgcttttcacagctagcggatatcttagtttttctatcatgcgtattgtcgaaatgtttaaagactaccccccagcgattaagcccagctatgatgtgctacttctgttactgttgctagtcctgctgctgcaggctggactgaacactggcactgccatccaatgtgtgcgctttaaggtcagcgctagattacagggcgcctcctgggatacacagaacggaccccaggaacggttggccggagaggttgctagatctccgttgaaggaatttgacaaggagaaagcatggcgtgcagtggtggtgcagatggcacagtag

SEQ ID NO: 238396 - DNA, 897 bp, Artificial Sequence
  derived and/or modified sequence
atggactacctgcggtgcgccgccggcagctgcatccccagcgccatcgtatcctttaccgtctcccggcggaacgctaacgtgattccgaacttccagattctttttgtaagtacattcgcggtcactaccacatgcctgatctggtttggctgtaagttggtcctaaaccccagcgccattaacattaacttcaacctaatacttcttttactccttgagttgttgatggctgctacagtaatcatagccgcacggtcttcggaggaagactgtaaaaagaaaaaagggagtatgtcagacagcgctaatattctggacgaggtgcccttccctgctcgggtgctgaagtcatactccgtggtggaggtcatcgcgggaatctcagcagtgctgggcgggattattgcattaaatgtagatgatagcgtctcaggaccccacctatcagtgacctttttttggatacttgtggcctgcttcccctccgccatcgcatctcacgttgccgcagagtgcccaagcaagtgtctcgtggaagtgcttatcgccatcagctctttgacctccccactactgtttaccgctagcggctatctgtcattttcaatcatgagaatcgttgagatgtttaaagactatccacccgcgatcaagcctagttatgatgtgctcttactgctgctcctgctcgtgttgctactgcaggctgggttaaacacgggtaccgctatccaatgtgtcagatttaaggtctctgccagattacagggtgccagttgggatacccagaacggaccccaggaacgccttgccggcgaagtcgccaggtcacctctcaaagagtttgataaagaaaaggcatggcgggctgttgtcgtgcaaatggcacaatag

SEQ ID NO: 238397 - DNA, 1032 bp, Artificial Sequence
  derived and/or modified sequence
atgacccaggagcccttccgggaggagctggcctacgaccggatgccgaccttagagcggggcaggcaagatcctgcctcatatgcacctgacgcgaaaccctcggacctgcagttgtccaaacggcttccaccatgcttctctcataagacatgggtattttccgtgctgatgggcagctgtctcttagtaacgtctgggttctccctttacctggggaatgtattccctgccgagatggattatctacgctgcgcagcaggttcctgtataccaagcgcgatagtgtccttcaccgtttcccggcgcaatgccaacgtgatcaacttcaatcttattctattgctgttacttgagttgctgatggcagctacagtcatcatagctgctcggagctccgaagaggactgtaaaaaaaagaaaggcagcatgtctgattctgcaaacatcctcgacgaggtgccgtttcctgctcgtgttcttaagtcttactccgtagtcgaagtgattgccgggatcagtgccgtgcttggcggaattatcgcccttaatgtggatgattccgtgagcgggccacacctcagcgtgaccttcttctggatcctcgtggcatgtttcccctcggcaatcgcctcccacgttgctgctgaatgcccctcaaagtgcctcgtcgaagttctaatcgcaatcagctcgctcacatccccgctcctgtttaccgcatctggatatctgagcttcagcattatgcgcatcgtcgaaatgttcaaggattatccacctgccattaagccctcctatgatgtactgttactgctgttactactggtcctgttgctccaggcaggcctcaatacgggcactgcaatccaatgcgtccgctttaaagtcagcgcccgtctgcagggagcatcctgggatacacaaaacggaccgcaagagaggctagccggagaggttgctcgcagccccctgaaggaatttgataaggagaaagcgtggagggcagtcgtggtacagatggcccagtag

SEQ ID NO: 238398 - DNA, 1134 bp, Artificial Sequence
  derived and/or modified sequence
atgacccaggagccatttcgtgaggaactggcttatgatagaatgccgaccttggaacgtggcaggcaagatccagcgagctacgctcccgatgctaaaccttccgatctgcagctgtctaagaggttgccaccgtgtttttcccacaaaacgtgggtgtttagcgtcctgatgggttcctgtctgctcgtaaccagcggtttctctctgtatttagggaacgtgtttcccgctgagatggactatctgcgctgcgcggctggaagctgtattccctcagctatcgtgagtttcactgtgtctcgacgcaatgcaaacgtcattccaaacttccagatcttattcgtgtcaacatttgcagtcacaacaacttgtctcatctggtttggatgcaaactggtgctcaacccatctgcaataaacattaatttcaacctgatcctgctgctgttgctcgagctcctgatggctgcaacagtgattatcgccgcaaggtcttccgaagaggactgtaagaaaaagaaaggaagtatgtctgactcggcaaatattctggacgaagtgccgttccctgctcgcgttttaaaaagctatagcgtggtagaagtgatcgccggaattagtgctgtccttgggggtataatagctctgaatgtagacgatagcgtaagtggtccccacctgtctgtgaccttcttttggattcttgtggcatgcttcccaagcgccatcgccagtcatgtggccgctgaatgcccatccaaatgtctggtggaagtgctgattgcaatttcgtcactcacatcacctctcctgttcaccgcttccggatacctgtcattcagcatcatgcgtatcgtggagatgtttaaagattatccgcctgccatcaagccaagctacgatgtgcttctcttgctgctcctgctggttcttctcctgcaagccggattgaataccggaacggccatccagtgtgtcaggttcaaggtttcagccaggctgcaaggggcttcatgggacactcagaacggaccccaggagcggctggccggagaggtcgccagatctcccctaaaagaatttgataaggagaaggcctggagggctgtggtggtccagatggcacagtag

SEQ ID NO: 238399 - DNA, 1134 bp, Artificial Sequence
  derived and/or modified sequence
atgacacaggaacctttccgtgaagaactcgcttatgacagaatgcctactctcgaacggggtagacaggacccggcatcttacgcacctgatgccaagccttctgatctgcaactctccaaaagactgcccccatgtttctctcataagacatgggtctttagcgttctgatgggctcctgcctgctggtaacctccggctttagcctctaccttggcaacgtgtttcccgcagagatggactacctgagatgcgcggctgggtcatgcattcccagcgcaattgtatcattcaccgtttctcgcagaaatgcaaacgtaattccgaattttcagatcctgttcgtcagcaccttcgccgtcaccacaacttgcctgatttggtttggctgtaagctcgtgctgaacccctcagccataaatatcaacttcaatctcattttgctgttactgctggagctgctgatggcagctacagtgattatcgccgctaggtcttctgaagaggactgcaagaaaaagaaaggatcgatgtctgattcagcaaacattctcgacgaagtgcctttccctgctcgggtgctgaaaagttatagtgtggtggaagtgatcgctggaataagtgccgtgctggggggaataatcgcacttaatgtagatgattctgtctcagggcctcatttaagcgtgacctttttctggatcctcgtcgcgtgcttccctagcgctatcgcctctcatgtggcagccgaatgccctagtaaatgtctcgtggaggttttaatagcaatttctagtctcacctctccccttctttttaccgcctctggttacctctctttttccattatgagaattgtcgaaatgtttaaagattatcctcccgctattaaaccttcttacgacgtcctgctgcttctgctgctgctggttctgctcctgcaagcaggcctcaacaccggcactgcaatacagtgtgtgaggtttaaggtgtcggctcgcctccagggagccagttgggatacccagaacggcccacaggagcgactcgccggagaagtcgcccgaagtccattgaaggagtttgacaaagagaaagcatggcgcgctgtagttgttcagatggcacaatag

SEQ ID NO: 238400 - DNA, 1044 bp, Artificial Sequence
  derived and/or modified sequence
atgacacaggagccattcagggaggaacttgcctatgatcggatgcctacactggagcgaggtcgtcaggatcccgcatcatacgcacccgacgcaaagccttcagatctgcagctgtccaagcggctccccccatgcttttctcacaagacatgggtatttagtgttttgatgggctgtatcccaagtgcgatcgtttcttttacagtgagccggagaaacgcaaatgtcataccaaacttccagattctgtttgtgagcaccttcgcagtgactaccacttgtctgatatggtttggatgcaaactagtgctgaacccaagtgcaattaacatcaactttaacctgatactgctgcttctactcgagctcctgatggccgctaccgtgataattgcagcccgatcatctgaagaagactgtaagaagaaaaagggtagcatgtccgactccgctaacatccttgatgaagtcccattccctgcgcgagttctcaaatcttacagtgtagtcgaggtgatcgccggtatctcagcggtcctcggaggcatcatcgcacttaatgtggatgactccgtgtcaggtccgcatttgtcagttaccttcttctggatactggtcgcttgcttcccttccgctattgcgtcacacgttgccgctgagtgtcccagtaagtgcttggtggaggttcttatcgctatttctagccttacctcacccttgctgttcactgcttctgggtacctaagtttcagtattatgaggattgtagagatgtttaaggattatccaccggctataaaaccctcgtacgatgtcctactactgctccttctgcttgtgctgctcctgcaagccggtctgaacaccggaactgctatacaatgtgttcgattcaaggtttcagcaagattgcaaggggcttcctgggacacacagaatggcccacaggaacgtttagcaggtgaggtggccagatcccccctgaaagagttcgataaggagaaagcttggcgagccgtagtggttcagatggcgcagtag

SEQ ID NO: 238401 - DNA, 978 bp, Artificial Sequence
  derived and/or modified sequence
atgacacaagagcccttccgagaggagcttgcatacgacagaatgcccacgctagagcggggaagacaggaccccgcttcctacgcgccagacgctaaaccttccgacttgcaactgtcaaaacggctgcccccttgcttcagtcacaaaacctgggtcttttcagttctgatgggctcgtgtctgctggtgacgtcaggattttccttatatctcggcaacgttttcccagctgagatggattatctgcggtgcgctgctggttctattaatttcaacctgatcctccttctactccttgagctattaatggctgcaacagtgatcatcgccgctcgatcctccgaggaagactgtaagaaaaaaaaggggtcaatgtcagattccgccaacatcctggacgaggtacccttcccggcacgcgtgctgaagtcctattctgtggtagaggtcatcgctggcatcagtgctgtcctcggcggaatcatcgcactgaacgtcgacgattccgtgtccgggccacacctgtccgtgacatttttctggatcctagtagcctgtttcccatccgccattgcttctcatgtggctgcggagtgcccatctaagtgcttagtggaggtcttgatcgctatctctagcctgacttcaccactgctgtttactgcgagcgggtatttgtcgttctcaattatgcggatcgtggaaatgtttaaggactacccaccagccattaaaccaagttacgacgttttactgctgctccttctactggtgctgctcctccaggcaggcctgaatacgggcacagccatccagtgtgtgaggtttaaagtctctgcacgactgcagggtgccagctgggacacccaaaatggaccccaggaaagactggctggggaggttgctagaagtcccctcaaggaatttgataaggagaaggcatggagagctgtggtcgtgcagatggcccaatag

SEQ ID NO: 238402 - DNA, 897 bp, Artificial Sequence
  derived and/or modified sequence
atggattatctgcgctgtgccgctggttcatgcattccttccgcaatcgtgtcattcaccgtgtcaagaaggaatgccaatgtcattcccaattttcaaatccttttcgtgtcgaccttcgcagttaccactacttgcctgatttggttcggctgcaaactggtgctgaaccccagcgctatcaatattaatttcaacctgatactcttgctgctcttggagttgttgatggccgctaccgtgattatagccgcacgctccagcgaggaagattgtaagaagaagaaggggagcatgtctgacagcgccaatattctggatgaggtcccttttccagctagggtcttgaagagctacagcgttgtggaggttatcgctgggatttcggcggtcctcggcggtattatagcgcttaacgtggatgatagcgtgtccggccctcacctgtcagtgaccttcttttggatcctagtggcgtgcttcccctccgccattgcttctcacgttgcagccgaatgcccgagcaagtgtctcgtagaagtactgatcgccattagtagtctaacttcgccactgctctttactgcctctggctatctgtccttctctattatgcgcattgtagaaatgtttaaggattacccacctgccatcaagccctcatatgacgttttgctgctgttgctgctccttgtgctgctgctacaggcaggcctaaacaccgggaccgcaatccagtgcgtgagatttaaggtttccgcccgtcttcaaggagcctcctgggatacccagaatgggccacaagagcgtctggccggtgaggtggccaggtccccgctgaaggagtttgataaagagaaagcctggcgagccgttgttgtgcagatggctcagtag

SEQ ID NO: 238403 - DNA, 1032 bp, Artificial Sequence
  derived and/or modified sequence
atgacccaagaaccgttccgggaagaactagcttacgataggatgcctacccttgaacggggacggcaggatcccgcatcatacgccccagatgctaagccaagcgacctacagctatctaaacgactccccccttgctttagccacaaaacttgggtcttttcggtgttaatggggtcttgtctgcttgtcacctctggtttctccctgtatcttggtaatgtgtttcccgctgagatggattatctccgctgtgctgcaggatcctgcattccttcagctatcgtttctttcacagttagtaggaggaatgccaatgttatcaacttcaacctcattctcctgctgttgctcgaattacttatggctgcaaccgttatcattgcagcacgatctagcgaggaggattgtaagaagaaaaaggggtccatgtccgactccgccaatatacttgacgaggttccattccctgcccgtgttctgaaaagttacagcgtggttgaggtcatcgccggtatctctgccgtgttgggagggatcatagcacttaacgtggatgacagcgtgagcggcccacatctctccgtcacatttttctggattcttgtagcatgctttcctagcgcaatagcgtcccacgttgctgccgagtgcccaagtaagtgtctagttgaggtgctgatcgctatttcctctctaacatctcccctcttgtttaccgcgtctggctatctgagcttcagcattatgaggattgtcgagatgtttaaggattatcctcctgctataaaacccagctatgacgtgctgcttctattactgctgctcgtcctgctacttcaggccggactgaacaccgggaccgccattcagtgtgtgagatttaaagtaagcgctcgactgcaaggggcttcctgggacactcagaacggcccacaggaaaggttggcaggcgaagtggcacggagtcctctgaaggaattcgataaggagaaggcatggcgggcagtggtagtgcagatggcccagtag

SEQ ID NO: 238404 - DNA, 1134 bp, Artificial Sequence
  derived and/or modified sequence
atgacccaggagcccttcagagaggagctggcctacgacagaatgcccaccctggagagaggcagacaggaccccgccagctacgcccccgacgccaagcccagcgacctgcagctgagcaagagactgcccccctgcttcagccacaagacctgggtgttcagcgtgctgatgggcagctgcctgctggtgaccagcggcttcagcctgtacctgggcaacgtgttccccgccgagatggactacctgagatgcgccgccggcagctgcatccccagcgccatcgtgagcttcaccgtgagcagaagaaacgccaacgtgatccccaacttccagatcctgttcgtgagcaccttcgccgtgaccaccacctgcctgatctggttcggctgcaagctggtgctgaaccccagcgccatcaacatcaacttcaacctgatcctgctgctgctgctggagctgctgatggccgccaccgtgatcatcgccgccagaagcagcgaggaggactgcaagaagaagaagggcagcatgagcgacagcgccaacatcctggacgaggtgcccttccccgccagagtgctgaagagctacagcgtggtggaggtgatcgccggcatcagcgccgtgctgggcggcatcatcgccctgaacgtggacgacagcgtgagcggcccccacctgagcgtgaccttcttctggatcctggtggcctgcttccccagcgccatcgccagccacgtggccgccgagtgccccagcaagtgcctggtggaggtgctgatcgccatcagcagcctgaccagccccctgctgttcaccgccagcggctacctgagcttcagcatcatgagaatcgtggagatgttcaaggactacccccccgccatcaagcccagctacgacgtgctgctgctgctgctgctgctggtgctgctgctgcaggccggcctgaacaccggcaccgccatccagtgcgtgagattcaaggtgagcgccagactgcagggcgccagctgggacacccagaacggcccccaggagagactggccggcgaggtggccagaagccccctgaaggagttcgacaaggagaaggcctggagagccgtggtggtgcagatggcccagtag

SEQ ID NO: 238405 - DNA, 1044 bp, Artificial Sequence
  derived and/or modified sequence
atgacccaggagcccttcagagaggagctggcctacgacagaatgcccaccctggagagaggcagacaggaccccgccagctacgcccccgacgccaagcccagcgacctgcagctgagcaagagactgcccccctgcttcagccacaagacctgggtgttcagcgtgctgatgggctgcatccccagcgccatcgtgagcttcaccgtgagcagaagaaacgccaacgtgatccccaacttccagatcctgttcgtgagcaccttcgccgtgaccaccacctgcctgatctggttcggctgcaagctggtgctgaaccccagcgccatcaacatcaacttcaacctgatcctgctgctgctgctggagctgctgatggccgccaccgtgatcatcgccgccagaagcagcgaggaggactgcaagaagaagaagggcagcatgagcgacagcgccaacatcctggacgaggtgcccttccccgccagagtgctgaagagctacagcgtggtggaggtgatcgccggcatcagcgccgtgctgggcggcatcatcgccctgaacgtggacgacagcgtgagcggcccccacctgagcgtgaccttcttctggatcctggtggcctgcttccccagcgccatcgccagccacgtggccgccgagtgccccagcaagtgcctggtggaggtgctgatcgccatcagcagcctgaccagccccctgctgttcaccgccagcggctacctgagcttcagcatcatgagaatcgtggagatgttcaaggactacccccccgccatcaagcccagctacgacgtgctgctgctgctgctgctgctggtgctgctgctgcaggccggcctgaacaccggcaccgccatccagtgcgtgagattcaaggtgagcgccagactgcagggcgccagctgggacacccagaacggcccccaggagagactggccggcgaggtggccagaagccccctgaaggagttcgacaaggagaaggcctggagagccgtggtggtgcagatggcccagtag

SEQ ID NO: 238406 - DNA, 978 bp, Artificial Sequence
  derived and/or modified sequence
atgacccaggagcccttcagagaggagctggcctacgacagaatgcccaccctggagagaggcagacaggaccccgccagctacgcccccgacgccaagcccagcgacctgcagctgagcaagagactgcccccctgcttcagccacaagacctgggtgttcagcgtgctgatgggcagctgcctgctggtgaccagcggcttcagcctgtacctgggcaacgtgttccccgccgagatggactacctgagatgcgccgccggcagcatcaacttcaacctgatcctgctgctgctgctggagctgctgatggccgccaccgtgatcatcgccgccagaagcagcgaggaggactgcaagaagaagaagggcagcatgagcgacagcgccaacatcctggacgaggtgcccttccccgccagagtgctgaagagctacagcgtggtggaggtgatcgccggcatcagcgccgtgctgggcggcatcatcgccctgaacgtggacgacagcgtgagcggcccccacctgagcgtgaccttcttctggatcctggtggcctgcttccccagcgccatcgccagccacgtggccgccgagtgccccagcaagtgcctggtggaggtgctgatcgccatcagcagcctgaccagccccctgctgttcaccgccagcggctacctgagcttcagcatcatgagaatcgtggagatgttcaaggactacccccccgccatcaagcccagctacgacgtgctgctgctgctgctgctgctggtgctgctgctgcaggccggcctgaacaccggcaccgccatccagtgcgtgagattcaaggtgagcgccagactgcagggcgccagctgggacacccagaacggcccccaggagagactggccggcgaggtggccagaagccccctgaaggagttcgacaaggagaaggcctggagagccgtggtggtgcagatggcccagtag

SEQ ID NO: 238407 - DNA, 897 bp, Artificial Sequence
  derived and/or modified sequence
atggactacctgagatgcgccgccggcagctgcatccccagcgccatcgtgagcttcaccgtgagcagaagaaacgccaacgtgatccccaacttccagatcctgttcgtgagcaccttcgccgtgaccaccacctgcctgatctggttcggctgcaagctggtgctgaaccccagcgccatcaacatcaacttcaacctgatcctgctgctgctgctggagctgctgatggccgccaccgtgatcatcgccgccagaagcagcgaggaggactgcaagaagaagaagggcagcatgagcgacagcgccaacatcctggacgaggtgcccttccccgccagagtgctgaagagctacagcgtggtggaggtgatcgccggcatcagcgccgtgctgggcggcatcatcgccctgaacgtggacgacagcgtgagcggcccccacctgagcgtgaccttcttctggatcctggtggcctgcttccccagcgccatcgccagccacgtggccgccgagtgccccagcaagtgcctggtggaggtgctgatcgccatcagcagcctgaccagccccctgctgttcaccgccagcggctacctgagcttcagcatcatgagaatcgtggagatgttcaaggactacccccccgccatcaagcccagctacgacgtgctgctgctgctgctgctgctggtgctgctgctgcaggccggcctgaacaccggcaccgccatccagtgcgtgagattcaaggtgagcgccagactgcagggcgccagctgggacacccagaacggcccccaggagagactggccggcgaggtggccagaagccccctgaaggagttcgacaaggagaaggcctggagagccgtggtggtgcagatggcccagtag

SEQ ID NO: 238408 - DNA, 1032 bp, Artificial Sequence
  derived and/or modified sequence
atgacccaggagcccttcagagaggagctggcctacgacagaatgcccaccctggagagaggcagacaggaccccgccagctacgcccccgacgccaagcccagcgacctgcagctgagcaagagactgcccccctgcttcagccacaagacctgggtgttcagcgtgctgatgggcagctgcctgctggtgaccagcggcttcagcctgtacctgggcaacgtgttccccgccgagatggactacctgagatgcgccgccggcagctgcatccccagcgccatcgtgagcttcaccgtgagcagaagaaacgccaacgtgatcaacttcaacctgatcctgctgctgctgctggagctgctgatggccgccaccgtgatcatcgccgccagaagcagcgaggaggactgcaagaagaagaagggcagcatgagcgacagcgccaacatcctggacgaggtgcccttccccgccagagtgctgaagagctacagcgtggtggaggtgatcgccggcatcagcgccgtgctgggcggcatcatcgccctgaacgtggacgacagcgtgagcggcccccacctgagcgtgaccttcttctggatcctggtggcctgcttccccagcgccatcgccagccacgtggccgccgagtgccccagcaagtgcctggtggaggtgctgatcgccatcagcagcctgaccagccccctgctgttcaccgccagcggctacctgagcttcagcatcatgagaatcgtggagatgttcaaggactacccccccgccatcaagcccagctacgacgtgctgctgctgctgctgctgctggtgctgctgctgcaggccggcctgaacaccggcaccgccatccagtgcgtgagattcaaggtgagcgccagactgcagggcgccagctgggacacccagaacggcccccaggagagactggccggcgaggtggccagaagccccctgaaggagttcgacaaggagaaggcctggagagccgtggtggtgcagatggcccagtag

SEQ ID NO: 238409 - protein, 553 aa, Artificial Sequence
  derived and/or modified sequence
MVDMGALDNLIANTAYLQARKPSDCDSKELQRRRRSLALPGLQGCAELRQKLSLNFHSLCEQQPIGRRLFRDFLATVPTFRKAATFLEDVQNWELAEEGPTKDSALQGLVATCASAPAPGNPQPFLSQAVATKCQAATTEEERVAAVTLAKAEAMAFLQEQPFKDFVTSAFYDKFLQWKLFEMQPVSDKYFTEFRVLGKGGFGEVCAVQVKNTGKMYACKKLDKKRLKKKGGEKMALLEKEILEKVSSPFIVSLAYAFESKTHLCLVMSLMNGGDLKFHIYNVGTRGLDMSRVIFYSAQIACGMLHLHELGIVYRDMKPENVLLDDLGNCRLSDLGLAVEMKGGKPITQRAGTNGYMAPEILMEKVSYSYPVDWFAMGCSIYEMVAGRTPFKDYKEKVSKEDLKQRTLQDEVKFQHDNFTEEAKDICRLFLAKKPEQRLGSREKSDDPRKHHFFKTINFPRLEAGLIEPPFVPDPSVVYAKDIAEIDDFSEVRGVEFDDKDKQFFKNFATGAVPIAWQEEIIETGLFEELNDPNRPTGCEEGNSSKSGVCLLL

SEQ ID NO: 238410 - DNA, 3239 bp, Artificial Sequence
  derived and/or modified sequence
accctccacgggtcccacccacaggccacaggactcactgtaaatcccttggacgttgtctcacccgggaagggaaagcagccagcagccctccagccctcttgtgctttccctgggagtgcgccccgtgctcagccatggtggacatgggggccctggacaacctgatcgccaacaccgcctacctgcaggcccggaagccctcggactgcgacagcaaagagctgcagcggcggcggcgtagcctggccctgcccgggctgcagggctgcgcggagctccgccagaagctgtccctgaacttccacagcctgtgtgagcagcagcccatcggtcgccgcctcttccgtgacttcctagccacagtgcccacgttccgcaaggcggcaaccttcctagaggacgtgcagaactgggagctggccgaggagggacccaccaaagacagcgcgctgcaggggctggtggccacttgtgcgagtgcccctgccccggggaacccgcaacccttcctcagccaggccgtggccaccaagtgccaagcagccaccactgaggaagagcgagtggctgcagtgacgctggccaaggctgaggccatggctttcttgcaagagcagccctttaaggatttcgtgaccagcgccttctacgacaagtttctgcagtggaaactcttcgagatgcaaccagtgtcagacaagtacttcactgagttcagagtgctggggaaaggtggttttggggaggtatgtgccgtccaggtgaaaaacactgggaagatgtatgcctgtaagaaactggacaagaagcggctgaagaagaaaggtggcgagaagatggctctcttggaaaaggaaatcttggagaaggtcagcagccctttcattgtctctctggcctatgcctttgagagcaagacccatctctgccttgtcatgagcctgatgaatgggggagacctcaagttccacatctacaacgtgggcacgcgtggcctggacatgagccgggtgatcttttactcggcccagatagcctgtgggatgctgcacctccatgaactcggcatcgtctatcgggacatgaagcctgagaatgtgcttctggatgacctcggcaactgcaggttatctgacctggggctggccgtggagatgaagggtggcaagcccatcacccagagggctggaaccaatggttacatggctcctgagatcctaatggaaaaggtaagttattcctatcctgtggactggtttgccatgggatgcagcatttatgaaatggttgctggacgaacaccattcaaagattacaaggaaaaggtcagtaaagaggatctgaagcaaagaactctgcaagacgaggtcaaattccagcatgataacttcacagaggaagcaaaagatatttgcaggctcttcttggctaagaaaccagagcaacgcttaggaagcagagaaaagtctgatgatcccaggaaacatcatttctttaaaacgatcaactttcctcgcctggaagctggcctaattgaacccccatttgtgccagacccttcagtggtttatgccaaagacatcgctgaaattgatgatttctctgaggttcggggggtggaatttgatgacaaagataagcagttcttcaaaaactttgcgacaggtgctgttcctatagcatggcaggaagaaattatagaaacgggactgtttgaggaactgaatgaccccaacagacctacgggttgtgaggagggtaattcatccaagtctggcgtgtgtttgttattgtaaattgctctctttaccagacaggcagcaggagtctcggctgacataatcctcgaatgttccacacgtggaaatctgtggaatgagggctaatcagttaggagggacatcacaaccacaaaacaattcaaaagacaggcaagctcactactagaacacattttattttctttttctttcttcataaagatgagtaaagtctcagttttcactgagggcagggaaaaggaacactcaggtttattttgataaactgaaagcatcagccttttaccatcatgtccctgtgtattacgcaaagtcctaggaacagagaatggaactttgtggtgtgcccagaaaatgagcatttgcaattcttagtaaataatcattttagtttttctttgtttatatctttttttcccttcatctttcttcgcttctatacttataaaaaggattttgaagctggaaacaaatgtttctgacattctccccctaaaaaggagtggattacaatattttggcaatgttttaaatcacagaataattttcaatttcagtgacagtttcttttgcaattttgtggaaataatttactatcataatgttgaagcattttaaacataaacatccatgacatctgtgaattaaagcattctgtaaatttagttgagtcctttaagtaatatggtacaaattgcttcaacttgcactaccatatgccatcggttcccaaactctgctgaactttggaatcatctagggatcttttaaaaaactaatgcctgattcccatccatagacattctgatccccactcccaggtatgagaacagcttgaccatttagaatttcagaagctccccaggtgattctaatgtgcagcagagtttggcaggcactgctgtgcacatttgaatgttattacattcaatcttattttggttgctcaaaacttcaatcatacattttgatggcaacttttcaaatgtccccaaagcatgtcattttagtaattgcagtataaatgaaacaagacagtctattcatcttatggcttctcttgtccttgcacactttagtttctcacacgtatcttgggagctcggtctcttggctatttcaagtcctgaaggagacctatgggcttagaaattgagttgaacaggccaggtgcggtggctcatgcctgcaattccagcactttgggaggccaaggcagatggatcatgaggtcaggggctcaagactagcctggccaacatgttgtaaaccccgtctctactaaaaatacaaaaattagcccggtgtggtggtgcacatctataatcccagttacccgggagcctgaggcaggagaattgcttgaacccaggaggcggaggttgtagtgagccaagatcgcaacattgcactccaggctgggcagcaagagcaagactctatctcaaaaaaaaa

SEQ ID NO: 238411 - DNA, 1662 bp, Artificial Sequence
  derived and/or modified sequence
atggtggatatgggagcacttgataacctaatcgccaatacagcctacttgcaggccaggaagcctagtgattgcgacagcaaggaactgcagcggagacgacggtcactggcactccctggattgcaggggtgcgccgaactgaggcagaaattaagtctgaatttccatagcttatgcgagcagcagcccatcgggagacggctctttcgtgacttcttggcgactgtacccacattccgaaaggccgccacctttctggaggacgtgcaaaattgggaactggccgaggaaggaccaaccaaagatagcgcccttcagggcctggttgccacatgtgccagtgcaccagcgccaggaaatcctcaaccgttcctttctcaagcagtggctaccaaatgccaagcagctactacggaagaagagagagtggcagctgtgaccttggccaaggctgaggctatggctttcctgcaagaacagccctttaaggacttcgttacatctgctttttacgataagttcctccaatggaagctttttgagatgcagcctgtttcagataaatatttcacagagtttcgggttctaggcaaaggcggctttggcgaagtttgcgccgttcaggtaaagaacaccgggaagatgtatgcatgcaagaaactggataagaagcggctgaagaagaagggaggtgagaagatggccctcctggaaaaggaaattctggaaaaggtctcaagccccttcatcgttagcctggcgtacgcctttgaatccaagacacacctgtgccttgtcatgtccctgatgaacggaggggatctgaagttccacatttataatgttgggacccgcggactcgacatgagcagagtgattttctattcagctcagattgcttgcggcatgctgcacctacatgagctgggcatagtgtatagagacatgaaacccgagaatgtgctgctggatgacctcgggaattgcagactttctgacctgggcctggccgtggagatgaagggggggaaaccaatcacccagcgcgctgggacaaatggatatatggccccagagattctcatggagaaggtctcttattcgtaccctgtggattggttcgctatgggctgttccatctatgagatggtcgccgggaggaccccattcaaagattacaaagagaaggtttccaaagaggatcttaaacagcggaccctgcaggatgaggtgaaattccagcacgacaattttaccgaagaggccaaagacatctgtcggttgtttttggccaagaaaccagaacagcgactgggttctagggagaagtccgacgaccctcggaaacaccacttctttaagaccataaactttccccgacttgaggccggcttaattgagccaccattcgtccctgatcccagcgtggtttatgccaaagatattgccgaaatcgacgacttcagcgaggtacgcggcgtggagttcgatgataaggacaagcagtttttcaagaactttgcgaccggcgcggtaccaattgcttggcaggaggagattatcgagacaggcctgtttgaagagttaaatgaccctaaccgccctacaggatgcgaagagggtaactcatcgaaaagcggagtgtgcttgcttctatag

SEQ ID NO: 238412 - DNA, 1662 bp, Artificial Sequence
  derived and/or modified sequence
atggtggacatgggcgccctggacaacctgattgccaacacagcctacctgcaggccaggaagcccagcgactgtgacagcaaggagctgcagaggagaagaagaagcctggccctgcccggcctgcagggctgtgccgagctgcggcagaagctgagcctgaacttccacagcctgtgtgagcagcagcccatcggcagaagactcttccgggacttcctggccaccgtgcccaccttcaggaaggccgccaccttcctggaggatgtgcagaactgggagctggccgaggagggccccaccaaggacagcgccctgcagggcctggtggccacctgtgccagcgccccagcccctggcaacccccagcccttcctgagccaggccgtggccaccaagtgccaggccgccaccacagaggaggagcgggtggccgctgtgaccctggccaaggccgaggccatggccttcctgcaggagcagcccttcaaggactttgtgaccagcgccttctatgacaagttcctgcagtggaagctgtttgagatgcagcctgtgtctgacaagtacttcacagagttccgggtgctgggcaaaggaggctttggagaggtgtgtgctgtgcaggtgaagaacacaggcaagatgtatgcctgcaagaagctggacaagaagaggctgaagaagaagggcggggagaagatggccctgctggagaaggagatcctggagaaggtgagcagccccttcatcgtgtccctggcctatgcctttgagagcaagacccacctgtgcctggtgatgagcctgatgaatggaggagacctgaagttccacatctacaacgtgggcacccggggcctggacatgagcagggtcatcttctacagcgcccagatcgcctgtggcatgctgcacctgcacgagctgggcatcgtgtacagagacatgaagccagaaaatgtgctgctggatgacctgggcaactgccgcctgagtgacctgggcctggccgtggagatgaagggcggcaagcccatcacccagagagctggcaccaacggctacatggcccctgagatcctgatggagaaggtgtcctacagctaccctgtggactggtttgccatgggctgcagcatctatgagatggtggccggccgcacccccttcaaggactacaaggagaaggtgtccaaagaagacctgaagcagaggaccctgcaggatgaggtgaagttccagcacgacaacttcacagaggaggccaaggacatctgccgcctcttcctggccaagaagccagagcagaggctgggcagccgggagaagagtgatgaccccaggaagcaccacttcttcaagaccatcaacttcccccggctggaggccggcctgattgagcccccatttgtgcctgaccccagcgtggtgtatgccaaggacattgctgagattgatgacttcagcgaggtgcggggcgtggagtttgatgacaaggacaagcagttcttcaagaactttgccaccggggctgtgcccatcgcctggcaggaggagatcatcgagaccggcctgtttgaggagctgaatgaccccaaccggcccaccggctgtgaggagggcaacagcagcaagtctggagtgtgcctgctgctgtag

SEQ ID NO: 238413 - DNA, 1662 bp, Artificial Sequence
  derived and/or modified sequence
atggtggacatgggcgccctggacaacctgatcgccaacaccgcctatctccaggcaaggaaacctagtgactgcgatagtaaagagctacagagaaggcgaagatccctggcgctacccggacttcaggggtgtgccgaactgcgacagaaactctcactaaatttccactctctgtgtgagcagcagccaatcggacgcaggctttttagagatttcctggctacagtgccaactttcaggaaggctgcgacctttctggaggatgtgcagaactgggagctggcagaggaagggcctaccaaggacagcgctttgcagggattagtcgccacatgcgcgtcggcccccgcacccggtaacccccagccgttcctgtcacaagcggtcgctacaaagtgccaggccgcaacgactgaggaagagagagtggccgcagtgacgttggcgaaggctgaagccatggcctttttgcaggagcagcctttcaaagacttcgtaacctcggcattttacgataagttcctgcagtggaaattgttcgaaatgcaaccagtgtccgacaaatactttacagagtttcgcgttttgggaaagggcggctttggagaggtgtgtgcggtccaggttaagaataccgggaaaatgtacgcctgtaagaaattggacaaaaaaagattaaagaaaaaaggtggagaaaagatggcactgctggagaaggagatcctggagaaggtatcctctccatttatagtgtctctggcttatgcttttgaatctaagacgcatttgtgcttagtgatgtccctcatgaatgggggcgacctaaagttccacatctacaacgtcggtacccggggcttggacatgtcaagggtgattttctatagcgcacagatagcgtgtggaatgctgcacctgcacgaactgggcatagtgtacagagatatgaaacctgagaacgtgcttctggacgatcttggtaattgccggttgagtgacctcggtcttgcagtcgagatgaagggcggtaagcccataactcagagggccggcacgaacggatatatggctccagaaatcctgatggaaaaagtttcttattcttaccctgtggattggttcgccatgggttgcagcatttatgagatggtcgctgggcgcacccctttcaaggactacaaggagaaagttagcaaggaagacctcaagcagcgcaccctccaggatgaagtcaaatttcagcatgacaatttcaccgaggaggccaaggacatctgccggctcttcctggcaaaaaagcctgaacagcggcttggctcacgagaaaaaagtgatgacccaagaaaacaccacttcttcaaaacaatcaatttccctagactggaggcaggcctcattgaacctcctttcgttcctgatcctagcgtggtctacgccaaggacattgccgaaattgacgactttagtgaagtgcgaggggtcgaattcgatgataaggacaaacagttctttaaaaattttgccaccggggcggtgccaattgcatggcaagaggaaattatcgagaccggactctttgaggagctgaacgatccaaaccgaccgaccggctgtgaagaagggaacagctccaaaagtggggtatgccttctgctgtag

SEQ ID NO: 238414 - DNA, 1662 bp, Artificial Sequence
  derived and/or modified sequence
atggtggatatgggagcgctagataatttgatagccaacaccgcatacctccaggcaaggaaaccaagcgattgtgactccaaagaactccagcgcaggcggcgttccctggcactacctggtttgcagggatgcgcagaactacgccagaaactgtccctgaactttcactccttgtgtgaacagcagcctatcggcagaaggttgtttcgagatttcctagcaactgttcctacttttcgtaaggcagccaccttccttgaggatgtgcagaactgggagctggcggaggagggcccaacgaaggatagcgccttacaaggtctagtggccacatgtgctagcgcccctgctcctggcaacccccagccatttttgagccaggccgtagcgaccaagtgccaggcagccacaactgaggaggaacgagtggctgccgtgactttagcgaaggcagaagccatggccttcttacaggagcagccttttaaggacttcgtgacctctgctttttacgataaattcctgcaatggaaactatttgagatgcaacccgtctctgataaatactttacagagtttagagtcctgggaaagggcggttttggcgaagtttgcgccgtccaggtgaagaacacaggaaagatgtatgcatgcaaaaagctggataaaaaacgcctgaaaaagaaggggggagagaagatggcgctgctggaaaaggagatactcgagaaagtgtcctccccattcatcgttagcctcgcatacgcttttgagagcaaaacgcacctgtgtctcgtcatgagtctaatgaatggcggagacctgaaatttcatatttacaatgttggaacccgagggctggacatgagccgcgtcattttctattctgcccaaatcgcttgcggaatgcttcatttgcacgaattgggaatcgtctatagggatatgaaacccgagaatgtgctcctggacgacctgggaaactgcagactcagcgatttggggctggcagtcgagatgaagggcggaaagcccatcacgcagcgagccggaaccaacggttacatggctccagagattctgatggagaaggtgagctattcatatcccgtcgattggttcgccatgggctgttccatttacgagatggtggctgggcgaacacctttcaaagattacaaagagaaagtctctaaggaggatttgaagcagagaaccttgcaagatgaggtcaaattccagcatgacaacttcaccgaagaggctaaggacatctgtcgcctctttctggcaaagaaacctgagcagcgcttaggaagtcgcgagaagtctgacgacccacgcaagcatcatttcttcaagactataaacttcccacgattggaggcaggcctcattgagccccctttcgtgcctgatccttccgtggtatacgctaaagacattgctgagatcgacgatttcagcgaggtaaggggggtagagttcgacgataaagacaaacagttctttaaaaatttcgcaacaggagcagtgccaatcgcctggcaagaggaaatcatagaaaccggactattcgaagaattaaacgatccaaaccggcctactggatgtgaggaaggaaattccagcaagtcaggggtgtgccttctgctgtag

SEQ ID NO: 238415 - DNA, 1662 bp, Artificial Sequence
  derived and/or modified sequence
atggtggacatgggcgccctggacaacctgatcgccaacaccgcctacctgcaggccagaaagcccagcgactgcgacagcaaggagctgcagagaagaagaagaagcctggccctgcccggcctgcagggctgcgccgagctgagacagaagctgagcctgaacttccacagcctgtgcgagcagcagcccatcggcagaagactgttcagagacttcctggccaccgtgcccaccttcagaaaggccgccaccttcctggaggacgtgcagaactgggagctggccgaggagggccccaccaaggacagcgccctgcagggcctggtggccacctgcgccagcgcccccgcccccggcaacccccagcccttcctgagccaggccgtggccaccaagtgccaggccgccaccaccgaggaggagagagtggccgccgtgaccctggccaaggccgaggccatggccttcctgcaggagcagcccttcaaggacttcgtgaccagcgccttctacgacaagttcctgcagtggaagctgttcgagatgcagcccgtgagcgacaagtacttcaccgagttcagagtgctgggcaagggcggcttcggcgaggtgtgcgccgtgcaggtgaagaacaccggcaagatgtacgcctgcaagaagctggacaagaagagactgaagaagaagggcggcgagaagatggccctgctggagaaggagatcctggagaaggtgagcagccccttcatcgtgagcctggcctacgccttcgagagcaagacccacctgtgcctggtgatgagcctgatgaacggcggcgacctgaagttccacatctacaacgtgggcaccagaggcctggacatgagcagagtgatcttctacagcgcccagatcgcctgcggcatgctgcacctgcacgagctgggcatcgtgtacagagacatgaagcccgagaacgtgctgctggacgacctgggcaactgcagactgagcgacctgggcctggccgtggagatgaagggcggcaagcccatcacccagagagccggcaccaacggctacatggcccccgagatcctgatggagaaggtgagctacagctaccccgtggactggttcgccatgggctgcagcatctacgagatggtggccggcagaacccccttcaaggactacaaggagaaggtgagcaaggaggacctgaagcagagaaccctgcaggacgaggtgaagttccagcacgacaacttcaccgaggaggccaaggacatctgcagactgttcctggccaagaagcccgagcagagactgggcagcagagagaagagcgacgaccccagaaagcaccacttcttcaagaccatcaacttccccagactggaggccggcctgatcgagccccccttcgtgcccgaccccagcgtggtgtacgccaaggacatcgccgagatcgacgacttcagcgaggtgagaggcgtggagttcgacgacaaggacaagcagttcttcaagaacttcgccaccggcgccgtgcccatcgcctggcaggaggagatcatcgagaccggcctgttcgaggagctgaacgaccccaacagacccaccggctgcgaggagggcaacagcagcaagagcggcgtgtgcctgctgctgtag

SEQ ID NO: 238416 - protein, 592 aa, Artificial Sequence
  derived and/or modified sequence
MSDSGSYGQSGGEQQSYSTYGNPGSQGYGQASQSYSGYGQTTDSSYGQNYSGYSSYGQSQSGYSQSYGGYENQKQSSYSQQPYNNQGQQQNMESSGSQGGRAPSYDQPDYGQQDSYDQQSGYDQHQGSYDEQSNYDQQHDSYSQNQQSYHSQRENYSHHTQDDRRDVSRYGEDNRGYGGSQGGGRGRGGYDKDGRGPMTGSSGGDRGGFKNFGGHRDYGPRTDADSESDNSDNNTIFVQGLGEGVSTDQVGEFFKQIGIIKTNKKTGKPMINLYTDKDTGKPKGEATVSFDDPPSAKAAIDWFDGKEFHGNIIKVSFATRRPEFMRGGGSGGGRRGRGGYRGRGGFQGRGGDPKSGDWVCPNPSCGNMNFARRNSCNQCNEPRPEDSRPSGGDFRGRGYGGERGYRGRGGRGGDRGGYGGDRSGGGYGGDRSSGGGYSGDRSGGGYGGDRSGGGYGGDRGGGYGGDRGGGYGGDRGGGYGGDRGGYGGDRGGGYGGDRGGYGGDRGGYGGDRGGYGGDRGGYGGDRSRGGYGGDRGGGSGYGGDRSGGYGGDRSGGGYGGDRGGGYGGDRGGYGGKMGGRNDYRNDQRNRPY

SEQ ID NO: 238417 - protein, 395 aa, Artificial Sequence
  derived and/or modified sequence
MTGSSGGDRGGFKNFGGHRDYGPRTDADSESDNSDNNTIFVQGLGEGVSTDQVGEFFKQIGIIKTNKKTGKPMINLYTDKDTGKPKGEATVSFDDPPSAKAAIDWFDGKEFHGNIIKVSFATRRPEFMRGGGSGGGRRGRGGYRGRGGFQGRGGDPKSGDWVCPNPSCGNMNFARRNSCNQCNEPRPEDSRPSGGDFRGRGYGGERGYRGRGGRGGDRGGYGGDRSGGGYGGDRSSGGGYSGDRSGGGYGGDRSGGGYGGDRGGGYGGDRGGGYGGDRGGGYGGDRGGYGGDRGGGYGGDRGGYGGDRGGYGGDRGGYGGDRGGYGGDRSRGGYGGDRGGGSGYGGDRSGGYGGDRSGGGYGGDRGGGYGGDRGGYGGKMGGRNDYRNDQRNRPY

SEQ ID NO: 238418 - protein, 699 aa, Artificial Sequence
  derived and/or modified sequence
MGPAPAGEQLRGATGEPEVMEPALEGTGKEGKKASSRKRTLAEPPAKGLLQPVKLSRAELYKEPTNEELNRLRETEILFHSSLLRLQVEELLKEVRLSEKKKDRIDAFLREVNQRVVRVPSVPETELTDQAWLPAGVRVPLHQVPYAVKGCFRFLPPAQVTVVGSYLLGTCIRPDINVDVALTMPREILQDKDGLNQRYFRKRALYLAHLAHHLAQDPLFGSVCFSYTNGCHLKPSLLLRPRGKDERLVTVRLHPCPPPDFFRPCRLLPTKNNVRSAWYRGQSPAGDGSPEPPTPRYNTWVLQDTVLESHLQLLSTILSSAQGLKDGVALLKVWLRQRELDKGQGGFTGFLVSMLVVFLVSTRKIHTTMSGYQVLRSVLQFLATTDLTVNGISLCLSSDPSLPALADFHQAFSVVFLDSSGHLNLCADVTASTYHQVQHEARLSMMLLDSRADDGFHLLLMTPKPMIRAFDHVLHLRPLSRLQAACHRLKLWPELQDNGGDYVSAALGPLTTLLEQGLGARLNLLAHSRPPVPEWDISQDPPKHKDSGTLTLGLLLRPEGLTSVLELGPEADQPEAAKFRQFWGSRSELRRFQDGAIREAVVWEAASMSQKRLIPHQVVTHLLALHADIPETCVHYVGGPLDALIQGLKEASSTKGRMVMSRGGELVMVPNVEAILEDFAVLGEGLVQTVEARSERWTV

SEQ ID NO: 238419 - DNA, 2100 bp, Artificial Sequence
  derived and/or modified sequence
atgggtcccgccccggcgggcgaacagctgcgaggcgccaccggggagccagaagtaatggaacccgctctcgagggtactggaaaggaagggaaaaaggctagtagcaggaagaggaccctagccgagccacctgcaaagggtctgttgcagccagtgaaactctctcgagcggagctgtataaggagccaacaaatgaggagttgaaccgcctgagagaaaccgaaattttgttccattcgtccttgcttcgtttgcaggtagaggaactcttgaaggaagtgcgcctgagtgagaagaaaaaagacaggatcgatgcctttctgagggaggtcaaccaaagggtggtgcgcgtcccatctgtcccagagactgaattgaccgatcaagcttggctgcctgccggcgtgcgggtaccattacatcaagtaccatatgccgtcaaaggctgcttcagatttctgccaccagctcaagtgaccgtggtcggctcctaccttctaggaacgtgcatcaggcccgatataaacgtggacgtggccttgaccatgcctagggagatccttcaggataaagacgggctgaaccaaagatattttcgaaaacgtgctctttacttagcccatttggcacatcacttggcccaggaccccctcttcgggtccgtgtgcttcagttataccaacgggtgtcacctcaagccgagcttactgctgcggcctcgagggaaggatgaaaggctagtgacagtccggttacacccttgtcccccacccgacttctttaggccatgtaggctgctgccaaccaagaataacgttcgctcggcatggtaccgggggcagtcccctgctggagacggttcccctgagcctcctactcctagatataatacgtgggtccttcaggatactgtgttggaaagccacctgcagttgctaagtactatactgagcagtgctcagggactaaaggacggcgtggcgctgcttaaggtctggctccgccagcgcgagctggacaagggacagggcggttttaccggcttccttgtctccatgctggtggtttttctggtctctacgcgcaaaatccatactaccatgtccggctatcaggtactccgctccgtgctgcagttcttagcaaccacagacttgaccgtgaacggaatttccctttgtctttctagtgacccatccctgcctgccctagccgactttcatcaagccttctctgtcgttttccttgatagttcagggcacctcaacttgtgtgctgacgtgacagcttccacataccaccaggtacagcatgaggctagactatcaatgatgttgcttgacagccgggctgacgatgggtttcaccttctgttaatgacaccaaaaccaatgattcgggctttcgaccacgtgctgcacttaaggccactgagcagactgcaagcggcctgtcataggttaaaactttggccagaacttcaagacaacggtggggattacgtcagcgccgccctgggaccactgaccactctgctcgagcagggcctaggcgctcgcctcaatctcttagcacactctcggcctcctgtgcctgaatgggacatttcccaagaccctccgaaacataaagattcaggcacccttacgcttgggctactgctcagaccagagggtctgacaagcgtgttggagctaggtcctgaggcggaccagccagaggctgcgaaatttaggcagttttggggtagccgctcggagctgaggcgtttccaagacggcgccattagagaggctgtagtctgggaagcggcctctatgtcccaaaagagattgatcccacaccaagtcgtcacgcacctgctggctctccatgcagacatacctgaaacctgcgtgcactatgtgggcggtcccctggatgccctgattcagggcctgaaggaagccagctcaaccaaaggtaggatggttatgtctcggggcggcgaactggtgatggtcccgaacgtcgaggccatcctagaggacttcgccgttcttggcgagggtctggttcagactgttgaagcccgttcagaacggtggactgtctag

SEQ ID NO: 238420 - DNA, 2100 bp, Artificial Sequence
  derived and/or modified sequence
atgggccctgccccagctggggagcagctgcggggggccaccggggagcctgaggtgatggagcccgccctggagggcaccgggaaggagggcaagaaggccagcagcaggaagaggaccctggccgagcccccagccaagggcctgctgcagcctgtgaagctgagcagagctgagctgtacaaggagcccaccaatgaggagctgaaccggctgcgggagacagagatcctcttccacagcagcctgctgcggctgcaggtggaggagctgctgaaggaggtgcggctgtctgagaagaagaaggacagaattgatgccttcctgcgggaggtgaaccagagggtggtgcgggtgcccagcgtgcctgagacagagctgacagaccaggcctggctgcctgctggggtgcgggtgcccctgcaccaggtgccctatgctgtgaagggctgcttccgcttcctgcccccagcccaggtgacagtggtgggcagctacctgctgggcacctgcatccggccagacatcaacgtggatgtggccctgaccatgccccgggagatcctgcaggacaaggatggcctgaaccagcgctacttcaggaagagggccctgtacctggcccacctggcccaccacctggcccaggaccccctgtttggatctgtgtgcttctcctacaccaacggctgccacctgaagcccagcctgctgctgcggccccggggcaaggatgagcggctggtgacagtgcggctgcacccctgccccccaccagacttcttccggccctgccgcctgctgcccaccaagaacaacgtgcgcagcgcctggtaccggggccagagccctgctggagatggcagccctgagccccccaccccccgctacaacacctgggtgctgcaggacacagtgctggagagccacctgcagctgctgagcaccatcctgagcagcgcccagggcctgaaggatggagtggccctgctgaaggtgtggctgcggcagcgggagctggacaagggccagggcggcttcaccggcttcctggtgtccatgctggtggtgttcctggtgtccaccaggaagatccacaccaccatgagcggctaccaggtgctgcggtctgtgctgcagttcctggccaccacagacctgactgtgaatggcatcagcctgtgcctgagcagtgaccccagcctgcctgccctggccgacttccaccaggccttctctgtggtgttcctggacagcagcggccacctgaacctgtgtgctgatgtgacagccagcacctaccaccaggtgcagcacgaggcccggctgtccatgatgctgctggacagcagagcagatgatggcttccacctgctgctgatgacccccaagcccatgatccgggcctttgaccacgtgctgcacctgcggcccctgagccggctgcaggccgcctgccaccggctgaagctgtggccagagctgcaggacaatggaggagactatgtgtctgctgccctgggccccctgaccaccctgctggagcagggcctgggcgcccggctgaacctgctggcccacagccggccccctgtgcctgagtgggacatcagccaggacccccccaagcacaaggacagcggcaccctgaccctgggcctgctgctgcggcctgagggcctgacctctgtgctggagctgggccctgaggccgaccagcctgaggccgccaagttccggcagttctggggcagccgctctgagctgcggcgcttccaggatggagccatccgggaggccgtggtgtgggaggccgcctccatgagccagaagaggctcatcccccaccaggtggtgacccacctgctggccctgcatgctgacatccctgagacctgtgtgcactacgtgggcggccccctggatgccctgatccagggcctgaaggaggccagcagcaccaagggccgcatggtgatgagcagaggaggagagctggtgatggtgcccaacgtggaggccatcctggaggactttgctgtgctgggggagggcctggtgcagacagtggaggcccggtctgagcgctggacagtgtag

SEQ ID NO: 238421 - DNA, 2100 bp, Artificial Sequence
  derived and/or modified sequence
atgggccccgcccccgccggcgagcagctgcggggcgccaccggcgaaccggaagtgatggagcctgctctggagggaacaggaaaagaggggaagaaagcatcgagccgcaaaagaaccttggccgaaccacccgctaagggactgctgcagcccgtgaagctctctcgggcggaactttataaagagcctaccaatgaggaactgaaccgcctgagggagacggaaatactttttcactcgtcccttctgagactgcaggtggaagaactgctgaaagaggttcggttgagcgagaagaagaaggatcgaatagatgccttcctgcgggaggtgaatcagagagtcgtgcgcgtgcccagtgttcctgagactgagttgactgaccaagcttggcttcctgctggcgtgcgtgtgcctctccaccaggtgccctatgctgttaaggggtgctttaggttcctccctcctgcccaagtaacggtcgtcggaagctatttattgggcacctgtatccgacccgacattaacgtagacgttgccttgactatgcctcgcgagatcctccaggacaaggatggattgaaccagcgctatttccggaagagggctctgtatctagcgcacctggctcaccacttggcccaggatcctctgtttggatctgtgtgttttagctacacgaacggctgtcacctgaagccgagtctgctgctgaggccgaggggcaaggacgagcgccttgttaccgtaagattacatccttgccctccccccgacttttttagaccgtgcagattgctgcccactaaaaacaatgttaggtctgcatggtaccgtgggcagagtcccgccggagacggcagcccagaaccgcctactccccgttataacacctgggtgctgcaggacacagttctggagtcgcatctgcagctgttgtctacgatcctgagctccgcccagggtctcaaagacggtgtagctcttctcaaagtgtggctgaggcagagggagttggataaaggccaaggggggttcaccggcttcttggttagcatgttggtggtctttctggtgagcacccgcaaaatccacacaaccatgtccgggtaccaggtgctccgcagtgtccttcaattcttggccaccacggaccttaccgtgaatgggatctcattatgcttaagctcagacccaagtttgccggcactcgccgattttcatcaggcgttcagcgtggtgtttcttgactcgagcgggcacttgaatctatgtgcagatgtaaccgcaagcacctatcaccaagttcagcacgaggcaaggctttcgatgatgcttcttgactcccgagcggacgacgggttccaccttctgcttatgacacctaaacctatgatacgcgcttttgatcacgtgcttcatctgaggcccctgtctaggttgcaagcggcttgccacagactcaaactgtggccagagctccaggacaacggcggcgactatgtgtctgcggccttgggccccttgactacactattggagcagggcttgggtgcacgcctaaatttacttgcccactcacgcccaccggtgccagaatgggatatctcgcaggatccacccaaacacaaggattctgggaccttaaccctcggcctgctgctgaggcccgaagggttgacatcagttttagagctcggtcccgaggcagaccagccagaggccgccaagttccgacagttttggggctcacgcagcgagctgaggcgttttcaggatggagccatcagggaagcggtggtctgggaggccgcttccatgagccagaagagactgataccccaccaagtagttacccaccttctggctttacacgccgatatccccgagacttgcgtacactatgtgggaggaccactcgacgctttaatccagggtttaaaggaggcctcttccaccaagggccggatggttatgagtcggggcggtgaactcgtgatggtccctaacgtagaggctatcctcgaggactttgcagtgctaggggagggtttggtgcagaccgtggaagccaggtccgagcggtggactgtgtag

SEQ ID NO: 238422 - DNA, 3411 bp, Artificial Sequence
  derived and/or modified sequence
ggagttaggcatttccgcccacgtgggaagctatgaggtatagacccggctagaatctgaagtgcgggagagtgctggaccctgagtgatggggccggcgccagctggagagcagcttcgcggagcgactggagagccagaggtgatggaaccagccctggaaggcacaggcaaagaggggaagaaagcatcctccaggaagcgtacattggctgaacctccagcgaagggcctcctgcagccagtgaagctcagcagggcagaactgtacaaggagcctaccaatgaggagcttaatcgccttcgggagactgagatcttgttccactccagcttgcttcgtttacaggtagaggagctactaaaggaagtaaggctgtcagagaagaagaaggatcggattgatgccttcctacgggaggtcaaccagcgggttgtgagggtgccctcagtccctgagacagagctcactgaccaggcatggctcccagctggggttcgagtgcccctccaccaagtgccctatgccgtgaagggctgtttccgcttcctgcccccagcccaggttactgttgtgggcagctaccttctgggcacctgcatccgaccagacatcaatgtggatgtggcactgaccatgcccagggaaatcctacaggacaaggacgggctgaaccagcgctacttccgcaagcgtgccctctacctggcccacttggctcaccacctggcccaggaccccctctttggcagtgtttgcttctcctacacaaatggctgccacctgaaaccctcactgttgctgcggccgcgtggaaaggatgagcgcctggtcactgtacgtctgcatccgtgccctccacctgacttcttccgcccgtgccgcttgctgccaaccaagaacaatgtgcgctctgcctggtaccgagggcagagtcctgcaggggatggtagcccagagcctcctaccccccgctataacacatgggtcctgcaagatacagttctcgagtcccatttgcagctgctgtcaaccattctgagttcagcccagggcctgaaggatggcgtggcacttctgaaggtctggctgcggcagcgggagctggacaagggccagggtgggtttactgggttccttgtctccatgctggttgtcttccttgtgtctacacgcaagatccataccaccatgagtggctaccaggtcctgagaagtgtcttgcagtttctggccactacagacctgacagtcaacgggatcagtttatgtctcagctcagatccctctttgccggccctggctgacttccaccaggccttctccgttgtcttcctggattcctcaggccatctcaacctctgtgctgatgtcactgcctctacttaccaccaggtacagcatgaggcacggctgtctatgatgttgctggacagcagagctgacgacgggttccacctgctgttgatgactcccaaacccatgatccgggcttttgaccatgtcctgcatctccgtccactgagtcgcctgcaggcagcgtgccaccggctgaagctctggccagagctgcaggacaatggtggggactatgtctcagctgctttgggccccctgaccaccctcctggagcagggcctgggggctcggctgaacctgctggctcactctcgacccccagtcccagagtgggacatcagccaagatccaccaaagcacaaagactctgggaccctgaccctgggactccttctccggcctgagggactgaccagcgtccttgagctgggtccagaggcagaccagcctgaggctgctaaattccgccagttctggggatcccgctcggagcttcggcgtttccaggacggagccattcgggaagctgtggtctgggaggcagcctctatgtcccagaagcgccttattccccaccaggtggtcacccacctcttggcactccatgctgacatcccagaaacctgtgtccactatgtggggggccccctggatgcacttatccaaggcctgaaagaggcctccagcacaaaggggcgcatggtgatgtctcgaggtggggagctagtaatggtgcccaatgttgaagcaatcctggaggactttgctgtgctgggtgaaggcctggtgcagactgtggaggcccgaagtgagaggtggactgtgtgatcccagctctggagcaagctgtagacggacagcaggacattggacctctagagcaagatgtcagtaggatgacctccaccctccttggacatgaatcctccatggagggcctgctggctgaacatgctgaatcatctccaacaaaacccagccccaactttctctctgatgctccagcattggggcaggggcatggtggcccatgtagtctcctgggcctcaccatcccagaagaggagtgggagccagctcagagaaggaactgaacccaggagatccatccacctattagccctgggcctggacctccctgcgatttcccactcctttcttagtcttcttccagaaacagagaaggggatgtgtgcctgggagaggctctgtctccttcctgctgccaggacctgtgcctagacttagcatgcccttcactgcagtgtcaggcctttagatgggacccagcgaaaatgtggcccttctgagtcacatcaccgacactgagcagtggaaaggggctatatgtgtatgaatagaccacattgaaggagcacaatgccctcctgtgttgatgccacttcccagggtggagacagtggaaaagaaccgaggacaggaaaggattgggtaggtgaaggggtcaggggactggtagtcacccaatcttggagaggtgcaaaaagcactgggggctacccgttagctgcatctgccctggctgtttgcccgttcatgtcacaaactgccactactatgtacctgcagtggggttgcagagatgggggagactcaagtcttactccccaggagctcccagggcccaaggaggagaatgctgcctcctttcagtctggtctacacccactttctggtagcctctctgcttcctgtaattctggctgtttttccagactcagctcaaatagtgcccctccttaagcccatccctcgcccccagcctgaggtgatctttccctcctctgaactattagagcagttactgtctgttcagttcgtttggcaggcacacacagtggcataaattctattgttttgaactctgatttaaaattaaattgcagctgggcgtggtggcttatgcttgtaatcccaacacttagggagtcaggagaatcacttgagctcaggagttctagaccaatctgggcaacagagagaccccatctcttttaaataaaaagttaaattgcttaatttcccccgta

SEQ ID NO: 238423 - DNA, 2100 bp, Artificial Sequence
  derived and/or modified sequence
atggggcctgcgccagccggagaacaactgcggggagcaactggggagccagaagtgatggagccggctctggagggcaccggtaaagaagggaagaaggcctctagtcggaagcggaccctagccgagcctcccgctaaggggctgctgcaaccggtgaaactgagccgggcagaactgtataaggagcccactaacgaagagctgaatcgcctcagagaaaccgagatcctgtttcattcttccctgttacgccttcaagttgaggagctgctgaaagaagtgaggttgtctgagaagaaaaaggatcggatcgacgcctttttgcgggaggtgaatcagcgcgtcgtaagggtcccttcagtgccggagacggaactaactgaccaggcttggttaccagccggagtgcgagtgccactacatcaggtgccgtacgccgtgaagggttgttttagatttctgccacctgctcaagttaccgtggtgggttcctatttactggggacttgtatcaggcctgatatcaatgtggatgtggcgctcacgatgcccagagaaatcctccaggacaaagatgggctcaatcagagatacttcagaaagcgagcactgtatttggctcatctggcacatcatttagctcaggatccactattcggaagcgtctgtttctcatataccaatggctgtcatcttaaaccttctctgctgctgcggccaagaggcaaggatgaaaggctggtgaccgtgcggctccatccctgccctcccccagattttttccgcccttgtcgtctgttgcccacaaagaataacgtgcgctcagcttggtatcggggtcaaagtccagctggcgacggctcccccgagccgccaacgccaaggtataacacatgggtgcttcaggatactgtgctcgaatctcatctccagctcttgagcaccatcttatcaagtgcccaggggctcaaggatggagttgcgctgctgaaggtgtggctgcgacagagagaactggataagggccagggcggttttacgggatttctggtgagcatgttagtggttttcctggtgagcactagaaaaattcacacgactatgagtgggtaccaggtgttgagatcggtactgcaattcttggccacgacggacttaacagttaacgggatcagtctgtgtctttccagcgatccctccttgcccgctctggccgactttcaccaggcattcagtgtcgtattcctggattcatcaggtcatctcaatttatgcgcagacgtgaccgcaagtacttatcatcaggttcagcatgaggccaggttatctatgatgcttctggatagccgggcagacgacggattccatcttctgctaatgactccaaagccaatgattcgggctttcgatcatgtgctccaccttcggccactcagtcgtcttcaagctgcttgtcatagactaaagctctggcccgagctccaggacaacggcggagactacgtttcagctgctcttgggcctctgacaacacttctcgaacaaggacttggcgctcggttaaacttattagcacatagtcggccaccagttcctgagtgggatataagtcaggacccgccaaaacacaaagactcagggacattgacattggggctgcttctgcgacctgagggcctgacttcagttttggagctgggaccagaagccgatcagccagaggccgcaaaatttcgtcagttttggggctctcggagtgagctgcgtcgctttcaggacggcgcaatcagagaggcggttgtgtgggaagcggcatccatgtcccagaagagactcataccacaccaggtagtgacccatttgctagccctccacgcggacatccccgagacctgcgtgcattacgtgggcggtcctttggacgccttaattcagggactgaaggaggctagctctaccaaaggacgaatggtaatgtcccgcggaggagagctggtgatggtacccaacgtggaagcaatcctcgaagacttcgccgtcctcggcgagggattggtccagactgtagaggctcgaagcgagcggtggaccgtctag

SEQ ID NO: 238424 - DNA, 2100 bp, Artificial Sequence
  derived and/or modified sequence
atgggccccgcccccgccggcgagcagctgagaggcgccaccggcgagcccgaggtgatggagcccgccctggagggcaccggcaaggagggcaagaaggccagcagcagaaagagaaccctggccgagccccccgccaagggcctgctgcagcccgtgaagctgagcagagccgagctgtacaaggagcccaccaacgaggagctgaacagactgagagagaccgagatcctgttccacagcagcctgctgagactgcaggtggaggagctgctgaaggaggtgagactgagcgagaagaagaaggacagaatcgacgccttcctgagagaggtgaaccagagagtggtgagagtgcccagcgtgcccgagaccgagctgaccgaccaggcctggctgcccgccggcgtgagagtgcccctgcaccaggtgccctacgccgtgaagggctgcttcagattcctgccccccgcccaggtgaccgtggtgggcagctacctgctgggcacctgcatcagacccgacatcaacgtggacgtggccctgaccatgcccagagagatcctgcaggacaaggacggcctgaaccagagatacttcagaaagagagccctgtacctggcccacctggcccaccacctggcccaggaccccctgttcggcagcgtgtgcttcagctacaccaacggctgccacctgaagcccagcctgctgctgagacccagaggcaaggacgagagactggtgaccgtgagactgcacccctgccccccccccgacttcttcagaccctgcagactgctgcccaccaagaacaacgtgagaagcgcctggtacagaggccagagccccgccggcgacggcagccccgagccccccacccccagatacaacacctgggtgctgcaggacaccgtgctggagagccacctgcagctgctgagcaccatcctgagcagcgcccagggcctgaaggacggcgtggccctgctgaaggtgtggctgagacagagagagctggacaagggccagggcggcttcaccggcttcctggtgagcatgctggtggtgttcctggtgagcaccagaaagatccacaccaccatgagcggctaccaggtgctgagaagcgtgctgcagttcctggccaccaccgacctgaccgtgaacggcatcagcctgtgcctgagcagcgaccccagcctgcccgccctggccgacttccaccaggccttcagcgtggtgttcctggacagcagcggccacctgaacctgtgcgccgacgtgaccgccagcacctaccaccaggtgcagcacgaggccagactgagcatgatgctgctggacagcagagccgacgacggcttccacctgctgctgatgacccccaagcccatgatcagagccttcgaccacgtgctgcacctgagacccctgagcagactgcaggccgcctgccacagactgaagctgtggcccgagctgcaggacaacggcggcgactacgtgagcgccgccctgggccccctgaccaccctgctggagcagggcctgggcgccagactgaacctgctggcccacagcagaccccccgtgcccgagtgggacatcagccaggacccccccaagcacaaggacagcggcaccctgaccctgggcctgctgctgagacccgagggcctgaccagcgtgctggagctgggccccgaggccgaccagcccgaggccgccaagttcagacagttctggggcagcagaagcgagctgagaagattccaggacggcgccatcagagaggccgtggtgtgggaggccgccagcatgagccagaagagactgatcccccaccaggtggtgacccacctgctggccctgcacgccgacatccccgagacctgcgtgcactacgtgggcggccccctggacgccctgatccagggcctgaaggaggccagcagcaccaagggcagaatggtgatgagcagaggcggcgagctggtgatggtgcccaacgtggaggccatcctggaggacttcgccgtgctgggcgagggcctggtgcagaccgtggaggccagaagcgagagatggaccgtgtag

SEQ ID NO: 238425 - protein, 389 aa, Artificial Sequence
  derived and/or modified sequence
MRVLVRRCWGPPLAHGARRGRPSPQWRALARLGWEDCRDSRVREKPPWRVLFFGTDQFAREALRALHAARENKEEELIDKLEVVTMPSPSPKGLPVKQYAVQSQLPVYEWPDVGSGEYDVGVVASFGRLLNEALILKFPYGILNVHPSCLPRWRGPAPVIHTVLHGDTVTGVTIMQIRPKRFDVGPILKQETVPVPPKSTAKELEAVLSRLGANMLISVLKNLPESLSNGRQQPMEGATYAPKISAGTSCIKWEEQTSEQIFRLYRAIGNIIPLQTLWMANTIKLLDLVEVNSSVLADPKLTGQALIPGSVIYHKQSQILLVYCKDGWIGVRSVMLKKSLTATDFYNGYLHPWYQKNSQAQPSQCRFQTLRLPTKKKQKKTVAMQQCIE

SEQ ID NO: 238426 - DNA, 1170 bp, Artificial Sequence
  derived and/or modified sequence
atgagagtgctggtgagaagatgctggggcccccccctggcccacggcgccagaagaggcagacccagcccccagtggagagccctggccagactgggctgggaggactgcagagacagcagagtgagagagaagcccccctggagagtgctgttcttcggcaccgaccagttcgccagagaggccctgagagccctgcacgccgccagagagaacaaggaggaggagctgatcgacaagctggaggtggtgaccatgcccagccccagccccaagggcctgcccgtgaagcagtacgccgtgcagagccagctgcccgtgtacgagtggcccgacgtgggcagcggcgagtacgacgtgggcgtggtggccagcttcggcagactgctgaacgaggccctgatcctgaagttcccctacggcatcctgaacgtgcaccccagctgcctgcccagatggagaggccccgcccccgtgatccacaccgtgctgcacggcgacaccgtgaccggcgtgaccatcatgcagatcagacccaagagattcgacgtgggccccatcctgaagcaggagaccgtgcccgtgccccccaagagcaccgccaaggagctggaggccgtgctgagcagactgggcgccaacatgctgatcagcgtgctgaagaacctgcccgagagcctgagcaacggcagacagcagcccatggagggcgccacctacgcccccaagatcagcgccggcaccagctgcatcaagtgggaggagcagaccagcgagcagatcttcagactgtacagagccatcggcaacatcatccccctgcagaccctgtggatggccaacaccatcaagctgctggacctggtggaggtgaacagcagcgtgctggccgaccccaagctgaccggccaggccctgatccccggcagcgtgatctaccacaagcagagccagatcctgctggtgtactgcaaggacggctggatcggcgtgagaagcgtgatgctgaagaagagcctgaccgccaccgacttctacaacggctacctgcacccctggtaccagaagaacagccaggcccagcccagccagtgcagattccagaccctgagactgcccaccaagaagaagcagaagaagaccgtggccatgcagcagtgcatcgagtag

SEQ ID NO: 238427 - DNA, 1170 bp, Artificial Sequence
  derived and/or modified sequence
atgagagtcctagttagacggtgttggggtccccctctggcccacggcgcccggcgcgggaggccttccccccagtggagggcgctggcaagattaggttgggaggattgtagggactctcgcgttagagaaaaacccccttggagagttcttttttttggtaccgaccagtttgcgcgtgaggccttgcgggcccttcatgcggcaagagaaaacaaggaagaggagctgattgacaagctggaggtcgtgacaatgcccagtcctagccctaagggcctgccagttaagcagtacgccgtccagtcgcagctgcctgtttacgaatggccggacgttggcagtggcgaatatgacgtgggcgtggtggccagtttcggcagactcctaaacgaagccttgatactgaaattcccatacgggatattgaatgtgcacccttcgtgcctgccacggtggcgcggccccgcacccgttattcatactgtgctccatggggatactgtaaccggagtgacgattatgcagatccggcctaagcggtttgatgttggacccatcctcaagcaagagactgtgccagtgccaccgaaaagcactgccaaagagctggaagcagtgttaagccgacttggcgcgaacatgctgatcagcgtgctgaaaaacctgccagaaagtctctctaacggtcgacagcagccaatggaaggagctacatatgcacctaagatttccgccggaacctcatgcataaagtgggaggaacagacaagcgagcaaatctttcggctatatcgggctatagggaacatcattccactccagacactgtggatggccaatactattaaactgctcgacctggtggaggtcaacagctcagtgctggctgacccaaagctgaccgggcaggcccttatccccggctccgtcatataccataaacaatcccagatacttctggtgtattgcaaagatggttggattggcgttcggtctgtaatgttgaaaaagagcctgaccgcaacggatttctacaatggctacctgcacccgtggtatcagaaaaactcccaagcacagccatcacagtgtaggtttcaaactcttcgccttcccaccaagaaaaagcagaagaaaacagtggctatgcaacagtgcatagagtag

SEQ ID NO: 238428 - DNA, 1170 bp, Artificial Sequence
  derived and/or modified sequence
atgagggtgctggtgcggcgctgctggggcccccccctggcccatggagcccggcggggccggcccagcccccagtggagggccctggcccggctgggctgggaggactgccgggacagccgggtgcgggagaagccaccctggagggtgctcttctttggaacagaccagtttgcccgggaggccctgcgggccctgcacgccgcccgggagaacaaggaggaggagctgattgacaagctggaggtggtgaccatgcccagccccagccccaagggcctgcctgtgaagcagtatgctgtgcagagccagctgcctgtgtatgagtggccagatgtgggcagcggggagtatgatgtgggcgtggtggccagctttggccgcctgctgaatgaggccctgatcctgaagttcccctacggcatcctgaatgtgcaccccagctgcctgccccgctggaggggccctgcccctgtgatccacacagtgctgcatggagacacagtgactggagtgaccatcatgcagatccggcccaagagatttgatgtgggccccatcctgaagcaggagaccgtgcctgtgccccccaagagcacagccaaggagctggaggccgtgctgagccggctgggcgccaacatgctgatctctgtgctgaagaacctgcctgagagcctgagcaatggccggcagcagcccatggagggcgccacctacgcccccaagatctctgctggcaccagctgcatcaagtgggaggagcagaccagcgagcagatcttccggctgtaccgggccatcggcaacatcatccccctgcagaccctgtggatggccaacaccatcaagctgctggacctggtggaggtgaacagctctgtgctggccgaccccaagctgaccggccaggccctgatccctggcagcgtcatctaccacaagcagagccagatcctgctggtgtactgcaaggatggctggattggagtgcgctctgtgatgctgaagaagagcctgacagccacagacttctacaacggctacctgcacccctggtaccagaagaacagccaggcccagcccagccagtgccgcttccagaccctgcggctgcccaccaagaagaagcagaagaagacagtggccatgcagcagtgcatcgagtag

SEQ ID NO: 238429 - DNA, 1170 bp, Artificial Sequence
  derived and/or modified sequence
atgcgggtgctggtgcggcggtgctggggcccccccctggcccacggagccaggcggggacgcccatcaccccagtggcgcgctctcgctcgacttgggtgggaagactgcagggacagtagagtgcgcgaaaaacccccctggcgggtcttgttctttgggaccgaccaatttgcccgcgaagccttgcgggccctccacgcagcacgggaaaataaggaagaagagctcatagataagttggaagtggtgactatgccctccccatccccaaagggtctccctgtgaaacaatatgcggttcagagccagctgccagtttatgagtggccagacgtcgggtcaggggagtatgatgtgggagtggtcgcttcgttcggacgactccttaatgaggcgctgattttaaagtttccctatggtattctgaacgtgcacccaagctgcctgccacggtggagagggcccgctcccgtcatccacaccgttttacacggcgatacagtaaccggcgtgacaataatgcagattcgaccgaagagatttgacgtggggcccatcctgaaacaagagaccgtcccagtccccccaaaatcgactgccaaagagttagaagccgtgttaagccgcctcggagccaacatgcttatcagcgtgcttaagaatctgcccgagtcactgagtaatgggagacaacagcctatggagggagccacatatgccccgaaaatttcagccggtaccagttgcataaagtgggaggaacagaccagtgaacaaatcttcaggttatacagggctattggtaatattattccactgcagactctgtggatggccaacacaattaagttgctggatcttgtggaagtgaattcatcagttctggcagaccctaaactaacagggcaggctcttatccctggttctgtgatttaccacaaacagtcgcagatcctcctggtgtactgtaaggacggttggattggtgtccgttctgtgatgcttaagaaatcgctaacggccacagatttctacaatgggtacttacacccctggtaccagaaaaattcccaagcccagccatcccagtgccggtttcagacactccgcctacctaccaaaaaaaaacaaaaaaagactgttgccatgcagcagtgtattgagtag

SEQ ID NO: 238430 - DNA, 1170 bp, Artificial Sequence
  derived and/or modified sequence
atgcgcgtgctcgtgagaaggtgttggggcccaccacttgcacacggagcacgaaggggtcgaccttctcctcaatggcgcgctcttgctaggctgggctgggaagattgtcgggattcgcgtgttagagagaaacccccatggagagtcctatttttcgggacagatcagtttgccagggaggccctccgagccctgcatgcagcaagggaaaacaaagaagaggagctcatcgataagcttgaggtggtaacaatgccaagcccgtcacctaagggactcccagttaagcagtacgctgtccagtcccagctccccgtttacgaatggccagacgtaggatccggcgaatatgacgtgggagtggtcgcatctttcggtagactgctgaacgaagccttaatcctgaagttcccctacggaattcttaatgtgcatccttcctgtctgccccgatggcggggaccagcgccagtcatacatactgtgctgcacggggacactgtcacgggggtcacaatcatgcagataaggcccaaaagatttgatgtgggtcccattttgaagcaggagacagtccctgttcctcctaaatcgacagctaaagagctggaggccgttttgagtagactcggggctaacatgctgatcagcgtgcttaagaacctccccgagtccctgtctaacggtcggcaacagcctatggagggcgcaacttacgcacctaagattagcgcaggaacctcgtgtattaaatgggaggaacagaccagtgaacagattttccgactgtacagagcaatcggaaacatcattcccctgcagaccctgtggatggctaatacgatcaagctgctggatcttgtggaggtgaatagctccgttctagcagaccccaagttgacaggccaagctctgatccccggaagtgttatataccataaacaatctcaaatccttctggtgtactgtaaggatgggtggatcggcgtgcgaagcgtgatgctgaaaaaatccctcactgcgacagatttttacaatggctatctacatccctggtatcaaaagaactctcaggctcaaccctcacagtgccgattccagaccttgaggttacccacaaagaagaaacaaaagaagacagtagcaatgcagcagtgcatcgagtag

SEQ ID NO: 238431 - DNA, 1170 bp, Artificial Sequence
  derived and/or modified sequence
atgcgcgtacttgtgagaaggtgttggggccctccgctggctcacggagctagaagaggacggccttccccccagtggagggcactggctagactggggtgggaagactgccgggattcccgtgtccgggagaaacctccctggcgggtcctttttttcgggacggaccagttcgcaagagaagccctgagggctttgcacgccgctcgggagaacaaggaagaagaactcatagacaagctggaagtggtcacaatgcccagcccgagcccgaaaggactccctgtgaagcagtacgcggtacagtctcaactgccagtctacgagtggccagacgttggctctggcgagtacgatgtgggagtagttgcatcctttggcaggctactgaacgaagcactaatcctgaagtttccttacggcatcctgaacgtgcacccttcttgtttgccccgctggcggggtcccgcccctgttattcacaccgtactgcatggcgataccgtcaccggggtgaccattatgcagatccgccccaaacggtttgatgtgggccccatcctcaagcaagagacagtccctgttccccccaagtctacagccaaagagctggaagcggtcctgtccaggctaggagcaaatatgttgatttctgtgctgaaaaatcttcccgaaagcctgtctaacggcaggcagcaacccatggaaggggccacgtatgcgcctaaaatctccgccggaacgtcgtgcatcaagtgggaagaacagacatccgagcaaattttcagactgtacagggctatcggcaatatcattcctctgcagaccctatggatggccaataccattaaattgctcgatctcgtcgaagtgaacagctccgtcttggctgacccaaaacttacgggccaggcactcatcccaggatcagtcatctatcataagcagagccagattttgttggtatactgcaaagatgggtggattggagtgcggagtgtcatgctgaagaagagcctcaccgcaactgacttctataacgggtatcttcacccttggtaccagaagaatagccaagcgcaaccgagtcaatgcagattccagacattgagactgcccacaaaaaagaaacaaaagaagactgtggcgatgcagcagtgtatcgaatag

SEQ ID NO: 238432 - DNA, 1739 bp, Artificial Sequence
  derived and/or modified sequence
cggcggccgaggcgatgagggtgttggtgcggcgctgttggggtcctccgctggctcatggcgccaggcgtgggaggccgagtccccagtggcgagcactggcccgactcggctgggaggactgccgggactccagagtccgcgagaagcctccctggcgggtgctcttcttcggcacggaccagttcgcccgcgaggcgctgcgggcgctgcacgccgccagggaaaacaaagaagaagagttaatcgacaaactggaggtggtcacaatgccttccccatcaccaaaaggactgccagtgaagcaatatgctgtgcagtctcagcttcccgtatatgagtggccggatgtgggatctggagaatatgatgttggagtagtggcttcgtttggccgacttttgaatgaggctcttattcttaaatttccctatggcatattgaatgttcatcccagttgcctcccgagatggcgtggcccagcccctgtaatccatacagtgcttcacggagacacagttactggagtaacaattatgcaaattagacctaaaaggtttgatgtaggcccaattctcaaacaagaaactgttcctgtgccacccaagagcactgcaaaggaattggaagcagtgttgtcaagactgggtgccaacatgctcatttcagttttgaaaaatttgcctgaaagtctgagcaatggaaggcagcagccaatggagggggcgacttacgcccctaagatttctgctggtaccagttgtataaaatgggaggaacaaacttcagaacaaatattcagactttaccgtgccattggaaatataattccgttgcagacgctctggatggcgaataccattaaacttctggatttggtagaagttaacagttcagtccttgctgatccaaaattaacgggacaggctcttattccaggatcagtaatataccacaaacagtcacaaatactattggtttattgcaaggatggttggattggtgttcgatcagtgatgctcaagaaatcactaacagctactgacttctacaatggatatttgcacccctggtaccagaaaaattcccaagctcaaccaagccaatgcagatttcagactctcagacttccaacaaagaagaagcagaaaaaaactgttgctatgcaacaatgcattgagtagttaggaagaagatggataaaaacctattacatatttgtaatttattaaaaaccttatttacaaggaattatctggacttttttttttttttttttttttgagacagagtctcactctgtcacccaggctggaatccagtggcactatctcagctcactgcaacctccgcctcccaggttcaagcaattctcctgcctcagcctcctgagtagctgggattacaggcacacgccaccacacgcagctaatttttgtatttttagtagagatggggtttcaccatgttggtcaggctggtctcgaactcctgaccttgtgatctgcccacctcagcctcccaaagtgctatgattacagacgtgagccaccgtgcctggcctggaattatctggactttcaaagaagatggcattattataagaagagaagattattgccgaaaagatggattgcctcactttccactttttatgtaacagtagttaaaaaacagctttttttttacttgaattacaaaaaagtttaaataaaacttgtatttatgatacgaaactc

SEQ ID NO: 238433 - DNA, 1522 bp, Artificial Sequence
  derived and/or modified sequence
gcgatgagggtgttggtgcggcgctgttggggtcctccgctggctcatggcgccaggcgtgggaggccgagtccccagtggcgagcactggcccgactcggctgggaggactgccgggactccagagtccgcgagaagcctccctggcgggtgctcttcttcggcacggaccagttcgcccgcgaggcgctgcgggcgctgcacgccgccagggaaaacaaagaagaagagttaatcgacaaactggaggtggtcacaatgccttccccatcaccaaaaggactgccagtgaagcaatatgctgtgcagtctcagcttcccgtatatgagtggccggatgtgggatctggagaatatgatgttggagtagtggcttcgtttggccgacttttgaatgaggctcttattcttaaatttccctatggcatattgaatgttcatcccagttgcctcccgagatggcgtggcccagcccctgtaatccatacagtgcttcacggagacacagttactggagtaacaattatgcaaattagacctaaaaggtttgatgtaggcccaattctcaaacaagaaactgttcctgtgccacccaagagcactgcaaaggaattggaagcagtgttgtcaagactgggtgccaacatgctcatttcagttttgaaaaatttgcctgaaagtctgagcaatggaaggcagcagccaatggagggggcgacttacgcccctaagatttctgctggtaccagttgtataaaatgggaggaacaaacttcagaacaaatattcagactttaccgtgccattggaaatataattccgttgcagacgctctggatggcgaataccattaaacttctggatttggtagaagttaacagttcagtccttgctgatccaaaattaacgggacaggctcttattccaggatcagtaatataccacaaacagtcacaaatactattggtttattgcaaggatggttggattggtgttcgatcagtgatgctcaagaaatcactaacagctactgacttctacaatggatatttgcacccctggtaccagaaaaattcccaagctcaaccaagccaatgcagatttcagactctcagacttccaacaaagaagaagcagaaaaaaactgttgctatgcaacaatgcattgagtagttaggaagaagatggataaaaacctattacatatttgtaatttattaaaaaccttatttacaaggaattatctggacttttttttttttttttttttttgagacagagtctcactctgtcacccaggctggaatccagtggcactatctcagctcactgcaacctccgcctcccaggttcaagcaattctcctgcctcagcctcctgatgctatgattacagacgtgagccaccgtgcctggcctggaattatctggactttcaaagaagatggcattattataagaagagaagattattgccgaaaagatggattgcctcactttccactttttatgtaacagtagtt

SEQ ID NO: 238434 - DNA, 1170 bp, Artificial Sequence
  derived and/or modified sequence
atgcgggtgctggtgcggcggtgctggggcccccccctggcccacggcgctcgaaggggtcggccctcccctcagtggcgggcgctagcaagactgggctgggaggactgtcgcgatagcagagtgagggagaaaccaccctggcgggtcctgttcttcgggaccgaccagtttgctcgcgaggccctgcgagccctgcacgcggctagagaaaacaaagaagaggaactcatcgacaaactcgaagtcgtcacaatgccctcacccagccctaaggggctgcccgttaagcagtacgccgtgcaatcacaactgccggtttacgaatggcccgacgttggctccggggaatacgatgtgggcgtggtcgccagcttcggccgcctcttgaacgaagccctcatcctcaagttcccgtatggcattctgaatgttcatccatcgtgtcttcccaggtggagaggtcctgcaccagttatacacaccgtgttgcacggggacactgtgaccggcgtcacaatcatgcagatccgacctaagcgatttgatgtgggaccaatcctcaagcaggaaacagtacccgtgcctccaaagagtacagccaaggaactggaggcagttctgtctcgcctgggagccaatatgttgatcagcgtgctgaaaaatttaccagaatctctgtctaatggccgacagcaaccgatggagggagccacgtatgccccgaaaatctcagcaggaacctcatgcataaaatgggaggagcagaccagcgagcagatctttcggttgtatcgggctattggaaatatcatcccactgcagactctgtggatggcaaacacgatcaagctgttagatcttgtggaggtgaatagttctgtgctcgccgatccaaagctgaccggccaggcgttaatccccgggtccgtgatatatcacaaacaatctcaaattctgctggtgtattgcaaggatgggtggatcggtgttcgaagtgtcatgctgaaaaagagcttgactgcaactgacttttataacggttacctgcacccttggtaccagaagaatagccaggcccagcccagtcagtgcaggtttcagacgctgagattgccaacgaagaagaagcagaaaaagaccgtggccatgcaacagtgcattgagtag

SEQ ID NO: 238435 - DNA, 1170 bp, Artificial Sequence
  derived and/or modified sequence
atgcgtgtgcttgtaaggcggtgctggggaccaccactcgcacatggagcccgtcggggaagaccctcgccccagtggagggccctggcaagactcggctgggaggactgtcgggattccagggtgcgcgagaagcctccctggcgagtgctgttcttcggaaccgaccagttcgcgcgtgaggccctgcgcgcactacacgcagctagggaaaacaaggaggaggaactgatagataaactagaagtggtgacaatgcctagcccttctcctaaaggtcttcccgttaaacagtacgccgtgcagtctcagctgcctgtgtacgagtggccagacgttgggtctggcgagtacgatgtgggtgtcgttgcctcttttgggaggttactcaatgaggccttaatcttgaagttcccttacggaattctgaacgttcacccaagctgcctgccgagatggcgagggccagcacctgtcattcacacggtccttcatggcgacaccgtcacaggagtaactattatgcagatacggcctaagcggtttgacgtgggacccatcttgaagcaggagacagtgcctgtccctcctaaaagcacagcaaaagagctggaggccgtgttgtcccgtctcggagcaaatatgctgatcagtgtccttaaaaacctgcccgagagtttaagtaatggccgtcagcagcccatggagggcgctacatatgctcccaaaatcagcgccggtacctcatgcatcaagtgggaggagcagacatctgagcagatattccgcctgtaccgggcaattggaaatatcataccactgcagaccttgtggatggcaaataccatcaaactgctggatctggtggaagtcaacagttccgttctggccgacccgaagctgacaggacaggctttgattccaggcagcgtgatctaccacaaacagtctcagatacttctcgtgtactgcaaggatggttggattggtgtcagaagcgtaatgctgaaaaagagtctaacggccactgacttttataacggctacctccacccatggtaccagaagaactctcaggcgcagcccagtcagtgccgcttccagacactgcgcttgcccactaagaaaaagcagaaaaagactgtggcaatgcagcagtgcatcgaatag

SEQ ID NO: 238436 - protein, 576 aa, Artificial Sequence
  derived and/or modified sequence
MASNNHWFQSSQVPSFAQMLKKNLPVQPATKTITTPTGWSSESYGLSKMASKVTQVTGNFPEPLLSKNLSSISNPVLPPKKIPKEFIMKYKRGEINPVSALHQFAQMQRVQLDLKETVTTGNVMGPYFAFCAVVDGIQYKTGLGQNKKESRSNAAKLALDELLQLDEPEPRILETSGPPPFPAEPVVLSELAYVSKVHYEGRHIQYAKISQIVKERFNQLISNRSEYLKYSSSLAAFIIERAGQHEVVAIGTGEYNYSQDIKPDGRVLHDTHAVVTARRSLLRYFYRQLLLFYSKNPAMMEKSIFCTEPTSNLLTLKQNINICLYMNQLPKGSAQIKSQLRLNPHSISAFEANEELCLHVAVEGKIYLTVYCPKDGVNRISSMSSSDKLTRWEVLGVQGALLSHFIQPVYISSILIGDGNCSDTRGLEIAIKQRVDDALTSKLPMFYLVNRPHISLVPSAYPLQMNLEYKFLSLNWAQGDVSLEIVDGLSGKITESSPFKSGMSMASRLCKAAMLSRFNLLAKEAKKELLEAGTYHAAKCMSASYQEAKCKLKSYLQQHGYGSWIVKSPCIEQFNM

SEQ ID NO: 238437 - DNA, 1731 bp, Artificial Sequence
  derived and/or modified sequence
atggcttctaacaatcactggttccagagttcgcaggtccccagctttgcccagatgttgaagaagaaccttccagtgcagccagccaccaaaacaatcacaaccccaacggggtggtctagtgagtcttatggtttaagcaaaatggcgagcaaggtaactcaagtgaccgggaactttcccgaacctcttttaagcaagaatctttcatccatcagcaaccccgttttgccacccaagaagatacccaaggagttcattatgaagtacaagcgtggtgagatcaacccagtatccgcactccaccaatttgcccaaatgcagagagtccaactggacctgaaagaaactgtgacaacagggaatgtcatgggcccgtattttgctttctgcgccgttgttgacgggattcagtataaaacgggccttggtcagaataaaaaggagtcaagaagcaacgccgccaaactggccctggatgaacttcttcagctggacgagcccgagccaagaattctggaaacttcagggccacccccatttcctgcagaacctgtggtcctgtcagaactcgcctacgtcagtaaggtccattacgagggcagacacatccaatatgccaaaatcagccagattgttaaagaacgttttaaccaactgatcagtaatcggagcgaataccttaagtactccagctccctggctgcattcatcatcgagagagccgggcagcatgaagtggtcgctattggcaccggtgagtataattattctcaggatataaaaccagatggacgtgtcttgcatgatactcacgccgtagtcacagcccgccgatctctgctgcgctacttttacagacagctactattgttctactccaaaaatccagccatgatggagaaatcaatcttctgcacagaaccaaccagtaatctgttgacgttgaagcagaatatcaatatttgcctctacatgaatcagctgccaaaaggaagtgcacagatcaaatcgcagctgcggttgaatccacactctatttcagcattcgaggccaacgaagagctgtgcttgcatgtggccgttgagggcaaaatttatctgaccgtttactgtcctaaggacggtgtgaatcggatctcctcgatgtcgagttccgacaagctgacacggtgggaagtgcttggcgtccaaggcgccctgcttagccacttcatccagccagtgtatatctcctccatcctgataggagatggtaattgctcagatacaaggggtctggagatcgctatcaagcagagagtggacgacgccttaacgagcaagctgcctatgttttatttggtaaaccgcccacatatcagcctagttccttcagcctatcctctccagatgaacttggagtacaaattcctctctctgaactgggctcagggagatgtaagtttggaaatcgtggacgggctctctgggaagattaccgagagcagtccctttaagtctggcatgagcatggcttctcgactgtgcaaggctgcaatgctgtcccgattcaatctgctggcaaaagaggccaaaaaggagctgctggaggccggtacctaccatgctgccaagtgcatgagtgcttcatatcaagaagctaagtgcaagctgaagtcttatctccaacagcacggttacggttcatggatagtgaaaagtccttgcatcgaacagtttaatatgtag

SEQ ID NO: 238438 - DNA, 1961 bp, Artificial Sequence
  derived and/or modified sequence
aaacaggaaggccacagtggaggccaagccttccccatgggcaccttctcagattgcgattgtggatgaaatgagggattttcttgaaacaaccctcacgcaggtgacgcaagacgcggagctcggctgcacgacgctggcgcaagcgcgggggcaagagcgccggcctccgagacggtgagaaaatggctagcaacaatcattggtttcagagttcgcaggtccccagctttgcccagatgctgaaaaagaacctgccagttcaaccagcgacaaagacgataactacacccacaggatggtcctcagaaagttacggcctgtccaagatggcatccaaggttacgcaagtaacgggtaattttccagagccgttgctttccaagaatctttcatctatttcaaatcctgtccttcctccaaaaaaaatacctaaggaatttataatgaaatacaaacgtggagagataaatcctgtgtcagccttgcaccagtttgcacaaatgcagcgagttcagcttgaccttaaggaaactgtgacaacaggtaatgttatgggaccatattttgccttttgtgctgtggtggatggtattcagtacaagactggactgggacaaaataaaaaggagtctagatccaatgcagcaaaattagctcttgatgagcttctacaactggatgaacctgaaccacgaattttagaaacatcaggtcctcctcctttccctgcagaacctgttgttttatctgaactagcatatgtttcaaaagtacattatgaagggagacatattcaatatgcaaagatttcacagatcgttaaagaaagatttaatcaactaatttctaatcgttcagaatacctgaaatatagcagttcattggctgcttttataattgaaagagctggacaacatgaggttgtagctataggcacaggtgaatacaattacagccaggacattaagccagatggaagagtattgcatgacactcatgctgttgttacagcaagaaggtctcttcttaggtacttttatagacaacttctgctcttctacagcaaaaatcctgctatgatggaaaaatcaatattttgtacagaaccaacttctaatctactcactcttaaacagaatatcaacatttgcctttacatgaaccagttgcctaaaggatcagcccagattaagtcacagttacgtcttaatccacattctatatctgcatttgaagccaatgaagaactctgtctccacgtggctgttgaaggcaaaatttatctgactgtttactgtcctaaagatggtgttaatagaataagcagtatgtcctcaagtgacaaattgaccagatgggaagtgcttggtgtacagggagcattgctgagtcattttatacagccagtttacatcagcagtatacttattggtgatgggaattgcagtgataccagaggcttagaaatcgctataaagcaacgtgttgatgatgcactcacttcaaaacttccaatgttttacttagtcaacagacctcatattagtttagtaccctctgcatatccccttcaaatgaacttggaatataaatttctgagtctgaattgggcacaaggagatgtttctttggagattgtggatggcctgagtgggaagatcactgaaagttccccatttaaaagtggtatgtcaatggcaagtcggctttgtaaggctgcaatgttaagtcggtttaacctgcttgccaaagaagctaaaaaagaattacttgaagctggtacatatcatgcagctaagtgtatgtctgcctcctatcaagaagctaaatgtaagttgaaatcctacttacaacaacatggctatggatcctggattgtgaaatctccctgcatagagcaatttaacatgtgaaataggcaatccattatcacattaaaaatcttgttttgtttggtg

SEQ ID NO: 238439 - DNA, 1918 bp, Artificial Sequence
  derived and/or modified sequence
ttgaaagatgcggccctgaccctgtgaacctcgcgcagagcggcctgaagcgagaggttgaggctgggaggtgggagcaacggcggcggcggccgcctgcgagcccccggcctgaggcgcagcagcagctgcccgtcttcccacatagagggcaggaaggacaactttgagttcgcaggtccccagctttgcccagatgctgaaaaagaacctgccagttcaaccagcgacaaagacgataactacacccacaggatggtcctcagaaagttacggcctgtccaagatggcatccaaggttacgcaagtaacgggtaattttccagagccgttgctttccaagaatctttcatctatttcaaatcctgtccttcctccaaaaaaaatacctaaggaatttataatgaaatacaaacgtggagagataaatcctgtgtcagccttgcaccagtttgcacaaatgcagcgagttcagcttgaccttaaggaaactgtgacaacaggtaatgttatgggaccatattttgccttttgtgctgtggtggatggtattcagtacaagactggactgggacaaaataaaaaggagtctagatccaatgcagcaaaattagctcttgatgagcttctacaactggatgaacctgaaccacgaattttagaaacatcaggtcctcctcctttccctgcagaacctgttgttttatctgaactagcatatgtttcaaaagtacattatgaagggagacatattcaatatgcaaagatttcacagatcgttaaagaaagatttaatcaactaatttctaatcgttcagaatacctgaaatatagcagttcattggctgcttttataattgaaagagctggacaacatgaggttgtagctataggcacaggtgaatacaattacagccaggacattaagccagatggaagagtattgcatgacactcatgctgttgttacagcaagaaggtctcttcttaggtacttttatagacaacttctgctcttctacagcaaaaatcctgctatgatggaaaaatcaatattttgtacagaaccaacttctaatctactcactcttaaacagaatatcaacatttgcctttacatgaaccagttgcctaaaggatcagcccagattaagtcacagttacgtcttaatccacattctatatctgcatttgaagccaatgaagaactctgtctccacgtggctgttgaaggcaaaatttatctgactgtttactgtcctaaagatggtgttaatagaataagcagtatgtcctcaagtgacaaattgaccagatgggaagtgcttggtgtacagggagcattgctgagtcattttatacagccagtttacatcagcagtatacttattggtgatgggaattgcagtgataccagaggcttagaaatcgctataaagcaacgtgttgatgatgcactcacttcaaaacttccaatgttttacttagtcaacagacctcatattagtttagtaccctctgcatatccccttcaaatgaacttggaatataaatttctgagtctgaattgggcacaaggagatgtttctttggagattgtggatggcctgagtgggaagatcactgaaagttccccatttaaaagtggtatgtcaatggcaagtcggctttgtaaggctgcaatgttaagtcggtttaacctgcttgccaaagaagctaaaaaagaattacttgaagctggtacatatcatgcagctaagtgtatgtctgcctcctatcaagaagctaaatgtaagttgaaatcctacttacaacaacatggctatggatcctggattgtgaaatctccctgcatagagcaatttaacatgtgaaataggcaatccattatcacattaaaaatcttgttttgtttggtg

SEQ ID NO: 238440 - DNA, 1731 bp, Artificial Sequence
  derived and/or modified sequence
atggccagcaacaaccactggttccagagcagccaggtgcccagctttgcccagatgctgaagaagaacctgcctgtgcagcctgccaccaagaccatcaccacccccaccggctggagcagcgagagctatggcctgagcaagatggccagcaaggtgacccaggtgactggaaacttccctgagcccctgctgagcaagaacctgagcagcatcagcaaccctgtgctgccccccaagaagatccccaaggagttcatcatgaagtacaagagaggagagatcaaccctgtgtctgccctgcaccagtttgcccagatgcagagggtgcagctggacctgaaggagaccgtgaccactggaaatgtgatgggcccctactttgccttctgtgctgtggtggatggcatccagtacaagacaggcctgggccagaacaagaaggagagccgcagcaatgctgccaagctggccctggatgagctgctgcagctggatgagcctgagccccgcatcctggagaccagcggccccccacccttccctgctgagcctgtggtgctgtctgagctggcctacgtgtccaaggtgcactatgagggccgccacatccagtatgccaagatcagccagatcgtgaaggagcgcttcaaccagctgatcagcaacagaagtgagtacctgaagtacagcagcagcctggccgccttcatcatcgagcgggccggccagcacgaggtggtggccatcggcaccggggagtacaactacagccaggacatcaagccagatggccgggtgctgcatgacacccatgctgtggtgacagcccggcgcagcctgctgcgctacttctaccggcagctgctgctcttctacagcaagaacccagccatgatggagaagagcatcttctgcacagagcccaccagcaacctgctgaccctgaagcagaacatcaacatctgcctgtacatgaaccagctgcccaagggcagcgcccagatcaagagccagctgcggctgaacccccacagcatcagcgcctttgaggccaatgaggagctgtgcctgcacgtggccgtggagggcaagatctacctgactgtgtactgccccaaggatggagtgaaccgcatcagctccatgagcagcagtgacaagctgacccgctgggaggtgctgggcgtgcagggcgccctgctgagccacttcatccagcctgtgtacatcagcagcatcctgattggagatggcaactgcagcgacacccggggcctggagatcgccatcaagcagagggtggatgatgccctgaccagcaagctgcccatgttctacctggtgaaccggccccacatcagcctggtgcccagcgcctaccccctgcagatgaacctggagtacaagttcctgagcctgaactgggcccagggagatgtgtccctggagatcgtggatggcctgagcggcaagatcacagagagcagccccttcaagagcggcatgtccatggccagccggctgtgcaaggccgccatgctgagccgcttcaacctgctggccaaggaggccaagaaggagctgctggaggccggcacctaccacgccgccaagtgcatgtctgccagctaccaggaggccaagtgcaagctgaagagctacctgcagcagcacggctacggctcctggatcgtgaagagcccctgcatcgagcagttcaacatgtag

SEQ ID NO: 238441 - DNA, 1731 bp, Artificial Sequence
  derived and/or modified sequence
atggccagcaacaaccactggttccagagcagccaggtgcccagctttgcccagatgctgaaaaaaaatctacctgtccaaccagccactaagactataacaacccctacaggatggtcctctgagagttacgggctgtcaaaaatggctagcaaagtgacacaggtcactgggaacttcccggagccactgttatccaaaaatttgtctagcatctctaaccccgtgcttccacctaaaaaaatccccaaggagtttattatgaaatataaaagaggagagatcaatccagtgagcgctctgcaccagtttgctcagatgcagagagtgcagctggatctgaaagaaaccgtgaccactgggaacgtaatgggaccatattttgctttctgcgcggtagtcgatggaatccagtacaaaacaggtctcggccagaataagaaggagtctcgttccaacgcggctaagctagcacttgacgaactgttgcagttagatgaaccagaacctcgaatactggagacaagcggtccgccaccttttcccgcagagccagtggtgttgtcagaactcgcctacgtgtccaaggtccactatgaggggcgccacatacaatacgcaaaaatatcacagatcgtgaaggaaagatttaatcagcttatcagcaaccgttccgaataccttaaatattcaagctccctggccgctttcatcatagaacgggctggacagcacgaggtggtcgccatcgggacaggtgagtacaattacagccaagacattaagcctgacggccgagttcttcatgatactcacgctgtggtcacagcaagacggtctttgctgcggtacttctataggcagctactgctgttctactcaaagaacccagccatgatggagaaatcgatattttgcaccgaacctacgtccaaccttctaactctgaaacagaatataaacatttgtctgtacatgaatcagcttccgaagggcagcgctcagattaagtcccagctccgcctgaacccacatagcatctccgcatttgaagccaatgaggaactgtgtctgcatgtagcggtcgaagggaagatatacctgaccgtttactgcccaaaggacggagttaatcgcatttcaagcatgtcctcatccgataaactgacaagatgggaagtactcggggtgcaaggcgccctgctcagccactttattcagcctgtctacatcagcagtattctcattggggacggcaactgtagtgacactcggggactggaaatcgccattaaacagcgcgttgacgacgccttaacgagtaagttgccgatgttttacctcgtgaacagaccacatatcagcctcgtcccgtcagcataccccctgcagatgaatctggaatataagttcctgagcctgaattgggctcagggcgacgtgtcccttgaaattgttgacgggctgtccggaaagattactgaatcttcaccctttaaatccggaatgtccatggcaagcagattgtgtaaggccgccatgctgtccaggtttaaccttttagctaaagaggccaaaaaggagctactcgaagctggaacgtatcacgccgccaagtgcatgagtgccagctatcaggaggccaagtgcaaactgaagtcctaccttcaacagcacggttacggctcctggatcgtgaagtctccctgcatcgagcagttcaacatgtag

SEQ ID NO: 238442 - DNA, 1731 bp, Artificial Sequence
  derived and/or modified sequence
atggcaagtaataaccactggttccagagctctcaggtacctagttttgctcaaatgcttaagaaaaatctgccagttcagccagctacaaaaaccatcaccacaccaaccgggtggagttctgaaagttatggcctgtctaagatggcctcgaaggtcacccaggtgacagggaactttcctgagccgctgctgtccaagaacctctcttccataagcaaccccgtattgcctcctaagaaaatccccaaggagtttattatgaagtacaagcggggagagatcaaccctgtttcagcgctccaccagttcgcccagatgcagcgcgtgcagctcgacttgaaggaaaccgtgactacaggaaatgtgatgggcccatattttgcattctgcgccgtcgtagatggtatccagtacaagacaggcttaggacaaaataaaaaggagtcacgatctaatgcggctaaacttgcactcgacgaactcctacagctggacgaaccagaacccagaatcctcgaaacttcaggcccacctccattcccagcggagcctgtcgtgctcagtgagttggcctatgtctctaaagttcattacgaaggaagacacatacaatatgccaaaatcagccagatcgtaaaagaacggtttaatcaactgatttctaataggtctgagtacctgaagtactcctcttctctggccgcttttataatcgagagagcaggtcaacatgaggtcgtggccatcggaacaggggaatataactactctcaggacattaagcctgacggcagggtgctgcacgatacccacgccgtggtaaccgcgagacgctctttactgcgctacttctaccgacagcttctcctgttctattcaaaaaaccccgctatgatggaaaaatccattttttgtaccgagcctacatccaatcttctgacgcttaagcaaaacatcaacatctgcctatacatgaaccaactgccgaaaggaagcgctcaaataaaaagccagttgaggctcaacccccattccattagtgctttcgaagctaatgaggagttgtgtctgcatgtcgccgtggagggaaagatctatctgacggtatactgcccgaaggatggcgtgaatcgaatatcaagcatgagttcaagcgacaaactcaccagatgggaggttctcggcgttcagggggcactcttgagtcactttatacaaccggtttatatatccagcattctgattggggacggcaactgcagcgatactaggggactggaaatcgctattaagcagcgtgtggatgacgcgctgacgagcaagctgcctatgttctacttagtgaatcggccacacatcagcctggtgcctagcgcatatcccctccaaatgaaccttgagtacaagtttcttagtctgaactgggctcagggggacgtgagtcttgagatcgtggatggactatccggcaaaatcacagaatctagtcccttcaaaagcggaatgtcaatggcctcaaggttgtgcaaggccgctatgctgtctcgctttaatctccttgccaaggaggccaagaaagaactgctggaagcgggaacgtatcatgccgctaaatgtatgtcggctagttatcaggaggccaaatgcaagcttaaatcttacttacagcagcacggatacgggtcttggatcgtgaaatctccctgcattgagcagtttaacatgtag

SEQ ID NO: 238443 - DNA, 1731 bp, Artificial Sequence
  derived and/or modified sequence
atggccagcaacaaccactggttccagagcagccaggtgcccagcttcgcccagatgctgaagaagaacctgcccgtgcagcccgccaccaagaccatcaccacccccaccggctggagcagcgagagctacggcctgagcaagatggccagcaaggtgacccaggtgaccggcaacttccccgagcccctgctgagcaagaacctgagcagcatcagcaaccccgtgctgccccccaagaagatccccaaggagttcatcatgaagtacaagagaggcgagatcaaccccgtgagcgccctgcaccagttcgcccagatgcagagagtgcagctggacctgaaggagaccgtgaccaccggcaacgtgatgggcccctacttcgccttctgcgccgtggtggacggcatccagtacaagaccggcctgggccagaacaagaaggagagcagaagcaacgccgccaagctggccctggacgagctgctgcagctggacgagcccgagcccagaatcctggagaccagcggccccccccccttccccgccgagcccgtggtgctgagcgagctggcctacgtgagcaaggtgcactacgagggcagacacatccagtacgccaagatcagccagatcgtgaaggagagattcaaccagctgatcagcaacagaagcgagtacctgaagtacagcagcagcctggccgccttcatcatcgagagagccggccagcacgaggtggtggccatcggcaccggcgagtacaactacagccaggacatcaagcccgacggcagagtgctgcacgacacccacgccgtggtgaccgccagaagaagcctgctgagatacttctacagacagctgctgctgttctacagcaagaaccccgccatgatggagaagagcatcttctgcaccgagcccaccagcaacctgctgaccctgaagcagaacatcaacatctgcctgtacatgaaccagctgcccaagggcagcgcccagatcaagagccagctgagactgaacccccacagcatcagcgccttcgaggccaacgaggagctgtgcctgcacgtggccgtggagggcaagatctacctgaccgtgtactgccccaaggacggcgtgaacagaatcagcagcatgagcagcagcgacaagctgaccagatgggaggtgctgggcgtgcagggcgccctgctgagccacttcatccagcccgtgtacatcagcagcatcctgatcggcgacggcaactgcagcgacaccagaggcctggagatcgccatcaagcagagagtggacgacgccctgaccagcaagctgcccatgttctacctggtgaacagaccccacatcagcctggtgcccagcgcctaccccctgcagatgaacctggagtacaagttcctgagcctgaactgggcccagggcgacgtgagcctggagatcgtggacggcctgagcggcaagatcaccgagagcagccccttcaagagcggcatgagcatggccagcagactgtgcaaggccgccatgctgagcagattcaacctgctggccaaggaggccaagaaggagctgctggaggccggcacctaccacgccgccaagtgcatgagcgccagctaccaggaggccaagtgcaagctgaagagctacctgcagcagcacggctacggcagctggatcgtgaagagcccctgcatcgagcagttcaacatgtag

SEQ ID NO: 238444 - protein, 1098 aa, Artificial Sequence
  derived and/or modified sequence
MRKFNIRKVLDGLTAGSSSASQQQQQQHPPGNREPEIQETLQSEHFQLCKTVRHGFPYQPSALAFDPVQKILAVGTQTGALRLFGRPGVECYCQHDSGAAVIQLQFLINEGALVSALADDTLHLWNLRQKRPAILHSLKFCRERVTFCHLPFQSKWLYVGTERGNIHIVNVESFTLSGYVIMWNKAIELSSKSHPGPVVHISDNPMDEGKLLIGFESGTVVLWDLKSKKADYRYTYDEAIHSVAWHHEGKQFICSHSDGTLTIWNVRSPAKPVQTITPHGKQLKDGKKPEPCKPILKVEFKTTRSGEPFIILSGGLSYDTVGRRPCLTVMHGKSTAVLEMDYSIVDFLTLCETPYPNDFQEPYAVVVLLEKDLVLIDLAQNGYPIFENPYPLSIHESPVTCCEYFADCPVDLIPALYSVGARQKRQGYSKKEWPINGGNWGLGAQSYPEIIITGHADGSVKFWDASAITLQVLYKLKTSKVFEKSRNKDDRPNTDIVDEDPYAIQIISWCPESRMLCIAGVSAHVIIYRFSKQEVITEVIPMLEVRLLYEINDVETPEGEQPPPLPTPVGGSNPQPIPPQSHPSTSSSSSDGLRDNVPCLKVKNSPLKQSPGYQTELVIQLVWVGGEPPQQITSLAVNSSYGLVVFGNCNGIAMVDYLQKAVLLNLGTIELYGSNDPYRREPRSPRKSRQPSGAGLCDISEGTVVPEDRCKSPTSDVKDNSFSRSRSSSVTSIDKESREAISALHFCETFTRKTDSSPSPCLWVGTTLGTVLVIALNLPPGGEQRLLQPVIVSPSGTILRLKGAILRMAFLDTTGCLIPPAYEPWREHNVPEEKDEKEKLKKRRPVSVSPSSSQEISENQYAVICSEKQAKVISLPTQNCAYKQNITETSFVLRGDIVALSNSICLACFCANGHIMTFSLPSLRPLLDVYYLPLTNMRIARTFCFTNNGQALYLVSPTEIQRLTYSQETCENLQEMLGELFTPVETPEAPNRGFFKGLFGGGAQSLDREELFGESSSGKASRSLAQHIPGPGGIEGVKGAASGVVGELARARLALDERGQKLGDLEERTAAMLSSAESFSKHAHEIMLKYKDKKWYQF

SEQ ID NO: 238445 - protein, 1115 aa, Artificial Sequence
  derived and/or modified sequence
MRKFNIRKVLDGLTAGSSSASQQQQQQHPPGNREPEIQETLQSEHFQLCKTVRHGFPYQPSALAFDPVQKILAVGTQTGALRLFGRPGVECYCQHDSGAAVIQLQFLINEGALVSALADDTLHLWNLRQKRPAILHSLKFCRERVTFCHLPFQSKWLYVGTERGNIHIVNVESFTLSGYVIMWNKAIELSSKSHPGPVVHISDNPMDEGKLLIGFESGTVVLWDLKSKKADYRYTYDEAIHSVAWHHEGKQFICSHSDGTLTIWNVRSPAKPVQTITPHGKQLKDGKKPEPCKPILKVEFKTTRSGEPFIILSGGLSYDTVGRRPCLTVMHGKSTAVLEMDYSIVDFLTLCETPYPNDFQEPYAVVVLLEKDLVLIDLAQNGYPIFENPYPLSIHESPVTCCEYFADCPVDLIPALYSVGARQKRQGYSKKEWPINGGNWGLGAQSYPEIIITGHADGSVKFWDASAITLQVLYKLKTSKVFEKSRNKDDRPNTDIVDEDPYAIQIISWCPESRMLCIAGVSAHVIIYRFSKQEVITEVIPMLEVRLLYEINDVETPEGEQPPPLPTPVGGSNPQPIPPQSHPSTSSSSSDGLRDNVPCLKVKNSPLKQSPGYQTELVIQLVWVGGEPPQQITSLAVNSSYGLVVFGNCNGIAMVDYLQKAVLLNLGTIELYGSNDPYRREPRSPRKSRQPSGAGLCDISEGTVVPEDRCKSPTSAKMSRKLSLPTDLKPDLDVKDNSFSRSRSSSVTSIDKESREAISALHFCETFTRKTDSSPSPCLWVGTTLGTVLVIALNLPPGGEQRLLQPVIVSPSGTILRLKGAILRMAFLDTTGCLIPPAYEPWREHNVPEEKDEKEKLKKRRPVSVSPSSSQEISENQYAVICSEKQAKVISLPTQNCAYKQNITETSFVLRGDIVALSNSICLACFCANGHIMTFSLPSLRPLLDVYYLPLTNMRIARTFCFTNNGQALYLVSPTEIQRLTYSQETCENLQEMLGELFTPVETPEAPNRGFFKGLFGGGAQSLDREELFGESSSGKASRSLAQHIPGPGGIEGVKGAASGVVGELARARLALDERGQKLGDLEERTAAMLSSAESFSKHAHEIMLKYKDKKWYQF

SEQ ID NO: 238446 - DNA, 3297 bp, Artificial Sequence
  derived and/or modified sequence
atgagaaagttcaacatcagaaaggtgctggacggcctgaccgccggcagcagcagcgccagccagcagcagcagcagcagcacccccccggcaacagagagcccgagatccaggagaccctgcagagcgagcacttccagctgtgcaagaccgtgagacacggcttcccctaccagcccagcgccctggccttcgaccccgtgcagaagatcctggccgtgggcacccagaccggcgccctgagactgttcggcagacccggcgtggagtgctactgccagcacgacagcggcgccgccgtgatccagctgcagttcctgatcaacgagggcgccctggtgagcgccctggccgacgacaccctgcacctgtggaacctgagacagaagagacccgccatcctgcacagcctgaagttctgcagagagagagtgaccttctgccacctgcccttccagagcaagtggctgtacgtgggcaccgagagaggcaacatccacatcgtgaacgtggagagcttcaccctgagcggctacgtgatcatgtggaacaaggccatcgagctgagcagcaagagccaccccggccccgtggtgcacatcagcgacaaccccatggacgagggcaagctgctgatcggcttcgagagcggcaccgtggtgctgtgggacctgaagagcaagaaggccgactacagatacacctacgacgaggccatccacagcgtggcctggcaccacgagggcaagcagttcatctgcagccacagcgacggcaccctgaccatctggaacgtgagaagccccgccaagcccgtgcagaccatcaccccccacggcaagcagctgaaggacggcaagaagcccgagccctgcaagcccatcctgaaggtggagttcaagaccaccagaagcggcgagcccttcatcatcctgagcggcggcctgagctacgacaccgtgggcagaagaccctgcctgaccgtgatgcacggcaagagcaccgccgtgctggagatggactacagcatcgtggacttcctgaccctgtgcgagaccccctaccccaacgacttccaggagccctacgccgtggtggtgctgctggagaaggacctggtgctgatcgacctggcccagaacggctaccccatcttcgagaacccctaccccctgagcatccacgagagccccgtgacctgctgcgagtacttcgccgactgccccgtggacctgatccccgccctgtacagcgtgggcgccagacagaagagacagggctacagcaagaaggagtggcccatcaacggcggcaactggggcctgggcgcccagagctaccccgagatcatcatcaccggccacgccgacggcagcgtgaagttctgggacgccagcgccatcaccctgcaggtgctgtacaagctgaagaccagcaaggtgttcgagaagagcagaaacaaggacgacagacccaacaccgacatcgtggacgaggacccctacgccatccagatcatcagctggtgccccgagagcagaatgctgtgcatcgccggcgtgagcgcccacgtgatcatctacagattcagcaagcaggaggtgatcaccgaggtgatccccatgctggaggtgagactgctgtacgagatcaacgacgtggagacccccgagggcgagcagcccccccccctgcccacccccgtgggcggcagcaacccccagcccatccccccccagagccaccccagcaccagcagcagcagcagcgacggcctgagagacaacgtgccctgcctgaaggtgaagaacagccccctgaagcagagccccggctaccagaccgagctggtgatccagctggtgtgggtgggcggcgagcccccccagcagatcaccagcctggccgtgaacagcagctacggcctggtggtgttcggcaactgcaacggcatcgccatggtggactacctgcagaaggccgtgctgctgaacctgggcaccatcgagctgtacggcagcaacgacccctacagaagagagcccagaagccccagaaagagcagacagcccagcggcgccggcctgtgcgacatcagcgagggcaccgtggtgcccgaggacagatgcaagagccccaccagcgacgtgaaggacaacagcttcagcagaagcagaagcagcagcgtgaccagcatcgacaaggagagcagagaggccatcagcgccctgcacttctgcgagaccttcaccagaaagaccgacagcagccccagcccctgcctgtgggtgggcaccaccctgggcaccgtgctggtgatcgccctgaacctgccccccggcggcgagcagagactgctgcagcccgtgatcgtgagccccagcggcaccatcctgagactgaagggcgccatcctgagaatggccttcctggacaccaccggctgcctgatcccccccgcctacgagccctggagagagcacaacgtgcccgaggagaaggacgagaaggagaagctgaagaagagaagacccgtgagcgtgagccccagcagcagccaggagatcagcgagaaccagtacgccgtgatctgcagcgagaagcaggccaaggtgatcagcctgcccacccagaactgcgcctacaagcagaacatcaccgagaccagcttcgtgctgagaggcgacatcgtggccctgagcaacagcatctgcctggcctgcttctgcgccaacggccacatcatgaccttcagcctgcccagcctgagacccctgctggacgtgtactacctgcccctgaccaacatgagaatcgccagaaccttctgcttcaccaacaacggccaggccctgtacctggtgagccccaccgagatccagagactgacctacagccaggagacctgcgagaacctgcaggagatgctgggcgagctgttcacccccgtggagacccccgaggcccccaacagaggcttcttcaagggcctgttcggcggcggcgcccagagcctggacagagaggagctgttcggcgagagcagcagcggcaaggccagcagaagcctggcccagcacatccccggccccggcggcatcgagggcgtgaagggcgccgccagcggcgtggtgggcgagctggccagagccagactggccctggacgagagaggccagaagctgggcgacctggaggagagaaccgccgccatgctgagcagcgccgagagcttcagcaagcacgcccacgagatcatgctgaagtacaaggacaagaagtggtaccagttctag

SEQ ID NO: 238447 - DNA, 3348 bp, Artificial Sequence
  derived and/or modified sequence
atgagaaagttcaacatcagaaaggtgctggacggcctgaccgccggcagcagcagcgccagccagcagcagcagcagcagcacccccccggcaacagagagcccgagatccaggagaccctgcagagcgagcacttccagctgtgcaagaccgtgagacacggcttcccctaccagcccagcgccctggccttcgaccccgtgcagaagatcctggccgtgggcacccagaccggcgccctgagactgttcggcagacccggcgtggagtgctactgccagcacgacagcggcgccgccgtgatccagctgcagttcctgatcaacgagggcgccctggtgagcgccctggccgacgacaccctgcacctgtggaacctgagacagaagagacccgccatcctgcacagcctgaagttctgcagagagagagtgaccttctgccacctgcccttccagagcaagtggctgtacgtgggcaccgagagaggcaacatccacatcgtgaacgtggagagcttcaccctgagcggctacgtgatcatgtggaacaaggccatcgagctgagcagcaagagccaccccggccccgtggtgcacatcagcgacaaccccatggacgagggcaagctgctgatcggcttcgagagcggcaccgtggtgctgtgggacctgaagagcaagaaggccgactacagatacacctacgacgaggccatccacagcgtggcctggcaccacgagggcaagcagttcatctgcagccacagcgacggcaccctgaccatctggaacgtgagaagccccgccaagcccgtgcagaccatcaccccccacggcaagcagctgaaggacggcaagaagcccgagccctgcaagcccatcctgaaggtggagttcaagaccaccagaagcggcgagcccttcatcatcctgagcggcggcctgagctacgacaccgtgggcagaagaccctgcctgaccgtgatgcacggcaagagcaccgccgtgctggagatggactacagcatcgtggacttcctgaccctgtgcgagaccccctaccccaacgacttccaggagccctacgccgtggtggtgctgctggagaaggacctggtgctgatcgacctggcccagaacggctaccccatcttcgagaacccctaccccctgagcatccacgagagccccgtgacctgctgcgagtacttcgccgactgccccgtggacctgatccccgccctgtacagcgtgggcgccagacagaagagacagggctacagcaagaaggagtggcccatcaacggcggcaactggggcctgggcgcccagagctaccccgagatcatcatcaccggccacgccgacggcagcgtgaagttctgggacgccagcgccatcaccctgcaggtgctgtacaagctgaagaccagcaaggtgttcgagaagagcagaaacaaggacgacagacccaacaccgacatcgtggacgaggacccctacgccatccagatcatcagctggtgccccgagagcagaatgctgtgcatcgccggcgtgagcgcccacgtgatcatctacagattcagcaagcaggaggtgatcaccgaggtgatccccatgctggaggtgagactgctgtacgagatcaacgacgtggagacccccgagggcgagcagcccccccccctgcccacccccgtgggcggcagcaacccccagcccatccccccccagagccaccccagcaccagcagcagcagcagcgacggcctgagagacaacgtgccctgcctgaaggtgaagaacagccccctgaagcagagccccggctaccagaccgagctggtgatccagctggtgtgggtgggcggcgagcccccccagcagatcaccagcctggccgtgaacagcagctacggcctggtggtgttcggcaactgcaacggcatcgccatggtggactacctgcagaaggccgtgctgctgaacctgggcaccatcgagctgtacggcagcaacgacccctacagaagagagcccagaagccccagaaagagcagacagcccagcggcgccggcctgtgcgacatcagcgagggcaccgtggtgcccgaggacagatgcaagagccccaccagcgccaagatgagcagaaagctgagcctgcccaccgacctgaagcccgacctggacgtgaaggacaacagcttcagcagaagcagaagcagcagcgtgaccagcatcgacaaggagagcagagaggccatcagcgccctgcacttctgcgagaccttcaccagaaagaccgacagcagccccagcccctgcctgtgggtgggcaccaccctgggcaccgtgctggtgatcgccctgaacctgccccccggcggcgagcagagactgctgcagcccgtgatcgtgagccccagcggcaccatcctgagactgaagggcgccatcctgagaatggccttcctggacaccaccggctgcctgatcccccccgcctacgagccctggagagagcacaacgtgcccgaggagaaggacgagaaggagaagctgaagaagagaagacccgtgagcgtgagccccagcagcagccaggagatcagcgagaaccagtacgccgtgatctgcagcgagaagcaggccaaggtgatcagcctgcccacccagaactgcgcctacaagcagaacatcaccgagaccagcttcgtgctgagaggcgacatcgtggccctgagcaacagcatctgcctggcctgcttctgcgccaacggccacatcatgaccttcagcctgcccagcctgagacccctgctggacgtgtactacctgcccctgaccaacatgagaatcgccagaaccttctgcttcaccaacaacggccaggccctgtacctggtgagccccaccgagatccagagactgacctacagccaggagacctgcgagaacctgcaggagatgctgggcgagctgttcacccccgtggagacccccgaggcccccaacagaggcttcttcaagggcctgttcggcggcggcgcccagagcctggacagagaggagctgttcggcgagagcagcagcggcaaggccagcagaagcctggcccagcacatccccggccccggcggcatcgagggcgtgaagggcgccgccagcggcgtggtgggcgagctggccagagccagactggccctggacgagagaggccagaagctgggcgacctggaggagagaaccgccgccatgctgagcagcgccgagagcttcagcaagcacgcccacgagatcatgctgaagtacaaggacaagaagtggtaccagttctag

SEQ ID NO: 238448 - DNA, 3297 bp, Artificial Sequence
  derived and/or modified sequence
atgaggaaatttaatatccgaaaagtgttagatggcctcaccgccgggagtagcagcgcatctcagcagcagcagcagcagcatccccccggcaaccgagagccagaaatccaggaaacattgcaatctgagcactttcagctgtgcaaaacagttagacacggatttccctaccagccaagcgctctggcctttgatcccgtccagaaaattcttgccgtaggtacacaaactggggccctgcgcctttttggccggcctggtgttgagtgctactgtcagcatgattccggcgccgctgtcatccagctccagttcctgatcaacgaaggtgcattagttagtgcactcgcggacgataccctccacttatggaacttacggcagaaaaggccagccatcctgcactctcttaaattctgccgtgaacgagtgacgttctgccatctgccctttcagtctaagtggctgtatgtcggaaccgagagagggaacattcatatcgttaacgtggaaagctttacgctgtccgggtatgtcatcatgtggaataaagcaattgagctgtcctcgaagagccaccctggtcccgtcgtgcatatcagtgacaaccctatggatgaaggaaaactcctcattgggttcgaatccgggacagtggtgctgtgggatctgaagtccaagaaggccgattacaggtacacttacgacgaggctatccattctgtggcatggcaccatgaaggcaagcaatttatttgttcacattcagatggaacactcacaatttggaacgtgagatcgcctgcaaaacccgtgcagaccatcaccccgcacggtaagcagctaaaagacgggaagaagcctgaaccatgtaagcccatcctcaaagtcgagttcaaaacgacccgatcaggtgagccctttatcattctgagcgggggcttatcctatgataccgttggtcgacgcccctgtctgactgtgatgcacggcaaaagcacagccgtcctggaaatggactactctattgtggattttctcacactctgtgagacaccttatcccaacgatttccaggagccatatgctgtcgttgtgctgcttgaaaaagatctcgtattgatcgatctggctcaaaacggatacccaatcttcgagaatccttatcctctgagcatccatgagtcccctgtcacctgctgtgagtattttgcagactgcccagttgatctgatccccgcactctactcagttggcgcccgccagaagcgacagggctattccaagaaggaatggcctatcaacggtggtaattggggcctaggtgcccagagctacccagagataatcatcactggccacgctgatgggtccgtgaagttttgggatgcctcagctattaccctccaggtgctctataaactcaaaacctccaaggtgtttgaaaaaagtagaaataaggacgatagacctaacacagatatagtggatgaagacccttacgcgatacagattatcagttggtgtccggagagtcggatgctgtgcatagcgggcgtttccgctcacgttattatctataggttcagtaagcaggaggttatcacggaggtgatccccatgctggaagtgcgcttgttgtatgaaatcaatgacgtcgaaacgccagagggcgagcagccccctcccctccccactcctgttggcggatccaatccccagcccatcccgccccaatcccacccttcaactagcagctcttcatccgatggcctgcgggacaatgtgccatgtcttaaggtaaagaatagccccctaaagcagtctccaggttatcaaaccgagttggttatccagctagtgtgggtggggggtgagcctccccaacagatcactagcctcgccgtgaattcctcatatggcttggttgtgtttggcaattgcaacggtatcgcaatggttgactacttgcagaaggctgtgctgttgaacctggggactattgaattgtatgggtctaacgacccgtatcggcgggaaccaaggagtccacgaaagagcaggcagccttctggtgccggtttatgtgacatcagcgaggggaccgttgtcccggaagataggtgtaaaagtcctacctcagatgtgaaagataattcgtttagtcggtcccggtccagctcagttacatcaatagacaaggagtctagagaagctatctcagctttgcacttttgcgagacattcacacggaagacggattctagtccgtcaccttgcctctgggtaggtacgaccctggggactgtgctggtgatcgccttaaacctgccacccgggggggaacagcgacttctgcagcccgtgattgtatctccctcagggacaatactgcggctgaagggtgctatcctacgaatggcttttctggataccactggctgtttgatcccaccggcatacgagccatggcgcgagcacaacgtaccggaggaaaaagatgaaaaggagaaattaaaaaagcgccggccagtcagcgtgagcccatcttcaagccaagaaatctccgagaatcagtacgcagttatatgttcagaaaagcaggctaaggtcatcagcttgccaacccagaattgcgcctataagcagaacatcaccgaaacctcatttgtactgcgcggagatatagtggctttgtccaactcgatatgtcttgcctgcttctgtgctaacggccatataatgacttttagcctgccttccttgcgcccacttctggacgtatactaccttcctctgactaatatgcgcatcgctcggacgttttgttttaccaataacggtcaagcactctatctagtatccccaacagagattcagcggcttacgtattctcaggaaacttgtgaaaatctgcaagagatgttgggcgagctgtttactccagttgaaacacctgaggcccccaacagagggttcttcaagggtctttttggggggggggctcagtcccttgatcgcgaggagctgttcggcgagtctagctccggaaaggcgagcaggtcccttgcacagcacatccccggacccggcgggatagaaggggtgaaaggcgccgccagtggtgtggtgggagagctggctcgcgcccggcttgctctcgatgagcgcggacagaaactcggcgacctcgaggagagaacagcagctatgctgtcttctgctgaatcattttcaaagcacgcacatgagatcatgctgaagtataaagacaagaaatggtatcaattctag

SEQ ID NO: 238449 - DNA, 3348 bp, Artificial Sequence
  derived and/or modified sequence
atgcgaaagttcaatatcaggaaagtcctggacggactgacagccggatcaagcagcgcctctcagcagcagcagcagcagcacccccccggaaatcgcgaacccgaaattcaagagaccctccagtcggaacactttcagttgtgcaaaaccgtcaggcacggttttccgtatcaaccttcagctctggcctttgaccccgtccagaagatcctcgctgtcggaactcagactggcgcactgcggctatttggtcgacccggagtggagtgctactgtcagcacgactctggagcagccgtgattcaattgcagttcttgatcaatgagggtgccctggtatcagctctcgccgacgatacccttcacctttggaatctcagacaaaaaagacccgccatactgcattcactgaagttctgtcgagagagggtgacattttgtcatctgccttttcagagtaagtggctctacgtgggcaccgagagaggaaatattcacatcgttaacgtggagtctttcacgttgtccggatacgtaatcatgtggaataaagcaattgaactctcttcgaaatcccaccccggacctgtggtccacatatctgataatccaatggacgagggcaagctcctgatcggctttgagagtggcactgttgtgctgtgggatttgaagagcaagaaggccgactacaggtacacgtatgacgaggcgattcatagcgtggcctggcaccatgaaggcaaacaattcatctgtagccattcggatggcactctgaccatttggaatgtgaggagccctgctaaaccagtccagactatcacccctcacggcaaacagttgaaggacggtaaaaagccagagccttgtaagccgatattgaaagtggagttcaagacaacaagatccggggaacccttcatcatcctgtccgggggcctgtcgtacgatactgtagggcgccgcccctgtctgacagtaatgcacggaaagtccactgccgtgctcgagatggactatagcattgtggatttcttgaccctgtgtgaaaccccataccctaatgactttcaggaaccctatgctgttgttgtgttactggaaaaagacttggtccttatcgacttggcgcagaacggttatcccattttcgagaatccgtaccctctgtcaatacatgagagccctgtgacatgttgcgaatatttcgcggactgccctgtggacctaatacctgctctctactcagttggtgcgaggcagaaacgtcaggggtatagtaagaaggaatggcccattaacggagggaattggggactgggggcacagtcgtatcccgaaattatcatcactgggcacgctgatggctctgtcaagttttgggacgcctctgcgattacgttgcaggtcctgtacaagctgaagacttctaaggtttttgaaaaaagccggaataaggacgaccgtcccaacacagacattgtagatgaagatccctacgcaattcaaattatctcttggtgcccagagtcacggatgctttgcattgccggcgtgagcgcacacgtcatcatttacagatttagcaagcaagaggtgattaccgaggtgatccctatgctggaagttaggctcctgtatgaaataaacgatgtggaaacccccgagggtgaacagccgcccccattgccaacacctgttggaggctctaacccacagcccatcccaccccagagccatccctctactagttccagtagcagcgacgggttacgcgacaatgtgccgtgcctaaaagttaagaatagcccacttaagcaaagtcccggataccagaccgagctcgttattcaactcgtgtgggtgggcggcgagccaccacagcagatcacttccttggctgtcaactcatcttacggcctggtagtcttcggcaattgtaacggcattgccatggttgattacctgcaaaaagctgtgctgttaaacctcggtactattgaattatatggctcgaacgatccttataggcgcgagcctcgctcgccacgcaagagccgccagcccagcggggctgggttgtgtgacatttctgaggggactgtcgtgccagaagataggtgcaagtcaccaacgagcgccaagatgagccggaaactgtctctgcccactgacctgaagcccgacctcgacgtgaaggataattccttctcccgatcacgctccagtagcgtaacgtcaatcgacaaagagtcccgggaagctatatccgcgctgcatttttgtgagacgttcacgaggaaaaccgactcttctccttcaccctgtctttgggtgggtaccactctgggtactgtgcttgttatagcgttgaacttgccaccagggggggaacagaggttactccaaccagtaatagtgtctccctcaggaacaatcctcagactgaaaggcgcaatccttcgaatggcgttcctggacacgaccggatgcctgattccgccagcttacgaaccgtggcgcgaacacaacgtccccgaggaaaaggacgagaaagagaagctgaaaaaacggagaccagtttcagtttctccatcctctagccaggagatcagcgaaaaccagtatgccgtgatctgctcagagaagcaagccaaggtcatctctcttccaactcagaactgtgcatataaacaaaatatcaccgagaccagtttcgtcctgcgaggtgatattgtggccctatcgaattctatatgcctagcctgtttttgtgcgaacggacacattatgactttcagtctgccgagtcttcgccccctgttagacgtgtattacctgcctttgacaaatatgcggatcgctaggactttttgctttacaaacaacgggcaggctttgtatctggtgagcccaacagagatccaacgcctcacatatagccaagagacctgtgagaacctgcaggagatgctaggcgagctgttcactccagtggagactcctgaggctcccaaccgtgggttcttcaagggactgtttggcggtggtgcccaatcacttgaccgggaggagctcttcggagagtccagctcaggcaaggcttcccggagtctagctcagcatattcccgggcccggcggcatagagggcgttaagggcgccgcctctggcgtagtaggggagctagcccgagcacgtctagcgctggatgagcgaggtcagaagctaggggatctggaagaaagaacagccgccatgctctccagcgccgagagtttctcgaaacacgcccacgaaataatgttgaaatacaaggataagaagtggtatcagttctag

SEQ ID NO: 238450 - DNA, 3297 bp, Artificial Sequence
  derived and/or modified sequence
atgaggaagttcaacatcaggaaggtgctggatggcctgacagctggcagcagcagcgccagccagcagcagcagcagcagcaccccccaggcaaccgggagcctgagatccaggagaccctgcagagcgagcacttccagctgtgcaagacagtgcgccacggcttcccctaccagcccagcgccctggcctttgatcctgtgcagaagatcctggccgtgggcacccagacaggagccctgcggctgtttggccggcctggggtggagtgctactgccagcatgattctggagctgctgtgatccagctgcagttcctgatcaatgaaggagccctggtgtctgccctggctgatgacaccctgcacctgtggaacctgcggcagaagaggcctgccatcctgcacagcctgaagttctgccgggagcgggtgaccttctgccacctgcccttccagagcaagtggctgtatgtgggcacagagcggggcaacatccacatcgtgaatgtggagagcttcaccctgagcggctacgtgatcatgtggaacaaggccatcgagctgagcagcaagagccaccctggccctgtggtgcacatcagtgacaaccccatggatgagggcaagctgctgattggatttgaaagtggcaccgtggtgctgtgggacctgaagagcaagaaggctgactaccgctacacctatgatgaggccatccacagcgtggcctggcaccacgagggcaagcagttcatctgcagccacagtgatggcaccctgaccatctggaatgtgcgcagccctgccaagcctgtgcagaccatcacccctcatggcaagcagctgaaggatggcaagaagccagagccctgcaagcccatcctgaaggtggagttcaagaccaccaggtctggagagcccttcatcatcctgagcggcggcctgtcctatgacacagtgggcagaagaccctgcctgactgtgatgcacggcaagagcacagctgtgctggagatggactacagcatcgtggacttcctgaccctgtgtgagaccccctacccaaatgacttccaggagccctatgctgtggtggtgctgctggagaaggacctggtgctgattgacctggcccagaatggctaccccatctttgagaacccctaccccctgagcatccacgagagccctgtgacctgctgtgagtactttgctgactgccctgtggacctgatcccagccctgtacagcgtgggcgcccggcagaagaggcagggctacagcaagaaggagtggcccatcaatggaggcaactggggcctgggcgcccagagctacccagagatcatcatcactggacatgctgatggctctgtgaagttctgggatgccagcgccatcaccctgcaggtgctgtacaagctgaagaccagcaaggtgtttgagaagagcaggaacaaggatgaccggcccaacacagacatcgtggatgaggacccctatgccatccagatcatctcctggtgcccagagagcaggatgctgtgcatcgccggcgtgtctgcccacgtgatcatctaccgcttcagcaagcaggaggtgatcacagaggtgatccccatgctggaggtgcggctgctgtatgagatcaatgatgtggagaccccagagggggagcagcccccacccctgcccacccctgtgggcggcagcaacccccagcccatccccccccagagccaccccagcaccagcagcagcagcagtgatggcctgcgggacaacgtgccctgcctgaaggtgaagaacagccccctgaagcagagccctggctaccagacagagctggtgatccagctggtgtgggtgggcggggagcccccccagcagatcaccagcctggccgtgaacagcagctatggcctggtggtgtttggaaactgcaatggcatcgccatggtggactacctgcagaaggctgtgctgctgaacctgggcaccatcgagctgtatggcagcaatgacccctacagaagagagcccaggagccccaggaagagccggcagcccagcggggccggcctgtgtgacatcagcgagggcaccgtggtgcctgaagatcgctgcaagagccccaccagtgatgtgaaggacaacagcttcagccgcagccgcagcagctctgtgaccagcattgacaaggagagccgggaggccatcagcgccctgcacttctgtgagaccttcaccaggaagacagacagcagccccagcccctgcctgtgggtgggcaccaccctgggcaccgtgctggtgattgccctgaacctgcccccaggaggagagcagaggctgctgcagcctgtgattgtgagccccagcggcaccatcctgcggctgaagggggccatcctgaggatggccttcctggacaccaccggctgcctgatccccccagcctatgagccctggagggagcacaacgtgcctgaggagaaggatgagaaggagaagctgaagaagagaagacctgtgtctgtgagccccagcagcagccaggagatcagcgagaaccagtatgctgtgatctgcagcgagaagcaggccaaggtgatcagcctgcccacccagaactgtgcctacaagcagaacatcacagagaccagctttgtgctgcggggggacatcgtggccctgagcaacagcatctgcctggcctgcttctgtgccaacggccacatcatgaccttcagcctgcccagcctgcggcccctgctggatgtgtactacctgcccctgaccaacatgagaattgcccggaccttctgcttcaccaacaacggccaggccctgtacctggtgagccccacagagatccagaggctgacctacagccaggagacctgtgagaacctgcaggagatgctgggggagctgttcacccctgtggagaccccagaggcccccaacagaggcttcttcaagggcctgtttggaggaggagcccagagcctggaccgggaggagctgtttggagagagcagcagcggcaaggccagccgcagcctggcccagcacatccctggccctgggggcatcgagggcgtgaagggggccgccagcggcgtggtgggggagctggcccgggcccggctggccctggatgagcggggccagaagctgggggacctggaggagaggacagctgccatgctgagcagcgctgagagcttcagcaagcacgcccacgagatcatgctgaagtacaaggacaagaagtggtaccagttctag

SEQ ID NO: 238451 - DNA, 3348 bp, Artificial Sequence
  derived and/or modified sequence
atgaggaagttcaacatcaggaaggtgctggatggcctgacagctggcagcagcagcgccagccagcagcagcagcagcagcaccccccaggcaaccgggagcctgagatccaggagaccctgcagagcgagcacttccagctgtgcaagacagtgcgccacggcttcccctaccagcccagcgccctggcctttgatcctgtgcagaagatcctggccgtgggcacccagacaggagccctgcggctgtttggccggcctggggtggagtgctactgccagcatgattctggagctgctgtgatccagctgcagttcctgatcaatgaaggagccctggtgtctgccctggctgatgacaccctgcacctgtggaacctgcggcagaagaggcctgccatcctgcacagcctgaagttctgccgggagcgggtgaccttctgccacctgcccttccagagcaagtggctgtatgtgggcacagagcggggcaacatccacatcgtgaatgtggagagcttcaccctgagcggctacgtgatcatgtggaacaaggccatcgagctgagcagcaagagccaccctggccctgtggtgcacatcagtgacaaccccatggatgagggcaagctgctgattggatttgaaagtggcaccgtggtgctgtgggacctgaagagcaagaaggctgactaccgctacacctatgatgaggccatccacagcgtggcctggcaccacgagggcaagcagttcatctgcagccacagtgatggcaccctgaccatctggaatgtgcgcagccctgccaagcctgtgcagaccatcacccctcatggcaagcagctgaaggatggcaagaagccagagccctgcaagcccatcctgaaggtggagttcaagaccaccaggtctggagagcccttcatcatcctgagcggcggcctgtcctatgacacagtgggcagaagaccctgcctgactgtgatgcacggcaagagcacagctgtgctggagatggactacagcatcgtggacttcctgaccctgtgtgagaccccctacccaaatgacttccaggagccctatgctgtggtggtgctgctggagaaggacctggtgctgattgacctggcccagaatggctaccccatctttgagaacccctaccccctgagcatccacgagagccctgtgacctgctgtgagtactttgctgactgccctgtggacctgatcccagccctgtacagcgtgggcgcccggcagaagaggcagggctacagcaagaaggagtggcccatcaatggaggcaactggggcctgggcgcccagagctacccagagatcatcatcactggacatgctgatggctctgtgaagttctgggatgccagcgccatcaccctgcaggtgctgtacaagctgaagaccagcaaggtgtttgagaagagcaggaacaaggatgaccggcccaacacagacatcgtggatgaggacccctatgccatccagatcatctcctggtgcccagagagcaggatgctgtgcatcgccggcgtgtctgcccacgtgatcatctaccgcttcagcaagcaggaggtgatcacagaggtgatccccatgctggaggtgcggctgctgtatgagatcaatgatgtggagaccccagagggggagcagcccccacccctgcccacccctgtgggcggcagcaacccccagcccatccccccccagagccaccccagcaccagcagcagcagcagtgatggcctgcgggacaacgtgccctgcctgaaggtgaagaacagccccctgaagcagagccctggctaccagacagagctggtgatccagctggtgtgggtgggcggggagcccccccagcagatcaccagcctggccgtgaacagcagctatggcctggtggtgtttggaaactgcaatggcatcgccatggtggactacctgcagaaggctgtgctgctgaacctgggcaccatcgagctgtatggcagcaatgacccctacagaagagagcccaggagccccaggaagagccggcagcccagcggggccggcctgtgtgacatcagcgagggcaccgtggtgcctgaagatcgctgcaagagccccaccagcgccaagatgagcaggaagctgagcctgcccacagacctgaagccagacctggatgtgaaggacaacagcttcagccgcagccgcagcagctctgtgaccagcattgacaaggagagccgggaggccatcagcgccctgcacttctgtgagaccttcaccaggaagacagacagcagccccagcccctgcctgtgggtgggcaccaccctgggcaccgtgctggtgattgccctgaacctgcccccaggaggagagcagaggctgctgcagcccgtcatcgtgagccccagcggcaccatcctgcggctgaagggggccatcctgaggatggccttcctggacaccaccggctgcctgatccccccagcctatgagccctggagggagcacaacgtgcctgaggagaaggatgagaaggagaagctgaagaagaggaggcctgtgtctgtgagccccagcagcagccaggagatcagcgagaaccagtatgctgtgatctgcagcgagaagcaggccaaggtgatcagcctgcccacccagaactgtgcctacaagcagaacatcacagagaccagctttgtgctgcggggggacatcgtggccctgagcaacagcatctgcctggcctgcttctgtgccaacggccacatcatgaccttcagcctgcccagcctgcggcccctgctggatgtgtactacctgcccctgaccaacatgagaattgcccggaccttctgcttcaccaacaacggccaggccctgtacctggtgagccccacagagatccagaggctgacctacagccaggagacctgtgagaacctgcaggagatgctgggggagctgttcacccctgtggagaccccagaggcccccaacagaggcttcttcaagggcctgtttggaggaggagcccagagcctggaccgggaggagctgtttggagagagcagcagcggcaaggccagccgcagcctggcccagcacatccctggccctgggggcattgaaggagtgaagggagctgccagcggcgtggtgggggagctggcccgggcccggctggccctggatgagcggggccagaagctgggggacctggaggagaggacagctgccatgctgagcagcgctgagagcttcagcaagcacgcccacgagatcatgctgaagtacaaggacaagaagtggtaccagttctag

SEQ ID NO: 238452 - DNA, 3297 bp, Artificial Sequence
  derived and/or modified sequence
atgcggaagttcaacatccggaaggtgctggacggcctgaccgccggctcttcttccgcctcccagcagcaacagcaacagcacccaccagggaatcgcgaaccagagatccaggaaacattgcagtctgaacatttccagctgtgtaagaccgttcggcatggcttcccgtaccagccttcagcccttgccttcgaccctgtgcagaagatcctggcagtcggcacacaaaccggggctctacgtctctttggccggccaggtgtggagtgctactgtcagcatgactcaggagctgccgttatccagctgcagtttctgatcaacgagggagcccttgtgtcggctctggccgacgacaccctgcacctgtggaacttgaggcagaagcggcctgccattctgcactcactcaagttttgtagagagcgggtgacgttctgccacctcccctttcagtcaaagtggctgtacgtgggcactgagaggggtaacatccacatcgtgaacgtggagtcctttaccctgtctggctatgtgataatgtggaataaggcgatcgagctatctagtaagtctcacccaggcccggttgtgcatattagtgataacccgatggacgaagggaaactgttgattggtttcgaatccggaacagtcgtgttgtgggatctgaaatccaaaaaagctgattaccgatacacttatgatgaggcaattcactccgtggcctggcatcatgaggggaagcaattcatctgctcacattctgatggaacactgacgatatggaacgtccgatccccagccaagcccgtgcaaaccatcacaccacatggcaaacagctgaaagacggaaagaaacccgaaccttgcaagcctattctcaaggtcgagtttaagactacccgtagcggagaaccattcattatcctcagcggtgggttatcatacgacaccgtgggccgacgcccttgtctgacagtgatgcacggcaaatcgaccgccgtactggagatggattacagcatcgtcgactttttgaccctgtgtgaaaccccatatccaaacgattttcaagagccatatgctgtcgtggtgcttctggagaaggaccttgttctgatcgacctcgcgcagaatggataccctatcttcgagaacccctaccctctgtcaatccatgaatccccggtgacatgttgcgaatacttcgccgactgcccggtggatctgattcctgcactttattcggtcggagcacgccagaaaagacagggctactctaaaaaagaatggcccattaacggcggcaattggggcttaggggcccagtcatatcctgagataataattacaggccatgctgatggatccgtgaaattttgggatgcatctgccatcacactacaggtcctgtacaagctcaaaaccagtaaggtattcgaaaaatcacggaataaggacgatagaccaaatactgacattgtggacgaggatccatacgcaatccagatcatttcctggtgcccagagagccgcatgctatgcattgccggagtgtctgcgcacgtgatcatctacagatttagcaagcaggaggtcatcacggaggttattcctatgctagaagtgaggcttctatacgagatcaacgacgtagaaacacccgaaggcgaacagccacccccactgcccacccccgttggcggctccaaccctcaaccgattccaccgcagtcccacccgtccacctcatcaagctcctccgacggacttagggacaacgtcccttgtctgaaagtgaaaaactcacctctgaaacagtccccggggtatcagactgagctcgtcatccagctagtatgggtgggaggtgagcccccccagcaaatcacatccctagcagtcaacagctcatacggcctcgtggtattcggcaattgcaacggcatcgctatggtggactatctacaaaaagctgttctgctcaacctgggcacgatagagctgtatgggagtaatgatccttacaggcgagagccacgtagtcctagaaagagcaggcagccttccggcgcgggcctctgtgacatttccgagggaacagtagtacccgaagacagatgtaaaagccccaccagcgatgtcaaagataacagctttagcagaagccgcagctcaagcgtaacttccattgacaaagagtccagagaggctatctctgccctgcatttttgcgaaacatttaccaggaagaccgattcctctccctcaccctgtctttgggtcggaaccaccctagggaccgtgctggtgatagctctcaatctgccccccgggggagaacaaagactccttcagccggtgatcgtgtccccctccgggacgattttacgactgaaaggggccatccttcgcatggctttcctcgacacgaccgggtgtttgatccctccagcttacgagccctggcgtgaacataatgtcccagaggaaaaagatgagaaagagaagctcaagaagcgccggccagtgagtgtttctcccagctccagccaagaaataagtgagaatcagtacgctgtgatttgtagtgagaaacaggccaaggtaatctcccttcctacccagaattgtgcgtacaagcagaacatcaccgaaacatctttcgtccttcgcggggacatagtcgcactttctaatagcatctgtctggcctgcttctgcgccaatggccatattatgactttctcactgcccagtttgcgtcctctgcttgacgtgtactacctcccgctgacaaacatgcgaattgcacgcacattctgttttacaaacaacggacaggctctctatctggtcagtccaactgaaattcagcggctgacgtattcccaggaaacttgcgaaaacttgcaggagatgctgggggagctgtttacacccgttgagacccctgaagcaccaaaccgcggctttttcaagggactgttcggtggtggtgcgcagtccctcgatagggaggaattatttggtgagtcatcgagcggcaaagcaagcagatccctagcccaacacatccctggccctggcggtatcgagggggtcaaaggagcggcaagcggcgtggtgggggagctggctcgcgctagattggcacttgacgaacggggacaaaagttgggagatctggaagagcgcacagcagctatgctgtcctccgccgagtcttttagtaagcacgcccacgagataatgcttaaatacaaggataagaaatggtaccagttctag

SEQ ID NO: 238453 - DNA, 3348 bp, Artificial Sequence
  derived and/or modified sequence
atgcggaagttcaacatccggaaggtgctggacggcctgaccgccggctcgtcatctgccagccagcaacagcaacaacagcacccccccggaaacagggaaccagaaattcaagaaaccttgcagagcgagcatttccagctgtgtaagacggtcaggcacggattcccataccagcctagcgccttggctttcgatcccgtacagaaaattctagcagtgggaactcagaccggcgctttaaggctctttggcagaccaggcgtagaatgctattgtcagcacgatagtggggccgccgttatccagctccagtttctcatcaacgagggggcactagttagtgcactggcggatgacactctgcacctgtggaacctgaggcagaagaggcccgccattctgcacagcttaaaattttgccgcgagcgggtcactttctgtcacctcccttttcagtccaagtggttatatgtcgggaccgagcgggggaacatacatatcgttaacgtcgagagttttacactgagcggttacgtaataatgtggaataaggctatagagctaagcagtaagtcacaccccggtccggtagtccacattagcgacaatcccatggatgaaggaaagctgttgatcggtttcgaatccggaactgttgtcttatgggatcttaaatcgaagaaagctgactatagatacacatatgatgaggctatccactcagtggcgtggcaccacgaagggaagcagttcatttgttcacactccgatggaactctcacaatctggaacgtgcggagccccgcgaagcctgtccaaacaatcacaccacacggtaaacaactaaaagacggtaagaagccagagccctgcaagccaattcttaaggtcgaatttaagactaccaggtctggcgaaccatttattatcctgtccggcggcctttcctacgacaccgtgggccggcgcccttgcctcacggtgatgcacggtaaaagcacagcagtgctcgaaatggattatagcattgtggacttcctgactctgtgcgagacaccctaccccaacgacttccaagagccttatgccgtggtggtgctgcttgagaaagacctagtcctcattgacctggcgcagaatggctatcccatctttgaaaacccctacccattaagtatccatgaatctcctgtcacttgctgcgaatactttgctgattgtccagtggatttaattccagccctttacagcgtcggcgccaggcagaagcgacagggttactctaagaaggagtggccgataaatggagggaactggggcctgggggcccagagttaccctgaaatcataattacgggccatgccgacgggtccgtcaagttctgggacgcaagcgcaatcactctccaagtcctctacaaacttaagacttccaaagtttttgaaaaatcgcgcaacaaggacgatagacctaacactgacatcgtcgatgaagacccgtacgccattcagatcatctcctggtgtcccgaatcgcgaatgctgtgcatcgcgggcgtgtccgcccatgtgattatatacaggttctccaaacaagaggtgatcacggaggttatacccatgcttgaggtcaggctgctatacgagatcaacgacgttgaaacaccagaaggtgagcagcctcccccactgcccacccccgtcggcggctcgaatcctcagccgatccccccacagtctcacccgtcaacttcctcctcttcctccgacggcttgcgagacaatgtcccttgcctgaaggtgaagaattcccctttgaaacaaagtcctggctaccaaacggagctcgtgatacaactagtctgggttggaggagagcctccacagcagatcacttcgctagcagtcaactcgtcttatggactcgttgttttcggcaactgcaatggcatcgcaatggtggactatcttcaaaaagctgttctccttaaccttggcaccattgaactctatggatccaatgatccttataggagagaaccaaggagccctagaaaatcgcgacaacctagcggagcaggactgtgtgacatctccgaaggcaccgtggtgcctgaagatagatgcaagtcacctacatcagcaaaaatgagtaggaagctatcgctgcccaccgacctcaagcccgacctggatgtgaaagacaactcatttagcaggtccaggtcttctagcgtgacttctatcgacaaggaatctagggaggccataagtgccctccacttctgcgaaacattcacccgaaagacagactcttcaccctccccttgcctctgggtcggaacgactctcgggaccgtgcttgtcatcgcactcaacttacccccaggcggggagcagcgcctgctgcaacctgtcattgtgtcaccatcagggaccatattgcgcctgaagggcgccattttaaggatggcttttctcgacacaaccgggtgcctgattccccccgcctatgaaccatggcgtgaacacaatgtacccgaggagaaagatgagaaggagaaattaaagaaaagaaggcctgtctccgtttctccctccagttcgcaagaaatttccgagaaccagtacgccgtgatatgttcagagaagcaggccaaggtgatttctctgccaacgcagaactgtgcctataagcagaacatcacagagacatcttttgtccttaggggggacattgtagccctgtctaatagcatctgtctggcatgcttttgtgctaatggtcatataatgacattctcgctgccttctcttcgacctctcctggacgtgtattatctccccttgacaaacatgcgcatcgcccgtactttctgcttcaccaacaacggccaggcactgtatcttgtttctcctacagagattcagaggcttacctacagccaggagacctgcgagaacttgcaggagatgttgggcgagctgttcacacctgtagaaacccccgaggccccaaaccgggggtttttcaaaggcctgtttggtggcggggcgcagtcgcttgatagggaggagttgttcggcgaatcgagctcgggtaaagcctctcggtccctggcacaacacataccgggacctggaggtatcgagggagtgaaaggggccgcctcaggtgttgtgggcgagcttgcaagagccagattagcgctcgatgagaggggacaaaagttgggcgatcttgaagaaagaactgctgcaatgctgagttcagctgaatctttctccaaacacgcacacgaaataatgttaaaatacaaggacaagaagtggtaccagttttag

SEQ ID NO: 238454 - DNA, 3297 bp, Artificial Sequence
  derived and/or modified sequence
atgcggaaattcaatatccgaaaggtacttgatggactgaccgccggatcaagcagcgcctcccagcagcagcagcagcagcaccccccaggcaacagggaaccagagatacaagaaaccctgcagagcgaacatttccagctgtgtaagactgtcaggcacggctttccttatcagccgagcgccctggctttcgatcctgttcaaaagatattggcagtcggcacgcagacaggggcactgcgcctatttggacgacctggcgtcgaatgttactgtcagcacgattctggggctgcggtgattcaactgcaattcctaattaacgaaggagcactggtctctgctctggccgacgacactcttcatctgtggaacttgcgccagaaacggcctgcaatcctgcactctctcaagttctgtcgggaaagggttactttttgccacctcccatttcagagcaagtggctgtatgtggggactgaaagggggaatattcatatcgtgaacgtcgaatcctttacacttagcggctacgtaatcatgtggaacaaagctatagagctatcctcaaaaagtcatccaggcccagtggtccacattagtgacaaccctatggacgaggggaaacttctgattgggtttgaatctgggacagtggtgttgtgggatttgaaaagcaagaaggctgactaccgttatacttatgacgaagctatccacagtgtcgcttggcaccacgaagggaagcagttcatctgttcccacagcgacggcactctgaccatctggaacgtgcgcagcccggcaaagccagttcaaaccatcaccccacacgggaaacagctaaaggatggcaaaaaacctgaaccatgtaagcctatcctcaaagtcgagttcaaaacaacacggtcaggcgaacctttcatcatcttgagtggagggctttcctacgacacggtgggtcgcagaccatgtctaacagtcatgcacggtaagagcaccgccgtgctcgagatggattacagcattgtcgatttccttacactctgcgagaccccttaccccaatgacttccaagaaccttatgccgtcgttgtactcctagagaaggacctcgtgctgatcgatctggcgcagaatggatacccaatattcgagaacccctacccactctccatccatgagagcccggtcacatgttgcgagtactttgcagactgtccggtggatttgatcccagccctgtattctgtgggggcaaggcagaaacgtcagggatactcgaagaaagaatggccaattaatggagggaactggggactcggcgctcagtcatacccggaaattatcattaccggacacgcggatggcagcgtgaagttctgggatgccagcgcgattaccctacaagtgctttataagctgaaaaccagtaaagtcttcgagaaatcgagaaacaaagacgatcgacctaatacagatattgtggatgaggatccctacgcaatccagattatctcctggtgtcctgagtctcgcatgctctgcattgctggggttagcgcgcacgtgatcatttacagattcagtaaacaggaagttatcaccgaagtgatcccgatgctggaggtgcggttgctctatgagattaacgacgtcgagacccctgaaggggaacagccccctccgcttcccactccagttggcggaagcaacccgcagccaatccctccccagtctcatccgtccacatcttcaagcagctcagacggcctgagggacaacgtgccgtgcctaaaggtgaagaacagccccctgaaacagtctccagggtatcagacagaactcgtgatccaacttgtatgggttgggggagaaccccctcagcagatcactagtctggctgtaaactcctcgtatggtttggtggtttttgggaactgcaatgggattgccatggtagattatctccagaaagcagttcttctaaacctgggcaccatcgagctgtatggctccaacgatccctaccgcagggagcctaggtcaccacgcaaatcaaggcagccctccggcgcagggctgtgcgacatttccgagggaaccgtagtaccagaggatagatgtaaaagccccacctctgatgtgaaggataatagtttttctagatcgcgctctagctccgtcactagcattgacaaggaatcacgtgaggcaatctcagcgttgcacttctgcgagacctttacacggaagactgatagctctcctagtccatgcctgtgggtaggaacaactttggggacggtgctcgtgattgcacttaacctcccacccggaggggagcagagactcctgcaacctgtgattgtgagcccttctggaacaattctgcgcttgaaaggtgctatcctcagaatggcatttctcgacactactggctgcctcatcccccctgcgtatgagccctggagagagcacaacgtgccggaggagaaagatgaaaaagaaaaactgaaaaagcgccgacccgtgagtgtaagccccagctctagccaggaaataagtgagaaccagtatgcagtgatctgttcagaaaaacaagccaaagtgatcagtctgcccacccagaattgtgcttataagcagaacattactgagactagttttgtgctgcgcggtgatatcgttgcattgtccaacagtatatgtctggcttgtttctgcgctaacggtcacattatgacattctcgttgccctccttgcggcctcttctggacgtgtattatctaccactgacaaacatgcgtatcgcccgtaccttctgttttacaaacaacggacaagccctgtacctggtctcccccacagagatccagaggttgacatatagccaggagacctgtgagaatctgcaggaaatgctcggcgagctgtttacccctgtggagacacccgaggctcccaaccgtgggtttttcaaagggctgttcgggggtggagcacagtcattggatagggaggaactgtttggggagtcgtctagtggcaaggcctcccgatctcttgcacagcacattcccggaccaggtggaatagaaggggtaaaaggtgcggcttctggcgtcgtgggagagttggccagagccaggctcgccctagatgaacgtggacagaaactgggcgatttggaggaaagaacagccgctatgctatccagtgccgagagtttcagtaagcacgcccatgagatcatgctcaagtacaaggacaaaaagtggtaccaattctag

SEQ ID NO: 238455 - DNA, 3348 bp, Artificial Sequence
  derived and/or modified sequence
atgagaaaattcaacattaggaaagttcttgatggcctgacggccggttcttcttctgcctcccaacagcagcagcagcagcatccccctggcaatcgggagcctgagatccaagagacactgcagtctgaacacttccagctctgcaagacagtgcgtcacggcttcccttaccagccgagtgctttagccttcgacccagtgcagaagattttggccgtaggaacacaaaccggagccctcaggctgttcggtcgtccaggcgttgagtgctactgtcaacacgactctggggctgccgtaatacagctgcagtttctaataaatgaaggggctctggtctctgccttagccgatgacacccttcatttgtggaacctgcgtcaaaaaagacctgcgatactgcattcgctcaaattctgtagagagcgtgtcaccttttgccacttgccttttcagagcaagtggctttatgttgggactgaacgtggcaacatccacatcgtcaacgtcgagagcttcacgctgagcgggtatgtaattatgtggaacaaggccattgagctgtccagcaagtcccaccccggtcctgttgtgcatatctctgataatcctatggacgaaggcaaacttctcattggtttcgaaagcggcactgtggtgctgtgggacctgaagtctaaaaaagcggactaccgctatacttacgacgaggctattcacagcgttgcttggcatcacgagggcaaacagttcatctgcagtcatagcgacgggacgttgaccatttggaacgtgcggtctccagccaagcccgtgcagaccattaccccccacggcaaacaactcaaagacggcaaaaaaccagaaccttgtaaacctatactgaaggtggagtttaagaccactaggtcgggagaaccgtttatcattctgtcaggcggattgtcttatgataccgtggggaggcgtccttgcttgacggtgatgcatggcaagtcgacagctgttctcgagatggattattccattgttgactttctcacactgtgcgagaccccttacccaaatgattttcaagaaccatacgccgtggtcgtgctcctggagaaagatctggtgctgatcgaccttgcgcagaacggttacccaatctttgaaaacccttaccctctcagcatacacgaaagcccggtgacctgctgtgagtactttgccgattgccctgtggatctgattccagcactgtactctgtcggagctcgacagaagagacagggatattcaaaaaaggagtggccaatcaatggaggtaattgggggctgggtgctcagtcatatcccgaaataattatcaccggtcatgccgatggatcagtaaaattctgggacgcttctgcaataaccctccaggtgctgtacaaactgaagacttctaaggtgtttgagaaaagtagaaacaaggacgataggcccaataccgacatcgtggatgaggatccatacgccattcagattatctcatggtgtcctgagtcacggatgctgtgcattgccggagtttcagctcacgtcatcatttaccgattctcaaagcaggaggtgattaccgaagtgatacccatgctagaagtgaggctcctgtatgaaatcaatgatgtcgagacacctgagggcgagcagcctcctccactccctacgccagtggggggttcaaaccctcagccaattccacctcaaagtcacccgagtaccagctcatcctcatccgacggtctgagagataacgtgccttgcctgaaggtcaaaaatagccctctcaagcaaagccctggatatcagacagagttggtgatccagctggtgtgggtaggaggggagccacctcagcaaattacctccctcgctgtgaactcttcatacggattggtggtttttggcaactgtaacggcattgccatggttgattacctgcaaaaggctgtgctccttaatctgggcaccatcgagttgtacggtagcaacgatccctacaggagagagcctaggtccccccgtaaatccagacagccctccggcgcaggcctctgtgacatttcagaaggaaccgttgtgccagaagaccggtgcaaaagccctacaagcgccaagatgtcccgcaagctctccttgcccacggatctgaaaccggatttagatgtgaaagacaactcattctcaagatctcggtcatcttccgtaacaagtatcgacaaggaatcccgggaagctatttccgcactgcatttctgtgagacgtttacccgaaaaaccgactcttcaccatcaccatgcctgtgggtgggcaccacattgggtacagtcctggtgatcgctctgaaccttccccctggcggagaacagagattgttgcaaccggtgatagttagtccatctggcactatactgcgtctgaagggtgccatattgcggatggctttcctggacaccacgggctgtctgatccccccagcgtacgaaccatggagggagcacaacgtccccgaagagaaagatgaaaaggagaagctgaagaagcgtcggccagtctctgtgagtccctcctcttcacaggagatctctgagaatcagtacgctgtgatatgctccgagaaacaggccaaagtgatctccctcccaacgcagaattgcgcatacaaacagaatatcacagaaaccagcttcgtgctgcgtggggatatcgttgcattatccaattccatctgtcttgcctgtttctgtgcgaacggccatatcatgacttttagcttaccatctctccggccactcctcgatgtgtattacttgcccctgacaaacatgaggatcgctcggaccttttgctttacaaacaacggacaggctctgtacctagtgagtcctactgagatacagcgcttgacctattcgcaggaaacctgcgagaacttacaagagatgctgggggagctctttacacctgtcgagacccccgaagccccaaatcggggtttttttaaggggctctttgggggtggggctcaaagcctggatagggaagaattgttcggagagtccagctcaggcaaggcaagtcggtccctcgcacaacatataccgggacctggcggaattgaaggtgtcaaaggtgccgcaagtggggtggttggtgagctcgctcgggcaaggctggccttagacgaacgcggacagaagctgggtgatctcgaagagagaactgctgctatgctgtccagtgctgaatccttctcaaaacacgcacatgaaatcatgctaaaatacaaggacaaaaagtggtaccaattctag

SEQ ID NO: 238456 - DNA, 3297 bp, Artificial Sequence
  derived and/or modified sequence
atgaggaaattcaacatcaggaaggtgctggacggcctgaccgccggctcgtcctcggcgtcgcagcagcaacagcagcagcatccgcctgggaaccgggagccggagatccaggaaacgctccagtccgagcactttcagctctgcaagactgttcgccatggatttccctatcaaccctcagccctggcctttgatcctgtacagaagatcctggcagtgggaactcagactggtgctttaaggctctttggtcgtccaggagtagaatgttattgccagcatgacagtggagctgcagtaatccagctccagttcctgattaatgagggagcgcttgtgagtgccttggctgatgacaccttacacttatggaatttacgtcagaagaggcctgccatactacattcgcttaaattttgcagagaaagggttacattttgccatctgcctttccagagtaagtggctctatgtgggcactgaacgaggtaatatacatattgtcaatgtggagtccttcacactctcaggctacgtcattatgtggaataaagccattgaactgtcatctaaatctcacccaggacctgtggtccatataagtgataatccaatggacgagggaaagcttttgattggctttgaatctggaacagtagttttatgggacctcaaatcaaagaaagccgactacagatacacatatgatgaggctatccactctgttgcttggcatcatgaaggaaaacaatttatttgcagtcattcagatggcaccttgactatatggaatgtaaggtcccctgctaaaccagtacagacaatcactccacatggaaaacagttaaaggatgggaagaagccagaaccatgcaaacctatcctcaaggtggaattcaaaacgactagatctggggagccttttattattttatcaggaggtttgtcatatgatactgtaggaagaagaccttgcttaacagtgatgcatgggaaaagcactgctgtgctagaaatggactattcaattgttgattttctaacgctgtgtgaaacaccatacccaaatgattttcaagaaccatatgctgtggttgttcttctagaaaaggatttagtacttatagaccttgcacaaaatggatatcctatatttgaaaatccctaccctttgagtatacatgagtcccctgttacatgttgcgaatattttgcggattgtcctgtggaccttattcctgcactttattctgttggagctagacagaaacgtcaaggttacagcaaaaaggaatggcccatcaacggaggtaattggggcttgggtgctcaaagttacccagaaataattattacagggcatgctgatgggtcagttaagttctgggatgcttctgcaataactctacaagtattatataagctaaagacatctaaagtatttgaaaagtcaagaaataaagatgacaggccaaacacagacattgtagatgaagatccatatgccattcagatcatctcctggtgtccagaaagtagaatgctgtgcatcgctggagtttcagctcatgtcattatttatagattcagcaagcaggaagtaatcacagaagtcattccgatgcttgaagttcgattattatatgagataaatgatgtggaaactccggagggtgagcagccaccacctttgccaacacccgtgggagggtccaaccctcagcccatccctcctcagtctcatccatctaccagtagcagttcatctgatgggcttcgtgataatgtaccttgtttaaaagttaaaaactcaccacttaaacagtctccaggttatcaaacagaactagttattcagttggtttgggtgggtggagaaccaccacaacaaataaccagcctggcagtcaattcttcctatggactggtggtttttggcaattgcaatggcattgctatggttgactacctccagaaagcagtgctgctcaacctgggcactattgaattatatggctctaatgatccttatcggagagaaccccgatctcctcgtaaatctcgacagccttcaggagccggtctgtgtgatattagtgaagggactgttgttccagaggatcgctgcaaatctccaacctctgatgtaaaggataactcctttagccgatcacggagttcaagtgtaacaagcattgacaaagaatcccgagaagcgatctccgctcttcatttctgtgaaacgtttactcgaaagacggactcgtccccttccccttgtctatgggttggaacaacgctaggaacagtgcttgtcattgcactgaaccttcccccagggggagagcaaagacttcttcagccagtaattgtgtctccaagtggtactatattgaggttaaaaggtgcaatcttgagaatggcatttctggataccacaggctgcttaataccacctgcgtatgaaccctggagagagcacaatgttcctgaagaaaaagacgaaaaggagaaattgaaaaaacggcggcctgtctcagtatccccctcctcttctcaggaaattagtgaaaaccagtatgcagtgatatgttctgaaaagcaagcaaaagtaatctcactgccaacccagaactgtgcttataagcaaaatattacagagacctcgtttgtgcttcgtggagatattgtagcattgagtaacagtatctgccttgcctgtttctgtgccaatggacatataatgacttttagtttgccaagtttaagacctctgttggatgtgtattacttgccccttaccaatatgcggatagccagaacgttctgctttaccaacaatggacaagcattataccttgtttcacctacagaaatccagagacttacttatagtcaagagacctgtgaaaatcttcaggaaatgttgggtgaactcttcactcctgtagaaacacctgaagcaccaaacaggggattctttaaaggcttatttggaggtggtgcacaatctcttgacagagaagaactatttggagaatcgtcctcaggaaaggcttcaaggagccttgcacagcatattcctggccctggtggcattgaaggcgtaaaaggggcagcatctggagttgttggtgaattagcacgagccaggctggcactagatgaaagagggcagaaacttggcgatctggaagaaagaactgcggccatgttatcaagtgcagagtcattttctaaacatgctcatgagattatgttgaaatacaaagataagaagtggtaccagttctga

SEQ ID NO: 238457 - DNA, 4431 bp, Artificial Sequence
  derived and/or modified sequence
actcctccgtttccgcggtcgaagctgccttcggccccgggtggtctcccccgcccggggaccccctgtgcctcccctcccgggctgcgggggagcccctccgagaccatgaggaaattcaacatcaggaaggtgctggacggcctgaccgccggctcgtcctcggcgtcgcagcagcaacagcagcagcatccgcctgggaaccgggagccggagatccaggaaacgctccagtccgagcactttcagctctgcaagactgttcgccatggatttccctatcaaccctcagccctggcctttgatcctgtacagaagatcctggcagtgggaactcagactggtgctttaaggctctttggtcgtccaggagtagaatgttattgccagcatgacagtggagctgcagtaatccagctccagttcctgattaatgagggagcgcttgtgagtgccttggctgatgacaccttacacttatggaatttacgtcagaagaggcctgccatactacattcgcttaaattttgcagagaaagggttacattttgccatctgcctttccagagtaagtggctctatgtgggcactgaacgaggtaatatacatattgtcaatgtggagtccttcacactctcaggctacgtcattatgtggaataaagccattgaactgtcatctaaatctcacccaggacctgtggtccatataagtgataatccaatggacgagggaaagcttttgattggctttgaatctggaacagtagttttatgggacctcaaatcaaagaaagccgactacagatacacatatgatgaggctatccactctgttgcttggcatcatgaaggaaaacaatttatttgcagtcattcagatggcaccttgactatatggaatgtaaggtcccctgctaaaccagtacagacaatcactccacatggaaaacagttaaaggatgggaagaagccagaaccatgcaaacctatcctcaaggtggaattcaaaacgactagatctggggagccttttattattttatcaggaggtttgtcatatgatactgtaggaagaagaccttgcttaacagtgatgcatgggaaaagcactgctgtgctagaaatggactattcaattgttgattttctaacgctgtgtgaaacaccatacccaaatgattttcaagaaccatatgctgtggttgttcttctagaaaaggatttagtacttatagaccttgcacaaaatggatatcctatatttgaaaatccctaccctttgagtatacatgagtcccctgttacatgttgcgaatattttgcggattgtcctgtggaccttattcctgcactttattctgttggagctagacagaaacgtcaaggttacagcaaaaaggaatggcccatcaacggaggtaattggggcttgggtgctcaaagttacccagaaataattattacagggcatgctgatgggtcagttaagttctgggatgcttctgcaataactctacaagtattatataagctaaagacatctaaagtatttgaaaagtcaagaaataaagatgacaggccaaacacagacattgtagatgaagatccatatgccattcagatcatctcctggtgtccagaaagtagaatgctgtgcatcgctggagtttcagctcatgtcattatttatagattcagcaagcaggaagtaatcacagaagtcattccgatgcttgaagttcgattattatatgagataaatgatgtggaaactccggagggtgagcagccaccacctttgccaacacccgtgggagggtccaaccctcagcccatccctcctcagtctcatccatctaccagtagcagttcatctgatgggcttcgtgataatgtaccttgtttaaaagttaaaaactcaccacttaaacagtctccaggttatcaaacagaactagttattcagttggtttgggtgggtggagaaccaccacaacaaataaccagcctggcagtcaattcttcctatggactggtggtttttggcaattgcaatggcattgctatggttgactacctccagaaagcagtgctgctcaacctgggcactattgaattatatggctctaatgatccttatcggagagaaccccgatctcctcgtaaatctcgacagccttcaggagccggtctgtgtgatattagtgaagggactgttgttccagaggatcgctgcaaatctccaacctctgcaaagatgtcaaggaagttaagcttacctactgacctaaagcctgatttagatgtaaaggataactcctttagccgatcacggagttcaagtgtaacaagcattgacaaagaatcccgagaagcgatctccgctcttcatttctgtgaaacgtttactcgaaagacggactcgtccccttccccttgtctatgggttggaacaacgctaggaacagtgcttgtcattgcactgaaccttcccccagggggagagcaaagacttcttcagccagtaattgtgtctccaagtggtactatattgaggttaaaaggtgcaatcttgagaatggcatttctggataccacaggctgcttaataccacctgcgtatgaaccctggagagagcacaatgttcctgaagaaaaagacgaaaaggagaaattgaaaaaacggcggcctgtctcagtatccccctcctcttctcaggaaattagtgaaaaccagtatgcagtgatatgttctgaaaagcaagcaaaagtaatctcactgccaacccagaactgtgcttataagcaaaatattacagagacctcgtttgtgcttcgtggagatattgtagcattgagtaacagtatctgccttgcctgtttctgtgccaatggacatataatgacttttagtttgccaagtttaagacctctgttggatgtgtattacttgccccttaccaatatgcggatagccagaacgttctgctttaccaacaatggacaagcattataccttgtttcacctacagaaatccagagacttacttatagtcaagagacctgtgaaaatcttcaggaaatgttgggtgaactcttcactcctgtagaaacacctgaagcaccaaacaggggattctttaaaggcttatttggaggtggtgcacaatctcttgacagagaagaactatttggagaatcgtcctcaggaaaggcttcaaggagccttgcacagcatattcctggccctggtggcattgaaggcgtaaaaggggcagcatctggagttgttggtgaattagcacgagccaggctggcactagatgaaagagggcagaaacttggcgatctggaagaaagaactgcggccatgttatcaagtgcagagtcattttctaaacatgctcatgagattatgttgaaatacaaagataagaagtggtaccagttctgacaaccagaatccaataagtccaacttcagccagaaggaaaaaagttttccatttttattacattctttaggaaagttaacgttaaagggatgttcgtcactgaatactgttctttcctagcacagtcatgcactgttttacctcagtcatgtggctttaactgaggagtgttcacacgcactcgaaatggagtatatggtgtgtgccagttatgagttgaccatttgggaattaaacaggtcacacgtgacagatgaagaaaccaagggggctgctgaggagacctggtgcagggactaatcctggatcattcctgtattaaactttcatatgccaaaagggtttgtgccgttttatctgccatcagtgtttgacctgtttagggcagaggcaataagtcagaagtcttgaagttgaaatagttatatgtgtgtcattggactggattataaacagctgtcttggactttccctctcttaacactgactggtcatcagtatcattagtgaaaaagaaacaaattgtttgttatcatctctttagacagataagctgaatggtgggctttaaataataaaaacatacacatagttgacttgtgtatgagctactcttggattcttgttattatagacttgtatttagttcatattttgtcaaaagcaaaacaagaagatacatcacttttcattgaaaagaaaagtgtagagcatgactgaattgctcatcattctgggagtttccatgtagtggctatgcagtgtggaaagtgagaaaaacctccattgtggtgaggagaatacttcaatgtcccttgtccttgttctcattaattcagctaaaggtggatttgaccaaaataatgctggttaaatttgtagaaatgttgaaattggctgtgttttaaattttgcttgaatttttataaaatgtttaaccaaatgtacctttgcattctttaattaaaattgctt

SEQ ID NO: 238458 - protein, 360 aa, Artificial Sequence
  derived and/or modified sequence
MIEDTMTLLSLLGRIMRYFLLRPETLFLLCISLALWSYFFHTDEVKTIVKSSRDAVKMVKGKVAEIMQNDRLGGLDVLEAEFSKTWEFKNHNVAVYSIQGRRDHMEDRFEVLTDLANKTHPSIFGIFDGHGGETAAEYVKSRLPEALKQHLQDYEKDKENSVLSYQTILEQQILSIDREMLEKLTVSYDEAGTTCLIALLSDKDLTVANVGDSRGVLCDKDGNAIPLSHDHKPYQLKERKRIKRAGGFISFNGSWRVQGILAMSRSLGDYPLKNLNVVIPDPDILTFDLDKLQPEFMILASDGLWDAFSNEEAVRFIKERLDEPHFGAKSIVLQSFYRGCPDNITVMVVKFRNSSKTEEQ

SEQ ID NO: 238459 - DNA, 1083 bp, Artificial Sequence
  derived and/or modified sequence
atgatagaggacaccatgaccctgttgtcactgctggggaggatcatgcggtacttcctgctccgcccggaaaccttgttcctcctgtgtatcagcctcgctttgtggtcatatttcttccacacggatgaggttaagaccatagtgaaatctagccgggacgccgttaagatggtgaagggcaaggtagccgagatcatgcagaacgacaggctgggcggactggacgttctggaagccgagttcagcaagacatgggagtttaagaatcataatgtggccgtgtactccatccaaggaagacgggaccacatggaggaccgcttcgaagtgctgaccgatctggccaacaaaacccacccttcaatcttcgggatttttgacggtcacggcggcgagactgcggccgaatacgttaaaagcaggctgcctgaagccctgaaacaacacctgcaggattatgagaaggataaagaaaactctgtgctcagctaccaaaccatcctggagcagcagatcctatccattgacagagaaatgctggaaaagctcacggtctcttatgatgaagcagggactacatgcttgatcgccctattgagtgataaagacctgaccgttgctaatgtgggcgacagcagaggggtgctgtgtgataaagatgggaatgctattcccctgtcccatgaccataaaccctaccaactcaaggagagaaagcgcataaagcgcgcaggcggtttcatctcatttaacggcagttggcgtgttcaagggattctcgccatgtctagatccctgggcgactatccgctaaagaatcttaacgtcgtgatccctgatccagatattctcacatttgatttggacaaattgcagcccgaattcatgatcctggcaagtgacggactttgggacgccttctcaaacgaagaagcagtccggttcataaaggaaaggctggacgagccgcactttggggcaaaaagtattgtgttacaatctttctacagagggtgccccgataacatcacagtgatggtggtgaaattccgaaactcctccaagacggaagagcagtag

SEQ ID NO: 238460 - DNA, 1083 bp, Artificial Sequence
  derived and/or modified sequence
atgattgaggacaccatgaccctgctgagcctgctgggccgcatcatgagatacttcctgctgcggcctgagaccctcttcctgctgtgcatcagcctggccctgtggagctacttcttccacacagatgaggtgaagaccatcgtgaagagcagcagagatgctgtgaagatggtgaagggcaaggtggccgagatcatgcagaatgaccggctgggcggcctggatgtgctggaggccgagttcagcaagacctgggagttcaagaaccacaacgtggccgtgtacagcatccagggcagaagagaccacatggaggacagatttgaggtgctgacagacctggccaacaagacccaccccagcatcttcggcatctttgatggccacggcggggagacagctgctgaatatgtgaagagccggctgcctgaggccctgaagcagcacctgcaggactatgagaaggacaaggaaaattctgtgctgagctaccagaccatcctggagcagcagatcctgagcattgaccgggagatgctggagaagctgactgtgtcctatgatgaagctggcaccacctgcctgattgccctgctgagtgacaaggacctgactgtggccaacgtgggggacagcagaggagtgctgtgtgacaaggatggaaatgccatccccctgagccatgaccacaagccctaccagctgaaggagaggaagaggatcaagagagctgggggcttcatctccttcaacggctcctggagggtgcagggcatcctggccatgagccgcagcctgggggactaccccctgaagaacctgaatgtggtgatcccagaccctgacatcctgacctttgacctggacaagctgcagcctgagttcatgatcctggccagtgatggcctgtgggatgccttcagcaatgaggaggccgtgcgcttcatcaaggagcggctggatgagccccactttggagccaagagcatcgtgctgcagagcttctaccggggctgcccagacaacatcaccgtgatggtggtgaagttcaggaacagcagcaagacagaggagcagtag

SEQ ID NO: 238461 - DNA, 1083 bp, Artificial Sequence
  derived and/or modified sequence
atgatcgaggacaccatgaccctgctgagcctgctgggccggatcatgaggtacttcctcttgagaccagaaacactgttcctgctttgcatatcactggccctgtggtcttatttttttcacactgacgaagtgaaaactatcgttaagagctcccgcgatgccgttaaaatggtgaagggcaaggtagccgaaatcatgcagaatgatcgcctaggggggctcgatgtgctggaagctgagttttccaaaacatgggagttcaagaatcacaacgtcgctgtgtattcaattcagggcagacgagatcatatggaggatcgcttcgaggtcttaacagatttggctaataagacccatccttccatctttggaatcttcgatggtcatggtggagaaactgctgcagaatacgtgaagtcaagattgcccgaagcgctgaagcagcatcttcaagactacgagaaggataaagaaaatagcgtcctgtcgtaccagaccatccttgagcaacagatcttgtcaatcgatagagaaatgctggagaaactgaccgtgagctatgacgaggctggtaccacttgtctgattgccctactctccgacaaagacctcactgtggcgaatgtgggagacagtcgtggagtgctgtgcgataaggacggaaacgccatccctttatcccatgatcataagccttatcaattaaaggagagaaaacgaatcaagagggccggtggttttatttccttcaatggttcatggcgggtacaagggatactggctatgagcagaagtttaggcgactatcccctgaaaaacctaaacgtcgttatccctgatccggacatcttgaccttcgacctggacaaattgcagccagagttcatgatactggcgtccgacggtttgtgggatgccttctcaaacgaagaggcagttcgatttattaaagaacggctggacgagccacatttcggtgccaagagtattgtgttacagagcttttacaggggatgcccagataacatcacagtcatggtggtgaagttcaggaacagctcgaagacagaggaacagtag

SEQ ID NO: 238462 - DNA, 1083 bp, Artificial Sequence
  derived and/or modified sequence
atgattgaagataccatgactttgctcagcctcctgggtagaattatgagatactttctgctacgcccagaaacgttgtttcttctctgtatctccctcgctctgtggagctatttctttcatacagacgaggtgaagacgattgttaagagttcccgagatgcagtgaagatggtgaagggtaaagtggcagaaatcatgcagaacgataggcttggtggtctggatgtcctcgaagctgagttttctaagacatgggagtttaagaatcataatgttgccgtctacagcatccagggtagacgcgatcacatggaagatcgatttgaggtgctgacggacctcgccaacaagactcacccttctatctttggcatctttgatgggcatggcggtgagaccgcagccgaatacgtgaagagcagacttcctgaggcactgaagcagcatcttcaagactacgaaaaggacaaagagaattccgttctgagttatcaaacaattttggagcaacagatattatccatcgaccgtgaaatgctcgagaagctcaccgtaagctatgacgaggctggaaccacctgtttgatagccctcttgagcgataaggatcttacggtagcaaatgttggcgacagtcgtggcgtactctgcgataaggacgggaatgccatccctctgtcccacgatcacaagccttatcaactgaaagagagaaaacgcatcaaaagagcagggggtttcatcagtttcaacgggtcttggcgggtgcaggggatcttggctatgtcccgctcattaggagactatcctctaaaaaacctgaatgtggtgattccagatccagatatccttactttcgatcttgacaagcttcagccagagttcatgatactcgcctccgatgggctctgggacgctttctccaatgaagaagcagtgcgctttatcaaggagaggctggacgagccccacttcggcgcaaaaagcattgtgctgcagtctttctatagaggatgtccagataacattactgttatggttgtgaagtttagaaatagtagtaagaccgaggagcagtag

SEQ ID NO: 238463 - DNA, 10934 bp, Artificial Sequence
  derived and/or modified sequence
ctccgcctccctcccggcgggctgtccccgcagtgctcccggacccggcgagccttcggggcgcgcgtcgctggtggtggttgaggctctagcgataataaatgatagaggatacaatgactttgctgtctctgctgggtcgcatcatgcgctacttcttgctgagacccgagacgcttttcctgctgtgcatcagcttggctctatggagttacttcttccacaccgacgaggtgaagaccatcgtgaagtccagccgggacgccgtgaagatggtgaagggcaaggtagccgagatcatgcagaacgatcgactcggggggcttgatgtgctcgaggccgagttttccaagacctgggagttcaagaaccacaacgtggcggtgtactccatccagggccggagagaccacatggaggaccgcttcgaagttctcacggatctggccaacaagacgcacccgtccatcttcgggatcttcgacgggcacgggggagagactgcagctgaatatgtaaaatctcgactcccagaggcccttaaacagcatcttcaggactacgagaaagacaaagaaaatagtgtattatcttaccagaccatccttgaacagcagattttgtcaattgaccgagaaatgctagaaaaattgactgtatcctatgatgaagcaggcacaacgtgtttgattgctctgctatcagataaagacctcactgtggccaacgtgggtgactcgcgcggggtcctgtgtgacaaagatgggaacgctattcctttgtctcatgatcacaagccttaccagttgaaggaaagaaagaggataaagagagcaggtggtttcatcagtttcaatggctcctggagggtccagggaatcctggccatgtctcggtccctgggggattatccgctgaaaaatctcaacgtggtcatcccagacccagacatcctgacctttgacctggacaagcttcagcctgagttcatgatcttggcatcagatggtctctgggatgctttcagcaatgaagaagcagttcgattcatcaaggagcgcttggatgaacctcactttggggccaagagcatagttttacagtcattttacagaggctgccctgacaatataacagtcatggtggtgaagttcagaaatagcagcaaaacagaagagcagtgaacccttcaggggtctcagctgccttagactaaaggactttcaacacactggtctcttttaatttagtgaaaagtgtgggagttgtaattaggatcatccaccccagacatggaatcccccctccctggtggtcttaggtctataatcagtgacgaacagagggtgcccttggccaatgtagttaagaaactggaaaatggtttcttcatgttttcccaactctttcatccagtgtccaaaatatataagtaaatagctgtagagtcacatatatgaagtgaatagcatatgtgtcatttagtctccctgaagattcttttcaagatcctgttcagggtcctccaggcatcagctgttgtgtcctctctttgtaacagtggacaggacagaccacccagtgctgcaggagacaggccactgcgtcacctgtgagtggtcaggggctgatgtggcaacaccctctgccaagagacagagctgtcctgagaatgctttgtccttctgagcccatgttttctgctcagtagcagcttggaagcagatttggaatggtttactattttggctgctcttggggactgcgagaagcagagagaatgagagaccagtggcaactgcctgcacagcagagataaccctcttcccttgcttcctttaatagttaaatagactttgtataccacctgaccagcctttgtgcatttatcctaatcatgcatgaccgttaaccttttgcttagtccttaccatatgtaataggcagctgttaaattcaccaacagataccctgatttttcatcttacgtgaccaagaaaccacgttaggggaaatgaaaaaagcaagccacaataccatgattccttccattttcaacagtagatgaaggaaatgatactgaatgagtcacagtgttccctggcaagtaagctgtttgcattgagaaaggagtgagctggtgaggttaccaccctgaattgagctccagctgccagtttttgtgtttttccttgcccctttccaagtggttttcaagtgtcaggcagtgttctgagaagcagcagcctataactgtatgtgtgttccttgaagccaggtgcagagttcccagctactgcagcttgggatttggtgggaaactactgggataagcttctccttgacaatggaaaggcagcagtcttcaacatttggttgcaaatctccatccacatcagggagctttccccaggcaaatacaaaccgccccgtggcctgcaggcctgcaggggaggcagcaaagggacctggcagttgcaacacagtaagtcaggaattcaagcgtgaacccatattgataagtgggccagaattatttaggggcctggcttgctgctctccatttcctgtatcgctaatttatcatttttccaaccttggtattttatattatttagagaaaatgctgggtcactctctttgcctaaggtgactcaaacagccaaacgaaacttccgttgcctcccagccctctgtatccacctggttttgttctttccctgtgagcatttgtggttatagcttcccatatgccacattcaccggccacctcctcgccgtggaaccctgccctctcccctcctgctgctgtagagttttcccaaagcagtgtccaggagagaatttgagagagtgaagaaattgccttgtagatgtggagggctgcaatctgtcttgatttctccaagcacttaactttctttgactgcactgagaattgctaatgatttcccatgagatttgcttacttttgtatactgtattttccagcattacagaaccttggttattgttttttagccatagaatcttctagtaaaaaatatctgccaccattttagatttaagcatttgcctatggggagacactgaatatgtggatgtgtgtattaatatttggggtggggacagggaagggaatgtggaaaacaaatgctggctgtgagcagtgctgagatggccaggccaggcggctgagtttgcttggaaattcaggacattctgactcctaagagttgcccccacccaccatcaaactgaaatcagcaccaatggtgtcagcactttacagcccatagccaactttctttatttttaacgtagcacaaaaatgtataatagcaaggaaaagacatttttaaattccggttatttttattgtctaaaatgaaagcaacagtgttttgataaagatgaaaaagaaaagctactaaattagtaaatcagtggttacgtgccctgcagaatttcttaacagatggtgctgagtgcacgagttacataactttctctctaattgaggttcacaaggcgtcttctaaattttgctttgtacaattaattcatttctgatgttaaccaaatagagtgtatatatcctactcccattactgcctctttcccccctactatggcttgtagattttcaaaagatagaagttctaggcaaaactgtagcagtttcattaatagttgttaggatagttatatctaaaatcagagtattttgttcccttccttctggagctctctctccctagcccttttccagctgttggggatgtgcagacatcactcctgggggtgccctatggtacactggctgctccccagggacctgggaatgctgaatctagccattagggaaattgatttgagatgtttgcatgtgaagcttccctaagcagcactgccaaagctttggaattgtcacccaaggcttcctagactccctagctagctcgagttcgaattgccaatagtccccatggtgccaaattttgggatggttttacagtcttttagaaatgaagacaggaatggccatgtgcttctgagaccccagcacgatgccaggcccaggtctccattaatgcagtgctctgctgctgctccactggcaatttgtactcttaacataggttgggggagggacagctagggaaattttttttaattaattgtatctaaaattctttcatcataggaataaacaacacatatagaaagctccaaagctgttcccaagacctgtattatttattttatatgaccaacttgccccaaggcaattaactctgaattgctgttctaatgtgacatatctgtgtacatatgtacatagtactggtaaccagtggctgcattttattccttgctgtggactgaggtattggcttcttgaatcttgtatatgtcataagaatattatacagagagtgttatagtgaaggatgtaagctggataatttaaaacagaccttatttcatacaagtgtaattattacatcattttgggtaaatggcaaacaggattgcatgagagtgatggcatcatcatttcaattgaatctgaagtgattctaggaaattgattccactgttggattctaggaaattgagtccactgttttcctttgcgtttaatttcctttgtgtttaatttgaccacagaaacttttttgagtagcacctagtaacattgcaaggaacttgtgtatcaaggtgtatcttgattatcctgattttttttgttctctaagttgttgccagatctctcttgcaactgtgtcaatgaaaggtctgtgtttagaaaaggcagcatatcattgtatatttgaaactataggaatatatactttgtataaaacttttccaatgatttcagaaattcttttttcctccttttgacccacaactagactgttcataccctaatagttccccaaaattgccttagcatgtcacaccagcatttgtcatccagctctggagaaatgacatgactgttagatactatgcctgtttaattgcctctggattaagtcattgatagctagacttttgagctagttagctgtagaaataatagaatccagtgtttcccaaagtgtgttccaaagaacacaagttccaaagatgctcttctaaatataggattctaggatgaaataagtttggaaaacacataccatcttagaaagttagtgaacatgagcacatcaaaggctctaatttaaatgtcctgtgaggagagaaaaacacaacaaatatctactgtcagttagcccagtgttttccagattaatttgaccacagaaacttttttgagtggcacctagtaacactgcaaggaacttgtgttctaaagaacaccctttgggaaattctggtatattgaaatattgctgtgttttcattcacgatgactcttagtagcagtacaatttgcaacttagaagcatgagcctttcatatatgaagctgacttgttaataaaagcagtgttaagaagtagtatgacttaatatgaccaacagcagcctcatattgatagcagaacaatcctacttaaagctctaaacatcatccccccctttttttttttaacggaatctcgctctgtcacccaggctggaatgccgtggcgcaatgtcaggtcactgcaagctccgcctcccaggttcacaccattctcctgcctcagcctcctgagcagctgggactacaggcggcctccaccacacctggctaattttttgtatttttagtagagacggggtttcaccatgttagccaggatggtcttgatatcctgaccttgtaatccaccagccttggcctcccaaagtgctgggattacaggtgtgagccactgcacccggccatccctttcttttatatgaataatgagcaagagccctgccatagctaaatatgtctcaaattcattccaagatctttccattgcttttttgcagttacctttgctttttgggttgaatcaaaatgaatatttttatatttcattactatatgatatttaaaaatatacagaaaatcacagaaaaggaaaaacagaaatttgattttaattcacttttgaaattttaacgatttttaaaactaatgatctgttatataataactgaaatgtaaactattaacagttatttactttctttcctttattgtcctctctggattcagtgaaataatttgaaatcaattagagctcataccttctaaaactcctgtcccatatcatcccacctttcatgttttatgtacatagttaagtttggcatgttatctcttgcctaaaatgtgaggccttcctgtagttccacagtagttactcttggctgcagaaataggtttgggaagctatgagagattaccccaaagtcatggatgaaacaaatctagtcgaaaacatggtacagagtgaattaaggcaaaagtcattaacttaaaattacatccaatatttaggaatagctcatcctctgcacattatccaaaatattttaaaaaactaaaagtaagatctcttaggctaggtggcggattgcaaagggcagggggcagttgataccatgaagcttccaatagatgcatttctaaacattttttctaatatgtaaatttgctgatccttagtaatgttaatgctttgtctatttgttatttttaccactgttgaacagcaaactgttgaggctagggttgattattgataatttttatgtgtttagtaataaccacagcatcatacgtacaactgctttaataaatccaagttaaggactttgaggagagcatgtagcaagtattcattttaacaaatcatcacagacagtttccctgttcaaagctccaccaaaaagcaagcatgcagcaaaggcatagactgtatttagagatgtggtttcatttattcttgaagtcctataaccttgcattatttaaacacaaaatcccacctaacatttgccaaatccaagttaatctcaaaaacctccgaggacattgagcacaagcagattactgtaagggcactggtggcagattgtggtggagagagggctgagtgacccagagcaaagcctgcccgggttactcgctgccacttcaggagagggattgtatcagctctcattaccttttgtcatgaggcagttcataaattaaatatgatatcatgcattatctcaaaatatttctatattaattagataattcacgatgtaaaacgtgttcatgcagaagcaaaggcggatgtaatagtcaagtatcagggaaaaacccctttaggatacccagacattaaaaatgtaaaaagtagcttataagaaatgtggattatcagatttttactatatataggttgtgtttaatagtaatttctgacacctgcacatagatgaagaaaaggcagttgttaccacttttcaccattcaaaaaatgggcttgtctcttagagtattggttaatgctttgcttatttgttaatgaagacagcattttaattttaaagcttccttttgtaggactgatggcacgggcagaatcacatttaagaaaaatggtttggaacactttttaataaaaaattgtaaaatcagtttccagtgtggtcaaaattagaatgtaaaggaaagcatttttaagaaaatacagaagcccaaatcaagggagagtaatataaaaggaaatattttaaattaagaaaaggaggtgttatagtttattacatcatgaattatgctttctgtacttacgctcttagtgaaggagataacattgaagtgagaaaatgaacattctcagttatttgcgaagttagtaaaattgcagtccctattccatttttttctgatgaaaatggatacatgagatctcatttattgctctcctcaacacctttactgtcccagattccattcacgttccaaatcgtggacagtaaaactgaagtcagataaacacagtcacaggtacaactgggagcgagttttaacatagtggtaattttgcaaatgccaacatgaatactagtgagtactcaatttacgacagacaatttcacaaaaaccaaccacagagtgatttgatattcttgcttcttagagagttttctaatccatataatgcaatgggtcaggttgctcatatgattaaaaaaattaatcctgtagaaatgatgtattagacatctctaacccaagaaaaagatgtcttttgtataacttttaaattcccatttgtctatcttaggacaaatgatgacttcttcgtgtagtaatgaaaacgtctaaatcctgctctgtggagaaaagctagaaccatgggacattaagcaagaatactcctctgatttaggctcccagactacaactaacagtctttatgtatttatcatcttggttattgttttatctcaagcatatacagtgtgcagaaagtagaataatgaataaaatatgaccatggagaaaacccataacttttgcttctattatagaaagcagtgtttgttctttttaatttattacatgttcacattgaaacattaacatctacaatattgtctttcagtttactcttcaattactaaagcaaatgattttgatttatagcacttacacaactgcagttcaggtcacagaattgaaatctatttgataatgtctcagcattctcatgggcagccaggaaaaaaaaaaagagagagaaagacaaatagaaattttagtgggttcagataaatgattattctgacaaacctggaaaatagtaattaaacagttcattccaaaagaccccaatgtaaactctgctcacatacataatttgtataaggaaaatgtatgagtttttttcttaaaaataaatagaagcatcattgcatttataacagattgatcaatcttatgaacagattacattgggaaagtcactattattgctgtgtgtttgtatattttattctttccttttttgtgtgagcatctactatgtgccaggcagtgactgtgtctgagtgaatgtatccatggtgagcactcaggcgccatcactgccttcttggggcttacaccctattggggtgtcagagatattataacactcaatattgacccaatgggatgaaaattgttatcttcatgatttcttccaatgggcttagatttgttgggacagggcagaattagaataattatttctcacatataagagtaagtgatatgagattgggaatttcttgccaacactcaagcaaactgcagaagataattactccattttactagctcacctagtttctgaaggatggggtggggagtgagacatggagcctctggggacaaggataggggggtgggactgtcccagtggagggtgccactggaagcctccacccaagtgggccagcagctgtgcaagggtgcagcagtaggctggtgaaagccaggttgtccagatctttctaggggaagagaaggattatagaaaaggagaaaagggaggagcaagaacatctctccatggcctatttttatttttgttcccaagagactagtgtaataaccttatgcccccaaagacagcccagaactgagtatcttcagtgttcctgagtgtaaatcagtgaatctgttatatagaaagttaacatttcaggagcacaattatttcctgatttcaaatatgaacagaagactaaatgtcatttttttaaatcataaatttggtatccatagttactttacacattccagagtctaagcatggaatttaagttttgtattttgaacaaaaatagcaacatctgttttctgtatggcaaagaaaaactaaatcccagacttttatttttaaccacagaaaccatcacttctttctaaattatttgcttgcctgctcatttcccctaaacatctctgtttatgccaatggctttttaaatccaaataatactagttattgccaaattgcattagaatcctattgaattagaataattcatatacttcatatactaggcagtaaatggttagagacggtaaagatctgattgtgatcaaaagtagggtttttgttttgtttttaatcatgagcacatataaaaggaaattcaaatgaaaccaagccaatttctgatttagtaagattaaaaccatagatggagctcagttattaaggatggaaaggaggaaagcacagagtgaggagagaaaaaggggaaggaaaaaaagtagtgtttttttggggaacagtataatgtctcagaagttcttctctcttatcctgctgatgttgagacagtggctttgtataagcttttatttatacctatttcaacatcatgaaaatttttccatcagcattttcttgcaactttaaaaatcacaagggattatttgtttataaagagatacaggatctataatttattggcaatactttattttaggaatcttcaaattgtacttaataaataaatcacaggtcaaaatgactgtaaaatcaatcaggctttctcgtaagttatttcctgaaaaccatccatgataaatacaacaaggcttggcgaaacctcattactcttggaagtcttcagaggttattatacctactgatctgtatttgtctctaagagacatttgaaacacagttacaatgtcaatttggtgtaacattacctgtagtagagctcagagtatatggcagtgcacggtcactcaagatgcatggcgtgtcatttgggtcgctttgatgggtgctcgggtagaattagccttgtagagactaatgtgttcatgctatctctgatcctgtggtgttgtataaaaatgaacagctaaaaatttacccatgacaagattaaagcaaaaataaacacaaagttgttagactttaaacatga

SEQ ID NO: 238464 - DNA, 1083 bp, Artificial Sequence
  derived and/or modified sequence
atgatcgaggacaccatgaccctgctgagcctgctgggcagaatcatgagatacttcctgctgagacccgagaccctgttcctgctgtgcatcagcctggccctgtggagctacttcttccacaccgacgaggtgaagaccatcgtgaagagcagcagagacgccgtgaagatggtgaagggcaaggtggccgagatcatgcagaacgacagactgggcggcctggacgtgctggaggccgagttcagcaagacctgggagttcaagaaccacaacgtggccgtgtacagcatccagggcagaagagaccacatggaggacagattcgaggtgctgaccgacctggccaacaagacccaccccagcatcttcggcatcttcgacggccacggcggcgagaccgccgccgagtacgtgaagagcagactgcccgaggccctgaagcagcacctgcaggactacgagaaggacaaggagaacagcgtgctgagctaccagaccatcctggagcagcagatcctgagcatcgacagagagatgctggagaagctgaccgtgagctacgacgaggccggcaccacctgcctgatcgccctgctgagcgacaaggacctgaccgtggccaacgtgggcgacagcagaggcgtgctgtgcgacaaggacggcaacgccatccccctgagccacgaccacaagccctaccagctgaaggagagaaagagaatcaagagagccggcggcttcatcagcttcaacggcagctggagagtgcagggcatcctggccatgagcagaagcctgggcgactaccccctgaagaacctgaacgtggtgatccccgaccccgacatcctgaccttcgacctggacaagctgcagcccgagttcatgatcctggccagcgacggcctgtgggacgccttcagcaacgaggaggccgtgagattcatcaaggagagactggacgagccccacttcggcgccaagagcatcgtgctgcagagcttctacagaggctgccccgacaacatcaccgtgatggtggtgaagttcagaaacagcagcaagaccgaggagcagtag

SEQ ID NO: 238465 - protein, 451 aa, Artificial Sequence
  derived and/or modified sequence
MLRFYLFISLLCLSRSDAEETCPSFTRLSFHSAVVGTGLNVRLMLYTRKNLTCAQTINSSAFGNLNVTKKTTFIVHGFRPTGSPPVWMDDLVKGLLSVEDMNVVVVDWNRGATTLIYTHASSKTRKVAMVLKEFIDQMLAEGASLDDIYMIGVSLGAHISGFVGEMYDGWLGRITGLDPAGPLFNGKPHQDRLDPSDAQFVDVIHSDTDALGYKEPLGNIDFYPNGGLDQPGCPKTILGGFQYFKCDHQRSVYLYLSSLRESCTITAYPCDSYQDYRNGKCVSCGTSQKESCPLLGYYADNWKDHLRGKDPPMTKAFFDTAEESPFCMYHYFVDIITWNKNVRRGDITIKLRDKAGNTTESKINHEPTTFQKYHQVSLLARFNQDLDKVAAISLMFSTGSLIGPRYKLRILRMKLRSLAHPERPQLCRYDLVLMENVETVFQPILCPELQL

SEQ ID NO: 238466 - DNA, 1356 bp, Artificial Sequence
  derived and/or modified sequence
atgctgcgcttctacctcttcatatccctgctgtgcctgagccggtccgatgccgaggagacttgtccctctttcacacgcctctcttttcacagcgccgtggtggggaccggactcaatgtgaggttaatgctgtacactcggaagaacctcacttgtgcgcagacaatcaatagcagtgcatttgggaatctcaatgtgacgaagaagaccacgtttattgtgcacgggtttagaccaacaggctctcctcccgtctggatggatgatctagtgaaaggtctactctcagtcgaggatatgaatgtcgtggttgtcgactggaatagaggggctaccacactcatctatacgcatgccagcagcaagactcgaaaggtggccatggttctcaaggagttcattgatcaaatgcttgcagagggagcctctctggacgacatctacatgattggtgtgagtctgggggcccatatttcaggctttgtgggagaaatgtacgatggttggctaggcagaataaccggacttgaccctgcaggacctctcttcaatgggaaaccacatcaggacagactggacccctctgacgcccagttcgtggacgtcattcattccgacacagacgctctgggatacaaggagccgcttggcaacatcgacttttaccccaatggaggcctggaccagcccggctgtcccaagaccatcctgggcggattccagtacttcaagtgtgaccatcagcggtccgtttatctatatctgagctcactgagagagtcttgtactatcaccgcttatccctgcgactcctaccaggactacagaaacggcaagtgcgttagctgcggcactagccagaaggagtcatgtccccttttgggctactacgccgacaattggaaagatcacctgcggggcaaggatcccccgatgactaaagcgttctttgacaccgctgaagaatctcccttctgcatgtaccattacttcgtggacatcattacgtggaacaagaatgttcgaaggggcgatataacaataaagctcagggacaaggcgggtaataccacggagtcaaaaattaaccatgaacctacaaccttccagaaataccatcaagtgagtctgttggctcgctttaaccaggatctggataaggttgcagccatctccttgatgtttagcacagggtccttgatcggaccacgctacaagcttcgaatcttgaggatgaagctacggagcctagcccaccctgaaaggccccagctctgtcggtatgatttagtcctaatggagaacgtggaaactgttttccagcccatcctctgccctgagctccagctctag

SEQ ID NO: 238467 - DNA, 1356 bp, Artificial Sequence
  derived and/or modified sequence
atgctgcgcttctacctgttcatcagcctgctgtgcctgagcagaagtgatgctgaggagacctgccccagcttcacccggctgtccttccacagcgctgtggtgggcaccggcctgaatgtgcggctgatgctgtacaccaggaagaacctgacctgtgcccagaccatcaacagcagcgccttcggcaacctgaatgtgaccaagaagaccaccttcatcgtgcacggcttccggcccaccggcagcccccctgtgtggatggatgacctggtgaagggcctgctgtctgtggaggacatgaatgtggtggtggtggactggaacagaggagccaccaccctcatctacacccacgccagcagcaagaccaggaaggtggccatggtgctgaaggagttcatcgaccagatgctggccgagggcgccagcctggatgacatctacatgattggagtgtccctgggcgcccacatcagcggctttgtgggggagatgtatgatggctggctgggccgcatcaccggcctggaccctgctggccccctcttcaacgggaagccccaccaggaccggctggaccccagtgatgcccagtttgtggatgtgatccacagcgacacagatgccctgggctacaaggagcccctgggcaacatcgacttctacccaaatggaggcctggaccagcccggctgccccaagaccatcctgggcggcttccagtacttcaagtgtgaccaccagaggtctgtgtacctgtacctgagcagcctgcgggagagctgcaccatcacagcctacccctgtgacagctaccaggactacagaaatggaaaatgtgtgtcctgtggcaccagccagaaggagagctgccccctgctgggctactatgctgacaactggaaggaccacctgcggggcaaggacccccccatgaccaaggccttctttgacacagctgaggagagccccttctgcatgtaccactactttgtggacatcatcacctggaacaagaatgtgagaagaggagacatcaccatcaagctgcgggacaaggccggcaacaccacagagagcaagatcaaccacgagcccaccaccttccagaagtaccaccaggtgtccctgctggcccgcttcaaccaggacctggacaaggtggccgccatcagcctgatgttcagcacaggcagcctcatcggcccccgctacaagctgcgcatcctgaggatgaagctgcggagcctggcccaccctgagcggccccagctgtgccgctatgacctggtgctgatggagaatgtggagaccgtcttccagcccatcctgtgcccagagctgcagctgtag

SEQ ID NO: 238468 - DNA, 4026 bp, Artificial Sequence
  derived and/or modified sequence
agtccctagggaacttcctgttgtcaccacacctctgagtcgtctgagctcactgtgagcaaaatcccacagtggaaactcttaagcctctgcgaagtaaatcattcttgtgaatgtgacacacgatctctccagtttccatatgttgagattctacttattcatcagtttgttgtgcttgtcaagatcagacgcagaagaaacatgtccttcattcaccaggctgagctttcacagtgcagtggttggtacgggactaaatgtgaggctgatgctctacacaaggaaaaacctgacctgcgcacaaaccatcaactcctcagcttttgggaacttgaatgtgaccaagaaaaccaccttcattgtccatggattcaggccaacaggctcccctcctgtttggatggatgacttagtaaagggtttgctctctgttgaagacatgaacgtagttgttgttgattggaatcgaggagctacaactttaatatatacccatgcctctagtaagaccagaaaagtagccatggtcttgaaggaatttattgaccagatgttggcagaaggagcttctcttgatgacatttacatgatcggagtaagtctaggagcccacatatctgggtttgttggagagatgtacgatggatggctggggagaattacaggcctcgaccctgcaggccctttattcaacgggaaacctcaccaagacagattagatcccagtgatgcgcagtttgttgatgtcatccattccgacactgatgcactgggctacaaggagccattaggaaacatagacttctacccaaatggaggattggatcaacctggctgccccaaaacaatattgggaggatttcagtattttaaatgtgaccaccagaggtctgtatacctgtacctgtcttccctgagagagagctgcaccatcactgcgtatccctgtgactcctaccaggattataggaatggcaagtgtgtcagctgcggcacgtcacaaaaagagtcctgtccccttctgggctattatgctgataattggaaagaccatctaagggggaaagatcctccaatgacgaaggcattctttgacacagctgaggagagcccattctgcatgtatcattactttgtggatattataacatggaacaagaatgtaagaagaggggacattaccatcaaattgagagacaaagctggaaacaccacagaatccaaaatcaatcatgaacccaccacatttcagaaatatcaccaagtgagtctacttgcaagatttaatcaagatctggataaagtggctgcaatttccttgatgttctctacaggatctctaataggcccaaggtacaagctcaggattctccgaatgaagttaaggtcccttgcccatccggagaggcctcagctgtgtcggtatgatcttgtcctgatggaaaacgttgaaacagtcttccaacctattctttgcccagagttgcagttgtaactgttgccaggacacatggccataaataatagaaagaaagctacaaccacaggctgtttgaaagcttcacctcacctttctgcaaggcagaaaaagtatgaaaaaaaccaaggcttttttcagtagcgtcctatggatgtcacattgtacatcaaacaaccttgtgattataaaacgatcctgggaaggagcccctaactagggcaagtcagaaatagccaggctcgcagcagcgcagcgctgtgtctgctgtgtcctggggcctcccttgttccgacctgtcaattctgctgcctgtcacgcgggtggttctgcccatcgcggctgcgggtcaagcatcttcaagggaaggacggactggaggcctcaccgtggactcaactctgcattctccgtgccacattcctccagttcccacacgtagaagggaacgaaactgacgtctacctcatggggctgctgtgtgggtttgggaggcaaaaatctatgaagggttttttgaaatcccataggtgccacatctatgagatgtttgataaatgtgaatatgcttttacatttgggcttatctaatttgcaataagagagcctctctctatcaacaccagcttctctctcgggctgtttgctcagggaaggcaagaaagccacgtgctggccctctgccttctctaaagtgctgttggagcatggaggagctggaggagatggggatggactgacagctaagagggcggctgctgggactagatagtggatgaagaaagaaggacgaggaagccgtggggcagcctcttcacatggggacaggggatggagcatgaggcaagggaaggaaaagcagagcttatttttcacctaaggtggagaaggatcactttacaggcaacgctcattttaagcaacccttaagaaatgtttatgtttctttattaccaatgtaatctatgattattgaaggaaatttagaaaatgcgtagatacaaaattaaaaaaaaatactgtccacgatcctattagaggtaattaatgttagccttttggaacaaggctgtcacctattttgccaacacgtgaattcaaaacatgaaccggtttgcttttggagaatctgaagactccagtttgaggaatcctttgcttccctggaggtagatgctgtctgcaaatctagaatgacagcaggagtccagtcaagaggtcctgtcaggccaaggccagaaagaagggaggacaatccctggggccagatgcccagtgtgaggggaggcatgatctgtcccatggctgtggccactgcaggaaggtctgtgaaaaggaggtgacaggcccagtcacctcctcttcacccaagtgattgctccttcaactgctatctgtgaaaatagcctttgttatgaagaaattgactctctctctctttttttttttttggagttgcctaggctggagtgcaatggtacgatctcagctcactgcaacctccacctcccaggttcaattgattctcctgcctcagcctcctgagtagctgggattacaggcatgtgccaccacacccggctaatttttgtatttttattagagacagggtttcaccacgttagccaggctcgtctcgaactcctgtcctcaggtgactacccgtctcggcctcccaaagtgctgggattacaggcatgagccaccacacccggccaaaaatggattctctatgtcataaattaaagaaatctataaatgtattcctgtgtggcacatcttcttacagatttacatttgcagcaaatacagagtctgttttatttaagtgagggatgactgaactctgagtggaacaagctcttggacatgttaccatccttcctcctccttctcacatttcctcagcaattgtggatagagagatcagtgtgctgtaggccctggttttttttttttttttttttttttttttttagatggagtctccttctgttacccaggctggagtgcagtggcacgatcttggctcactgcaacctctgcctcccgggttcaagcaattctctgcctcagcctcccaagtagctgggattacaggcgcccccaccatgcctggctaatttttgtatttttagtagagacctggtttcaccatcttggccttgaactcctgaccttgtgatccactggccttggcctctcaaagttctgggattacaggtgtgagccatcgtacccggcagccctggtttcttcttagttttattggtctgtgttttgatcagcacagtcacttttttgttctctttcctggtaagcagggagtcaaaacaatagcaagaaaatgccagaaatagaatttctactactttgtaaactctaggctcgtgggtctcctagctctcagtacctggctcactgtaggatgggtagatgggtgaatgaatggataaagaaaggaagtttgttcaccggagaggagatgaatttcagtaagtttcatgtaacagtgatcaggagaaataaaggcagttataactgtg

SEQ ID NO: 238469 - DNA, 1356 bp, Artificial Sequence
  derived and/or modified sequence
atgctgcggttctacctgttcatcagcctgctgtgcctgagccggtcggacgcggaggagacctgcccctcattcactcgcctttctttccactcagctgttgtgggaaccggactaaatgtccgtcttatgctgtataccagaaagaacttgacatgcgcccaaacaataaatagctcagcattcggaaatcttaacgtgaccaaaaagactacctttatcgttcatggcttcaggcccaccgggagccctcccgtgtggatggacgacctagtgaagggactcttgtccgttgaggatatgaacgtcgttgtcgttgattggaaccgtggcgccaccaccctgatctacacgcacgcttccagtaaaacaagaaaagttgcaatggtgctcaaggagttcattgaccagatgctcgccgagggagcctccctggacgacatttatatgatcggggtgtccctgggagcacacatcagcggcttcgtaggggaaatgtacgacggctggctcggccggatcactggcctggatcctgccggtcctctctttaatgggaaacctcatcaggatcgccttgatcccagcgatgcccagttcgtagatgtaatccactctgacacggacgcattgggatataaggagcccctcggtaatattgatttctaccccaacgggggtctggatcagccgggatgtcccaaaaccattttaggagggtttcaatactttaaatgcgaccaccaaagaagcgtctacttatatctgtcgtccttgagagaaagctgcaccattaccgcttacccttgcgattcctatcaggactatcggaatggtaagtgcgtgagttgcggcacctcacagaaagagagttgcccgctattagggtactatgcggacaactggaaggatcaccttcgcggaaaagatcctccaatgacaaaggccttcttcgatactgcggaagaatcccccttctgcatgtaccactacttcgtggacatcatcacctggaataaaaacgttcggaggggtgacataacaatcaagttacgggacaaggcaggcaacactactgagagcaagattaatcacgagcctacaacctttcaaaaatatcaccaggtgtctctgctggcacggttcaaccaggaccttgataaggtggcagcaatttcgctcatgttttcgacaggatccctcatcggccctcgatacaaactccgcatcctgaggatgaagttgcggtctctggcccaccccgagcggcctcaactgtgtcgatacgatctggtactgatggaaaacgttgaaaccgtctttcagccaatcctgtgtcctgaacttcagctgtag

SEQ ID NO: 238470 - DNA, 1356 bp, Artificial Sequence
  derived and/or modified sequence
atgttacgattttacctgtttatatccttactctgcctgagtcgctccgacgcggaagagacctgcccttcctttaccaggcttagtttccactccgccgttgttggtacgggcttaaatgtgaggcttatgctgtacactaggaaaaaccttacctgcgcccaaactatcaactctagcgcattcggaaatctgaatgtgaccaaaaagacaaccttcattgtccatggctttcgccctactggctctcccccagtttggatggacgacctcgtaaaaggcctcctgtcagttgaagacatgaatgtggttgtcgtcgactggaatcgtggggcaaccaccttaatctacacccacgcgtccagcaagactcgcaaggtggccatggtcctcaaagaatttattgaccagatgctcgcagagggagcctctctggatgacatttacatgatcggggtttctctgggtgcgcatatttccgggtttgtgggcgagatgtacgatgggtggctcggcagaatcactggccttgatcccgcaggcccattgtttaacggaaaaccccatcaggacagactggacccttcagacgcccagtttgttgacgtgatccacagcgatacagacgcccttgggtacaaggagcctctggggaacattgacttttatcccaacgggggacttgaccagcctggatgcccaaagacaatcctgggcggtttccaatacttcaaatgcgatcaccagagatcagtgtacctttatttgagctccctacgcgaatcctgtaccattaccgcatacccttgcgatagttaccaggattatcgcaatggtaaatgcgtcagctgtggtacaagccaaaaagaaagctgcccccttcttggttactacgccgacaattggaaagaccatttacgcggaaaggatccccctatgaccaaagccttttttgatactgccgaggagtctcctttctgcatgtaccattacttcgtcgacattatcacctggaacaaaaacgtgaggaggggcgacatcacaatcaagctgagagacaaagctggcaacaccactgaatcgaagattaatcacgagccgaccactttccagaagtaccaccaggtgagcctgctagccagattcaaccaagacctggataaagtggcggctatttctctcatgtttagtactggcagtctgatcgggcctcggtacaaactgaggatattacgcatgaaattgagaagtttggcccaccccgagagacctcagttgtgtaggtacgacttggtactgatggaaaacgtcgagactgtcttccagccgattctatgtccagagctgcagctttag

SEQ ID NO: 238471 - DNA, 1356 bp, Artificial Sequence
  derived and/or modified sequence
atgctgagattctacctgttcatcagcctgctgtgcctgagcagaagcgacgccgaggagacctgccccagcttcaccagactgagcttccacagcgccgtggtgggcaccggcctgaacgtgagactgatgctgtacaccagaaagaacctgacctgcgcccagaccatcaacagcagcgccttcggcaacctgaacgtgaccaagaagaccaccttcatcgtgcacggcttcagacccaccggcagcccccccgtgtggatggacgacctggtgaagggcctgctgagcgtggaggacatgaacgtggtggtggtggactggaacagaggcgccaccaccctgatctacacccacgccagcagcaagaccagaaaggtggccatggtgctgaaggagttcatcgaccagatgctggccgagggcgccagcctggacgacatctacatgatcggcgtgagcctgggcgcccacatcagcggcttcgtgggcgagatgtacgacggctggctgggcagaatcaccggcctggaccccgccggccccctgttcaacggcaagccccaccaggacagactggaccccagcgacgcccagttcgtggacgtgatccacagcgacaccgacgccctgggctacaaggagcccctgggcaacatcgacttctaccccaacggcggcctggaccagcccggctgccccaagaccatcctgggcggcttccagtacttcaagtgcgaccaccagagaagcgtgtacctgtacctgagcagcctgagagagagctgcaccatcaccgcctacccctgcgacagctaccaggactacagaaacggcaagtgcgtgagctgcggcaccagccagaaggagagctgccccctgctgggctactacgccgacaactggaaggaccacctgagaggcaaggacccccccatgaccaaggccttcttcgacaccgccgaggagagccccttctgcatgtaccactacttcgtggacatcatcacctggaacaagaacgtgagaagaggcgacatcaccatcaagctgagagacaaggccggcaacaccaccgagagcaagatcaaccacgagcccaccaccttccagaagtaccaccaggtgagcctgctggccagattcaaccaggacctggacaaggtggccgccatcagcctgatgttcagcaccggcagcctgatcggccccagatacaagctgagaatcctgagaatgaagctgagaagcctggcccaccccgagagaccccagctgtgcagatacgacctggtgctgatggagaacgtggagaccgtgttccagcccatcctgtgccccgagctgcagctgtag

SEQ ID NO: 238472 - protein, 180 aa, Artificial Sequence
  derived and/or modified sequence
MQAEGRGTGGSTGDADGPGGPGIPDGPGGNAGGPGEAGATGGRGPRGAGAARASGPGGGAPRGPHGGAASGLNGCCRCGARGPESRLLEFYLAMPFATPMEAELARRSLAQDAPPLPVPGVLLKEFTVSGNILTIRLTAADHRQLQLSISSCLQQLSLLMWITQCFLPVFLAQPPSGQRR

SEQ ID NO: 238473 - DNA, 543 bp, Artificial Sequence
  derived and/or modified sequence
atgcaggccgagggcagaggcaccggcggcagcaccggcgacgccgacggccccggcggccccggcatccccgacggccccggcggcaacgccggcggccccggcgaggccggcgccaccggcggcagaggccccagaggcgccggcgccgccagagccagcggccccggcggcggcgcccccagaggcccccacggcggcgccgccagcggcctgaacggctgctgcagatgcggcgccagaggccccgagagcagactgctggagttctacctggccatgcccttcgccacccccatggaggccgagctggccagaagaagcctggcccaggacgccccccccctgcccgtgcccggcgtgctgctgaaggagttcaccgtgagcggcaacatcctgaccatcagactgaccgccgccgaccacagacagctgcagctgagcatcagcagctgcctgcagcagctgagcctgctgatgtggatcacccagtgcttcctgcccgtgttcctggcccagccccccagcggccagagaagatag

SEQ ID NO: 238474 - DNA, 747 bp, Artificial Sequence
  derived and/or modified sequence
atcctcgtgggccctgaccttctctctgagagccgggcagaggctccggagccatgcaggccgaaggccggggcacagggggttcgacgggcgatgctgatggcccaggaggccctggcattcctgatggcccagggggcaatgctggcggcccaggagaggcgggtgccacgggcggcagaggtccccggggcgcaggggcagcaagggcctcggggccgggaggaggcgccccgcggggtccgcatggcggcgcggcttcagggctgaatggatgctgcagatgcggggccagggggccggagagccgcctgcttgagttctacctcgccatgcctttcgcgacacccatggaagcagagctggcccgcaggagcctggcccaggatgccccaccgcttcccgtgccaggggtgcttctgaaggagttcactgtgtccggcaacatactgactatccgactgactgctgcagaccaccgccaactgcagctctccatcagctcctgtctccagcagctttccctgttgatgtggatcacgcagtgctttctgcccgtgtttttggctcagcctccctcagggcagaggcgctaagcccagcctggcgccccttcctaggtcatgcctcctcccctagggaatggtcccagcacgagtggccagttcattgtgggggcctgattgtttgtcgctggaggaggacggcttacatgtttgtttctgtagaaaataaaactgagctacg

SEQ ID NO: 238475 - DNA, 543 bp, Artificial Sequence
  derived and/or modified sequence
atgcaggcagaggggagaggcacaggaggatctactggcgacgccgacggcccgggtggccccggcatccctgatggaccaggcgggaatgctggaggccccggagaagctggagctacgggcggcagagggccgcgcggcgctggagccgcgcgggcctccggacccggaggcggtgctccaaggggaccccatggcggggccgcgagcggcctgaacggttgttgtcggtgcggcgcaaggggtcccgaaagccggctgctcgagttctatctggcaatgccttttgccacacccatggaagctgagctcgcgagaagatccctggctcaggacgcacctcctctcccagttccaggtgttctgctcaaagaatttactgttagtgggaacattcttactatccgcctgactgccgccgaccacagacagctgcagttgtctatatcgagttgtctccagcagctgtccctcttaatgtggattacacagtgctttttacctgtatttttggcccagccaccttctggtcagcgacgctag

SEQ ID NO: 238476 - DNA, 543 bp, Artificial Sequence
  derived and/or modified sequence
atgcaggccgagggccggggcaccggcggcagcactggagatgctgatggccctgggggccctggcatcccagatggccctggaggaaatgccggcggccctggagaggccggggccaccggcggccggggccccaggggggccggggccgcccgggccagcggccctgggggcggggccccccggggcccccatggaggagctgccagcggcctgaatggctgctgccgctgtggggcccggggccctgagagccggctgctggagttctacctggccatgccctttgccacccccatggaggccgagctggcccggcgcagcctggcccaggatgccccacccctgcctgtgcctggggtgctgctgaaggagttcaccgtgtctggcaacatcctgaccatccggctgacagctgctgaccaccggcagctgcagctgagcatcagcagctgcctgcagcagctgagcctgctgatgtggatcacccagtgcttcctgcccgtcttcctggcccagccccccagcggccagaggaggtag

SEQ ID NO: 238477 - DNA, 543 bp, Artificial Sequence
  derived and/or modified sequence
atgcaggccgagggccggggcaccggcggcagcaccggcgacgccgacggcccgggaggacccgggattcccgatggacctggaggcaatgccggagggccaggtgaggccggagctactggaggcagaggcccccggggggcaggggcagcccgtgcttcgggtcctggagggggtgccccacgcggccctcatgggggagccgcttcagggctcaacgggtgctgtcgatgcggagctagaggacccgaaagccggctgctcgagttctacttggctatgccttttgccactccgatggaggccgagctggcccggcgtagcctcgcccaagatgcaccccccctgccagtgcccggcgtgctgctcaaggaatttactgtgtctgggaacattctcaccatccggctgacagctgccgaccatcgccagctgcagctcagtatctccagctgcttacagcagctctctctgctgatgtggatcacacagtgttttttaccagtgttcctagcccaacccccaagtgggcagcgtagatag

SEQ ID NO: 238478 - DNA, 543 bp, Artificial Sequence
  derived and/or modified sequence
atgcaggctgaaggtagaggaacggggggttcaacaggcgatgccgatggcccaggcggtccaggcatacctgatggacctggaggcaatgccggtgggcctggcgaggctggcgcaaccggcggacgtggacccaggggagcaggtgccgctagggctagcggccctggtggcggtgccccaagaggacctcatggcggtgcggcaagtgggcttaacggctgctgccgatgcggtgctagggggcctgagagccggctgcttgaattttacctggccatgccttttgccacccctatggaagccgagctagcgcgtcgctcactggcccaggatgctcccccattacccgttcccggagtactgctaaaagagttcacagttagcgggaacatcctgaccattcggctgactgccgctgaccacagacagttacaactttcaatctctagttgcttgcagcagctgagtttactgatgtggattacccagtgtttccttcccgtttttctggcccagcccccttccggtcagcgccgatag

SEQ ID NO: 238479 - DNA, 543 bp, Artificial Sequence
  derived and/or modified sequence
atgcaggccgaagggcgaggcactggcggttcaaccggggacgcagatggtcctggtggccctggaattcccgatggcccgggaggcaacgccggcggaccgggggaagccggcgctacaggggggcgaggccccaggggcgctggagctgcgcgagccagcggacctggtggcggagccccacgaggccctcacggaggggcggctagtggtctgaatgggtgttgtcgctgtggtgcaaggggaccggagagcagacttctcgagttttatttggccatgccttttgcaacccctatggaggccgagctcgctagacgctcgctggcgcaggatgcaccgccactgcccgtgccaggcgtgcttttgaaggagtttaccgtgtccggtaacatactcacaatcagattaaccgccgccgaccacagacagttgcagctttctatcagttcatgtctgcagcaactgagccttctcatgtggattacgcagtgtttcctgccagtgtttttggctcagccaccatccggccaacgcagatag

SEQ ID NO: 238480 - DNA, 543 bp, Artificial Sequence
  derived and/or modified sequence
atgcaggccgagggccggggcaccggcggcagcaccggcgacgccgatggaccaggcgggcccgggatcccggacggccccggagggaacgccggcggccctggggaagccggcgccaccggggggagaggtcccaggggtgctggcgccgcaagagcctccggcccagggggaggagctccacgagggcctcatggcggagccgcatccggtttgaatggttgctgcagatgcggcgctcgaggacccgagtccagattgctggaattctatctagcgatgcccttcgccacacccatggaggctgaactcgcacgaaggtcgttggcccaggacgctcctcccctcccagtaccaggagttttgctcaaggaatttactgtgagcggaaatatccttaccattcgtctcacagccgcagatcacagacagttacagttgtcgattagcagctgcctccagcagctttctcttctcatgtggatcacacagtgcttccttcccgtttttttggcgcagccaccctctggccagcgaaggtag

SEQ ID NO: 238481 - DNA, 543 bp, Artificial Sequence
  derived and/or modified sequence
atgcaagctgaagggcgaggcacaggtggatctaccggagacgccgacggcccaggcggacctggcattccagacggacccggaggtaatgccggtggccctggagaggcgggtgccaccggagggaggggcccacggggagctggcgcagccagagccagtggaccgggaggaggggctcctcgcggacctcacggcggtgcagcttcagggctcaatggctgctgtcggtgcggggctcgcggacccgagagccgtctactggaattctatctggccatgccatttgccacccctatggaagctgagctggcgcgtagatctctggcacaggatgctcctcctctccctgtgcctggggttctcttgaaagaatttacagtttccgggaacatcctgaccattcgactgacagccgctgaccaccgccagctgcagctgtccatttcttcttgtctacagcagctctcactcttgatgtggatcacccagtgttttctgcccgtctttctggcgcagcccccttctggacagcgtagatag

SEQ ID NO: 238482 - DNA, 748 bp, Artificial Sequence
  derived and/or modified sequence
atcctcgtgggccctgaccttctctctgagagccgggcagaggctccggagccatgcaggccgaaggccggggcacagggggttcgacgggcgatgctgatggcccaggaggccctggcattcctgatggcccagggggcaatgctggcggcccaggagaggcgggtgccacgggcggcagaggtccccggggcgcaggggcagcaagggcctcggggccgggaggaggcgccccgcggggtccgcatggcggcgcggcttcagggctgaatggatgctgcagatgcggggccagggggccggagagccgcctgcttgagttctacctcgccatgcctttcgcgacacccatggaagcagagctggcccgcaggagcctggcccaggatgccccaccgcttcccgtgccaggggtgcttctgaaggagttcactgtgtccggcaacatactgactatccgactgactgctgcagaccaccgccaactgcagctctccatcagctcctgtctccagcagctttccctgttgatgtggatcacgcagtgctttctgcccgtgtttttggctcagcctccctcagggcagaggcgctaagcccagcctggcgccccttcctaggtcatgcctcctcccctagggaatggtcccagcacgagtggccagttcattgtgggggcctgattgtttgtcgctggaggaggacggcttacatgtttgtttctgtagaaaataaaactgagctacga

SEQ ID NO: 238483 - protein, 541 aa, Artificial Sequence
  derived and/or modified sequence
MFSWMGRQAGGRERAGGADAVQTVTGGLRSLYLRKVLPLEEAYRFHEFHSPALEDADFENKPMILLVGQYSTGKTTFIRYLLEQDFPGMRIGPEPTTDSFIAVMYGETEGSTPGNALVVDPKKPFRKLSRFGNAFLNRFMCSQLPNQVLKSISVIDSPGILSGEKQRISRGYDFCQVLQWFAERVDRIILLFDAHKLDISDEFSEAIKAFRGQDDKIRVVLNKADQVDTQQLMRVYGALMWSLGKVINTPEVLRVYIGSFWAQPLQNTDNRRLFEAEAQDLFRDIQSLPQKAAVRKLNDLIKRARLAKVHAYIISYLKKEMPSVFGKENKKRELISRLPEIYIQLQREYQISAGDFPEVKAMQEQLENYDFTKFHSLKPKLIEAVDNMLSNKISPLMNLISQEETSTPTQLVQGGAFDGTTEGPFNQGYGEGAKEGADEEEWVVAKDKPVYDELFYTLSPINGKISGVNAKKEMVTSKLPNSVLGKIWKLADCDCDGMLDEEEFALAKHLIKIKLDGYELPSSLPPHLVPPSHRKSLPKAD

SEQ ID NO: 238484 - DNA, 1626 bp, Artificial Sequence
  derived and/or modified sequence
atgttcagctggatgggcagacaggccggcggcagagagagagccggcggcgccgacgccgtgcagaccgtgaccggcggcctgagaagcctgtacctgagaaaggtgctgcccctggaggaggcctacagattccacgagttccacagccccgccctggaggacgccgacttcgagaacaagcccatgatcctgctggtgggccagtacagcaccggcaagaccaccttcatcagatacctgctggagcaggacttccccggcatgagaatcggccccgagcccaccaccgacagcttcatcgccgtgatgtacggcgagaccgagggcagcacccccggcaacgccctggtggtggaccccaagaagcccttcagaaagctgagcagattcggcaacgccttcctgaacagattcatgtgcagccagctgcccaaccaggtgctgaagagcatcagcgtgatcgacagccccggcatcctgagcggcgagaagcagagaatcagcagaggctacgacttctgccaggtgctgcagtggttcgccgagagagtggacagaatcatcctgctgttcgacgcccacaagctggacatcagcgacgagttcagcgaggccatcaaggccttcagaggccaggacgacaagatcagagtggtgctgaacaaggccgaccaggtggacacccagcagctgatgagagtgtacggcgccctgatgtggagcctgggcaaggtgatcaacacccccgaggtgctgagagtgtacatcggcagcttctgggcccagcccctgcagaacaccgacaacagaagactgttcgaggccgaggcccaggacctgttcagagacatccagagcctgccccagaaggccgccgtgagaaagctgaacgacctgatcaagagagccagactggccaaggtgcacgcctacatcatcagctacctgaagaaggagatgcccagcgtgttcggcaaggagaacaagaagagagagctgatcagcagactgcccgagatctacatccagctgcagagagagtaccagatcagcgccggcgacttccccgaggtgaaggccatgcaggagcagctggagaactacgacttcaccaagttccacagcctgaagcccaagctgatcgaggccgtggacaacatgctgagcaacaagatcagccccctgatgaacctgatcagccaggaggagaccagcacccccacccagctggtgcagggcggcgccttcgacggcaccaccgagggccccttcaaccagggctacggcgagggcgccaaggagggcgccgacgaggaggagtgggtggtggccaaggacaagcccgtgtacgacgagctgttctacaccctgagccccatcaacggcaagatcagcggcgtgaacgccaagaaggagatggtgaccagcaagctgcccaacagcgtgctgggcaagatctggaagctggccgactgcgactgcgacggcatgctggacgaggaggagttcgccctggccaagcacctgatcaagatcaagctggacggctacgagctgcccagcagcctgcccccccacctggtgccccccagccacagaaagagcctgcccaaggccgactag

SEQ ID NO: 238485 - DNA, 1626 bp, Artificial Sequence
  derived and/or modified sequence
atgttctcctggatggggagacaagcgggcgggcgcgagagagctggaggcgccgacgcagtccagacggtgaccggaggactaaggtctctgtacttgcggaaggtcttgcccctggaagaagcgtaccgcttccatgagtttcactcccccgctcttgaggacgcagatttcgaaaacaagccaatgattttgttggtgggccagtattctacgggaaagacaaccttcatccgatacctcttagaacaagacttcccaggtatgcggatcggacctgagccaactaccgatagctttatcgctgtgatgtatggggagaccgagggctccacacccggcaatgctctggtcgtggatccaaagaagccatttagaaagctgtctaggttcgggaacgccttcctaaacagatttatgtgtagccagcttccgaaccaggtactcaagtccatctcggtgatcgacagtccaggaattctaagtggcgaaaagcaacgcatctccagaggctacgatttctgccaggtcctgcagtggtttgcggaacgagtggaccgcattatcttgcttttcgacgcccataaacttgatatctccgacgagttctcggaggcaatcaaggcattccggggacaggatgataaaattagagtggtgcttaacaaggcggatcaggtggacacccagcagttgatgagggtgtacggagctctgatgtggtcgttaggaaaggtcatcaacactcccgaagtgctgcgagtgtacatcgggtccttctgggctcaacccctgcaaaataccgataaccgcaggttgttcgaggccgaagcccaggacctgtttcgggatattcagtcgctgcctcagaaggccgctgtacgcaaattaaacgacctgattaagcgggcacggcttgcgaaagtacacgcctacatcatctcttacctgaagaaggaaatgcctagcgtttttggaaaagagaacaagaagcgcgaactcataagtcgccttcccgaaatttatatccagctgcaacgtgaatatcaaatttcagctggagattttccagaggtgaaggccatgcaggaacagcttgaaaattacgactttactaagttccactccctcaagccaaaattgatagaggccgtggacaacatgttgtcgaataaaatttctcccttaatgaatctgatctcccaggaagaaacctcaactccaacgcagctggtgcagggaggagccttcgacgggactactgagggtcctttcaaccaggggtatggcgaaggagctaaggaaggggcagatgaagaagaatgggtagtggccaaagataagcccgtttacgatgaacttttctacacgctgtcacctattaatggcaaaataagcggcgtgaacgctaagaaggagatggtgaccagcaagcttcccaatagcgttctgggcaagatttggaagttggctgattgtgattgtgatgggatgttagacgaggaagagttcgccctcgctaagcacctcatcaaaatcaagcttgatggatatgaactcccttcctccctgcccccccatctcgtgcccccctctcacaggaagtccctcccaaaggctgattag

SEQ ID NO: 238486 - DNA, 1626 bp, Artificial Sequence
  derived and/or modified sequence
atgttctcctggatgggccggcaggccggcggccgggagagagctggaggagcagatgctgtgcagacagtgactggaggcctgcggagcctgtacctgaggaaggtgctgcccctggaggaggcctaccgcttccacgagttccacagccctgccctggaggatgctgactttgagaacaagcccatgatcctgctggtgggccagtacagcacaggcaagaccaccttcatccgctacctgctggagcaggacttccctggcatgagaattggccctgagcccaccacagacagcttcatcgctgtgatgtatggagaaacagagggcagcaccccaggaaatgccctggtggtggaccccaagaagcccttcaggaagctgagcagatttggaaatgccttcctgaaccgcttcatgtgcagccagctgcccaaccaggtgctgaagagcatctctgtgattgacagccctggcatcctgagcggggagaagcagaggatcagccggggctatgacttctgccaggtgctgcagtggtttgctgagcgggtggaccgcatcatcctgctgtttgatgcccacaagctggacatcagtgatgagttcagcgaggccatcaaggccttccggggccaggatgacaagatccgggtggtgctgaacaaggctgaccaggtggacacccagcagctgatgagggtgtatggagccctgatgtggagcctgggcaaggtgatcaacaccccagaggtgctgcgggtgtacatcggcagcttctgggcccagcccctgcagaacacagacaacagaagactctttgaggccgaggcccaggacctcttccgggacatccagagcctgccccagaaggctgctgtgaggaagctgaatgacctgatcaagagggcccggctggccaaggtgcacgcctacatcatctcctacctgaagaaggagatgcccagcgtgtttgggaaggagaacaagaagcgggagctgatcagccggctgcctgagatctacatccagctgcagcgggagtaccagatctctgctggggacttccctgaggtgaaggccatgcaggagcagctggagaactatgacttcaccaagttccacagcctgaagcccaagctgattgaggccgtggacaacatgctgagcaacaagatcagccccctgatgaacctgatcagccaggaggagaccagcacccccacccagctggtgcagggcggggcctttgatggcaccacagagggccccttcaaccagggctatggagagggcgccaaggagggcgcagatgaggaggagtgggtggtggccaaggacaagcctgtgtatgatgagctgttctacaccctgagccccatcaacgggaagatcagcggcgtgaatgccaagaaggagatggtgaccagcaagctgcccaacagcgtgctgggcaagatctggaagctggccgactgtgactgtgatggcatgctggatgaggaggagtttgccctggccaagcacctgatcaagatcaagctggatggctatgagctgcccagcagcctgcccccccacctggtgccccccagccacaggaagagcctgcccaaggctgactag

SEQ ID NO: 238487 - DNA, 1626 bp, Artificial Sequence
  derived and/or modified sequence
atgttcagctggatgggccggcaggccggcggccgggagcgggccgggggggcagatgctgtccaaactgtcacagggggactgagatctctgtaccttcgaaaggttttacccctggaagaggcatatagattccacgaattccatagtcctgctctggaagacgctgacttcgagaacaagccaatgatcttactggtaggccagtattctacaggtaagactacattcattcgctatttgctggaacaggacttccctgggatgaggatcggtcctgaacccacaactgattcattcattgctgtgatgtatggtgagacagagggtagtactcccgggaacgccctggtggtggaccctaaaaagccatttaggaagctgtccagattcgggaacgcttttctgaaccgctttatgtgctctcagctgccaaaccaagtcttgaaaagtatcagcgtaatcgatagccctggcattctcagtggagaaaaacagaggatatcccgaggatatgatttctgccaagtgctgcagtggtttgcagagcgagtggaccgaatcatccttttgtttgatgcgcataaactagatatttccgacgagttctcagaagccatcaaagccttcagaggtcaggacgacaagatccgtgtcgttttgaacaaagccgaccaggttgacacgcagcagctcatgcgagtgtacggagccctcatgtggtctcttggaaaggttattaatacccccgaagtgttgcgcgtgtacatcgggtccttctgggctcaacccctgcagaacactgataataggagactttttgaagcggaagctcaggatctgttccgggacattcagtccctgccccagaaggccgctgtgcgaaagctgaatgacttgatcaaacgcgcacgcctggccaaggtccacgcatatattatttcgtatcttaagaaggagatgccaagcgtgtttggcaaagaaaacaagaaaagagaactaatctcccggcttcccgagatttacatccagcttcagagggagtaccagatttccgcaggcgatttcccggaagtgaaggccatgcaggaacagctggagaattacgattttacaaaatttcatagcctgaaacccaagttgattgaggccgtggataatatgctctcgaataagatatccccactcatgaacctgattagccaggaggagactagcacccccactcagttggtgcagggtggcgccttcgacggcacaactgaggggccatttaatcaggggtacggcgagggtgccaaggaaggtgccgacgaggaagagtgggtggttgcaaaggacaagcctgtgtatgatgaactgttttatacactttctcctatcaacgggaagatctcaggcgttaacgccaagaaggaaatggtaactagtaaattgcccaattccgtgctgggcaagatatggaagttggccgattgcgactgcgacgggatgctggatgaggaggagtttgccctcgccaagcaccttattaagataaaactggacggctacgaactgcctagctctctgccccctcatctggtaccaccttcgcatagaaaaagcctccccaaagcagactag

SEQ ID NO: 238488 - DNA, 1626 bp, Artificial Sequence
  derived and/or modified sequence
atgttctcctggatgggccgtcaggcaggtggaagggaacgagctgggggagctgatgcagtccagaccgtaaccggcggactccggagcctttatctgcgcaaggtgttgccgctggaggaagcgtacagatttcatgagttccattctcccgcattagaagacgctgattttgaaaataagccaatgatcttgctcgtcggccagtactcaaccggcaagaccacctttatccgctacttgcttgaacaggacttcccagggatgagaatcggtcctgagcctacaactgatagcttcatcgctgtcatgtatggggaaactgaaggctcaacccctggaaatgcgcttgtagtggacccaaagaagcccttcaggaagctgtcccggttcggaaacgcctttctgaaccgttttatgtgctcgcagttgccaaatcaggttcttaaatctatcagcgttatcgatagtccaggtattctctcgggcgaaaagcagagaatttcacggggatatgacttttgccaggtcctccagtggtttgcagagagagtcgaccgcatcatcctgctattcgacgcccataaattggacatatccgacgaattcagcgaggcgattaaagcctttaggggccaggacgacaagatccgcgtggtgctcaataaggcagatcaggttgatacgcagcagctcatgagggtgtacggagcactgatgtggagtctggggaaggtgattaacacccccgaagtgctgagagtgtatatcggctccttttgggcgcaacccttacagaatacagacaatcgtaggcttttcgaagcagaagctcaggatctgttccgcgatattcagagtctgccacagaaagcagccgtgagaaagctgaatgaccttataaagagagcacggctcgcaaaagttcacgcatacataatctcctatctgaagaaagaaatgccaagcgtgttcggcaaggagaacaagaaacgggaactcatttcaaggctccccgaaatctacatccaactgcagagggaataccagatctctgctggcgacttcccagaggttaaagcaatgcaggagcagctggagaattacgatttcaccaaatttcactccctcaagccgaagctgatagaggcagttgacaacatgttatctaataaaataagcccactgatgaatctgatatcccaagaggaaacaagtaccccgacccagttagtgcagggcggtgctttcgatggaacaacagagggaccatttaatcagggatacggcgagggggctaaggagggcgctgatgaggaagagtgggtcgtggccaaggataagccagtgtacgatgaacttttttacaccttatcccctatcaatgggaaaatatccggcgtcaacgctaagaaagagatggtgacttctaagctccccaacagcgtgctcggcaagatctggaaacttgccgattgcgactgtgatgggatgttggacgaggaggagttcgccttggcaaagcatctaattaagattaaattggatggctacgagctgccaagctccctcccaccacatctggtcccgccttcccataggaagtctttgcctaaggccgactag

SEQ ID NO: 238489 - DNA, 3983 bp, Artificial Sequence
  derived and/or modified sequence
ccagcgcggccggggcggctcagtgcgagccggggagagtcgaacccggagcagggtcccatccgagcgtggactggcggcaggatgttcagctggatggggcggcaggcgggcgggcgcgaacgcgctggcggcgcggacgcggtgcagacggtgacgggcgggctgcgctcgctctacctgcgcaaggtgctgccgctggaggaggcgtaccgcttccacgagttccactcgcctgcgctggaggacgccgacttcgagaacaagcccatgatcctgctggtgggccagtacagcaccggcaagaccaccttcatcagatacctactggagcaggatttcccaggcatgaggattggtccggagcccaccacagactccttcatcgccgtgatgtatggagagactgagggcagcaccccagggaatgctttagtcgtggaccccaaaaagccgtttagaaagctcagtcgctttggaaacgctttcctgaatcgattcatgtgctcacagctccccaatcaggtcctgaagagcatcagcgtcatcgacagccccggcatcctttctggggagaagcagcgcatcagccgaggctatgacttctgccaggtcctgcagtggtttgccgagagggtggacaggatcatcctgctctttgacgctcacaagctggacatctcagatgaattctcagaggccatcaaggccttccggggccaggacgacaagatccgtgtcgtgctgaacaaggccgaccaagtggacacgcagcagctgatgcgggtctacggggccctcatgtggtccctaggcaaggtcatcaacacgcccgaggtactgcgcgtctacattggctccttctgggcgcagcccctgcagaacacggacaaccgccggctcttcgaggctgaggcccaggacctctttagagacatccagagcctcccccagaaggcagcggtgcgcaagctcaacgacctcatcaagcgagcgaggctggccaaggtgcatgcctacatcatcagctacctgaagaaggagatgccaagtgtatttggaaaggaaaacaagaagagagagcttatcagcaggctaccggaaatctacattcagctacagcgagaataccagatttctgcaggggacttccctgaggtcaaggctatgcaggaacagcttgagaactatgacttcaccaaattccactcgctgaagcccaagctgatcgaggcagtggacaacatgctgagcaacaagatctcgcccctcatgaacctcatcagccaggaggagacgagcacgcccacgcagctggtgcagggcggcgccttcgatggcaccaccgagggccccttcaaccagggctacggggagggtgccaaggagggcgccgacgaggaggagtgggtcgtggccaaagacaagcccgtctacgacgagctcttctacactctgtcgcccatcaatggcaagatatcaggtgtcaacgccaagaaggagatggtgacctccaagctgcccaacagcgtcctgggcaagatctggaagctggccgactgcgactgcgacggcatgcttgatgaggaggagttcgcgctggccaagcacctcatcaagatcaagctcgacggctacgagctgcccagcagcctgcccccccacctcgtgcccccctcgcacaggaagtccctgcccaaggccgactgaggggtgggctgcagaacggggtgggaactgggggacctgggcctcaggcctgctccaccactgactcaccgaatgaccttgggcaaggcactgccctctctgtgccttggtttccccatctgtagaatggggagggtggacactggaaactagatgacttctttcacctccaaaattcccttagtttctatgaaaatattgggggtaggggggtggattaggagattgaagggttgagaagaaagagaaattgtccaaagagtcctcagaacctgcctggagaaatgcgcatgggggtgggcctggtaagtcccaggaaccacaggaagtgagctaaggctcacccagagcagctgggtctccaggctgcctgggctttttgtcctcatgaacaactctggagcagctgtctgtccctcagagggcacctggaggcagcaaagattatcttatttattttattttgttttctgctatatttagagtggcaaaaaaatagagcagagggtttctgctgtctccagactgtctaccaaagagaaggcgacagatgcctcctgggtttggaagggggatgcactgtggatctgccatccattctgcagtctccagcagagcaggcagtcaggccccagcgtgcctccatcccagtgccccgatgaccatctggtcagccctcccaacctcccttccagggggcttaccagcaaagccatattcggctaggaatttggaattcacaacctttattaacccctggcaaaacttcccgtttgcatgtcaaatcacattgaagcctgaaaattagcttttcttactggtttttccaataagtaatagcaaagcccacttatcatacttaaactacagtaaagaaaagaggtggttctctgcagtgatcgtttagtgtggccctcaaacattaaatatcccgaggtctccttggtgggtggcaggatttaaattcaatcaaatcctgtcctagtgtgtgcagtgtcttcggccctgtggacacaggtgaatgagggaccagccctgccctgggctgttgagaagagatcagtccacccagagttagacattgtttttgtagaaaacaggcatttattatgtctagggttttgtgttttttttttttccttacaggataaaagcctttatacagaaacaaaatggaacctttcatataaaaccttttctttaaaggctgtgtggttcgtatcatgaatgcccatcacgaggcaggattcgggcacatacctgtacttctgctccagagtgtgcgctccccaaatcccctgagtaaacctctctggactgctgctcagacacctgcgtcaggtggaggtgcctccccctctgtgggcaccagcttggggaggtaggtgacttttccttgcaaatctccctgcctcatctccagaaaattgcatacctgcatggcctctctgcattatttatgcaggaagagacacgaaacagcaatggccacatggtatgggggcctgctggcaccagaagtgaatgaaatcagaaccgtcccactgagtcttccaaaaggcacataattttttttttctgtcacctgcctttggtgacagggtcaaaggcacagattgaagagaaaatcttgatttgggagaagcatttatatccagatgcctacccttacactccctagcttactttctacataatttagttttaagagcaggaaatgcataacatggtttttagtcttaacaagcacttaaattcattagacgcatagaaaagaaccatttattattttattatttttatttttattttgagaggaagtctctgtcacccaggctggagtgcagtggcgcaatctcagttcactgcaacctccgcctcccaggttcaagtgattcccctgcctcagcctcccaagtagctgggactacaggcacccgccaccacgcccggctaatttttgtattttagtagagatggggttttaccatgttggtcaatatggtctcgatctcctgacctcgtgatctacccacctcggcctcccaaagtgctgtaacctaagcagacagttctgtgaatgcgtgaggaccacctgaagtctgcagccacggtggaggtcaccaaagggtgaactgagagagaagagggaattcacttgcccaaaggtttacagatgcccaggcaaactgatttttccatccagaattatcttgttctttaactctcctcaattgtcatatataaacatgaatttatatacatgtgtgtca

SEQ ID NO: 238490 - DNA, 2139 bp, Artificial Sequence
  derived and/or modified sequence
atgagccagtggtacgagctgcagcagctggacagcaagttcctggagcaggtgcaccagctgtacgacgacagcttccccatggagatcagacagtacctggcccagtggctggagaagcaggactgggagcacgccgccaacgacgtgagcttcgccaccatcagattccacgacctgctgagccagctggacgaccagtacagcagattcagcctggagaacaacttcctgctgcagcacaacatcagaaagagcaagagaaacctgcaggacaacttccaggaggaccccatccagatgagcatgatcatctacagctgcctgaaggaggagagaaagatcctggagaacgcccagagattcaaccaggcccagagcggcaacatccagagcaccgtgatgctggacaagcagaaggagctggacagcaaggtgagaaacgtgaaggacaaggtgatgtgcatcgagcacgagatcaagagcctggaggacctgcaggacgagtacgacttcaagtgcaagaccctgcagaacagagagcacgagaccaacggcgtggccaagagcgaccagaagcaggagcagctgctgctgaagaagatgtacctgatgctggacaacaagagaaaggaggtggtgcacaagatcatcgagctgctgaacgtgaccgagctgacccagaacgccctgatcaacgacgagctggtggagtggaagagaagacagcagagcgcctgcatcggcggcccccccaacgcctgcctggaccagctgcagaactggttcaccatcgtggccgagagcctgcagcaggtgagacagcagctgaagaagctggaggagctggagcagaagtacacctacgagcacgaccccatcaccaagaacaagcaggtgctgtgggacagaaccttcagcctgttccagcagctgatccagagcagcttcgtggtggagagacagccctgcatgcccacccacccccagagacccctggtgctgaagaccggcgtgcagttcaccgtgaagctgagactgctggtgaagctgcaggagctgaactacaacctgaaggtgaaggtgctgttcgacaaggacgtgaacgagagaaacaccgtgaagggcttcagaaagttcaacatcctgggcacccacaccaaggtgatgaacatggaggagagcaccaacggcagcctggccgccgagttcagacacctgcagctgaaggagcagaagaacgccggcaccagaaccaacgagggccccctgatcgtgaccgaggagctgcacagcctgagcttcgagacccagctgtgccagcccggcctggtgatcgacctggagaccaccagcctgcccgtggtggtgatcagcaacgtgagccagctgcccagcggctgggccagcatcctgtggtacaacatgctggtggccgagcccagaaacctgagcttcttcctgacccccccctgcgccagatgggcccagctgagcgaggtgctgagctggcagttcagcagcgtgaccaagagaggcctgaacgtggaccagctgaacatgctgggcgagaagctgctgggccccaacgccagccccgacggcctgatcccctggaccagattctgcaaggagaacatcaacgacaagaacttccccttctggctgtggatcgagagcatcctggagctgatcaagaagcacctgctgcccctgtggaacgacggctgcatcatgggcttcatcagcaaggagagagagagagccctgctgaaggaccagcagcccggcaccttcctgctgagattcagcgagagcagcagagagggcgccatcaccttcacctgggtggagagaagccagaacggcggcgagcccgacttccacgccgtggagccctacaccaagaaggagctgagcgccgtgaccttccccgacatcatcagaaactacaaggtgatggccgccgagaacatccccgagaaccccctgaagtacctgtaccccaacatcgacaaggaccacgccttcggcaagtactacagcagacccaaggaggcccccgagcccatggagctggacggccccaagggcaccggctacatcaagaccgagctgatcagcgtgagcgaggtgtag

SEQ ID NO: 238491 - DNA, 2145 bp, Artificial Sequence
  derived and/or modified sequence
atgtggatgagccagtggtacgagctgcagcagctggacagcaagttcctggagcaggtgcaccagctgtacgacgacagcttccccatggagatcagacagtacctggcccagtggctggagaagcaggactgggagcacgccgccaacgacgtgagcttcgccaccatcagattccacgacctgctgagccagctggacgaccagtacagcagattcagcctggagaacaacttcctgctgcagcacaacatcagaaagagcaagagaaacctgcaggacaacttccaggaggaccccatccagatgagcatgatcatctacagctgcctgaaggaggagagaaagatcctggagaacgcccagagattcaaccaggcccagagcggcaacatccagagcaccgtgatgctggacaagcagaaggagctggacagcaaggtgagaaacgtgaaggacaaggtgatgtgcatcgagcacgagatcaagagcctggaggacctgcaggacgagtacgacttcaagtgcaagaccctgcagaacagagagcacgagaccaacggcgtggccaagagcgaccagaagcaggagcagctgctgctgaagaagatgtacctgatgctggacaacaagagaaaggaggtggtgcacaagatcatcgagctgctgaacgtgaccgagctgacccagaacgccctgatcaacgacgagctggtggagtggaagagaagacagcagagcgcctgcatcggcggcccccccaacgcctgcctggaccagctgcagaactggttcaccatcgtggccgagagcctgcagcaggtgagacagcagctgaagaagctggaggagctggagcagaagtacacctacgagcacgaccccatcaccaagaacaagcaggtgctgtgggacagaaccttcagcctgttccagcagctgatccagagcagcttcgtggtggagagacagccctgcatgcccacccacccccagagacccctggtgctgaagaccggcgtgcagttcaccgtgaagctgagactgctggtgaagctgcaggagctgaactacaacctgaaggtgaaggtgctgttcgacaaggacgtgaacgagagaaacaccgtgaagggcttcagaaagttcaacatcctgggcacccacaccaaggtgatgaacatggaggagagcaccaacggcagcctggccgccgagttcagacacctgcagctgaaggagcagaagaacgccggcaccagaaccaacgagggccccctgatcgtgaccgaggagctgcacagcctgagcttcgagacccagctgtgccagcccggcctggtgatcgacctggagaccaccagcctgcccgtggtggtgatcagcaacgtgagccagctgcccagcggctgggccagcatcctgtggtacaacatgctggtggccgagcccagaaacctgagcttcttcctgacccccccctgcgccagatgggcccagctgagcgaggtgctgagctggcagttcagcagcgtgaccaagagaggcctgaacgtggaccagctgaacatgctgggcgagaagctgctgggccccaacgccagccccgacggcctgatcccctggaccagattctgcaaggagaacatcaacgacaagaacttccccttctggctgtggatcgagagcatcctggagctgatcaagaagcacctgctgcccctgtggaacgacggctgcatcatgggcttcatcagcaaggagagagagagagccctgctgaaggaccagcagcccggcaccttcctgctgagattcagcgagagcagcagagagggcgccatcaccttcacctgggtggagagaagccagaacggcggcgagcccgacttccacgccgtggagccctacaccaagaaggagctgagcgccgtgaccttccccgacatcatcagaaactacaaggtgatggccgccgagaacatccccgagaaccccctgaagtacctgtaccccaacatcgacaaggaccacgccttcggcaagtactacagcagacccaaggaggcccccgagcccatggagctggacggccccaagggcaccggctacatcaagaccgagctgatcagcgtgagcgaggtgtag

SEQ ID NO: 238492 - DNA, 543 bp, Artificial Sequence
  derived and/or modified sequence
atgagccagtggtacgagctgcagcagctggacagcaagttcctggagcaggtgcaccagctgtacgacgacagcttccccatggagatcagacagtacctggcccagtggctggagaagcaggactgggagcacgccgccaacgacgtgagcttcgccaccatcagattccacgacctgctgagccagctggacgaccagtacagcagattcagcctggagaacaacttcctgctgcagcacaacatcagaaagagcaagagaaacctgcaggacaacttccaggaggaccccatccagatgagcatgatcatctacagctgcctgaaggaggagagaaagatcctggagaacgcccagagattcaaccaggcccagagcggcaacatccagagcaccgtgatgctggacaagcagaaggagctggacagcaaggtgagaaacgtgaaggacaaggtgatgtgcatcgagcacgagatcaagagcctggaggacctgcaggacgagtacgacttcaagtgcaagaccctgcagaacagatag

SEQ ID NO: 238493 - DNA, 213 bp, Artificial Sequence
  derived and/or modified sequence
atgagccagtggtacgagctgcagcagctggacagcaagttcctggagcaggtgcaccagctgtacgacgacagcttccccatggagatcagacagtacctggcccagtggctggagaagcaggactgggagcacgccgccaacgacgtgagcttcgccaccatcagattccacgacctgctgagccagctggacgaccagtacagcagatag

SEQ ID NO: 238494 - DNA, 582 bp, Artificial Sequence
  derived and/or modified sequence
atgagccagtggtacgagctgcagcagctggacagcaagttcctggagcaggtgcaccagctgtacgacgacagcttccccatggagatcagacagtacctggcccagtggctggagaagcaggactgggagcacgccgccaacgacgtgagcttcgccaccatcagattccacgacctgctgagccagctggacgaccagtacagcagattcagcctggagaacaacttcctgctgcagcacaacatcagaaagagcaagagaaacctgcaggacaacttccaggaggaccccatccagatgagcatgatcatctacagctgcctgaaggaggagagaaagatcctggagaacgcccagagattcaaccaggcccagagcggcaacatccagagcaccgtgatgctggacaagcagaaggagctggacagcaaggtgagaaacgtgaaggacaaggtgatgtgcatcgagcacgagatcaagagcctggaggacctgcaggacgagtacgacttcaagtgcaagaccctgcagaacagaggcagcagcagccagaacaacagagtggccgagtgccactag

SEQ ID NO: 238495 - DNA, 453 bp, Artificial Sequence
  derived and/or modified sequence
atgagccagtggtacgagctgcagcagctggacagcaagttcctggagcaggtgcaccagctgtacgacgacagcttccccatggagatcagacagtacctggcccagtggctggagaagcaggactgggagcacgccgccaacgacgtgagcttcgccaccatcagattccacgacctgctgagccagctggacgaccagtacagcagattcagcctggagaacaacttcctgctgcagcacaacatcagaaagagcaagagaaacctgcaggacaacttccaggaggaccccatccagatgagcatgatcatctacagctgcctgaaggaggagagaaagatcctggagaacgcccagagattcaaccaggcccagagcggcaacatccagagcaccgtgatgctggacaagcagaaggagctggacagcaaggtgagaaacgtgaagtag

SEQ ID NO: 238496 - DNA, 483 bp, Artificial Sequence
  derived and/or modified sequence
gagtgccacgaggaccccatccagatgagcatgatcatctacagctgcctgaaggaggagagaaagatcctggagaacgcccagagattcaaccaggcccagagcggcaacatccagagcaccgtgatgctggacaagcagaaggagctggacagcaaggtgagaaacgtgaaggacaaggtgatgtgcatcgagcacgagatcaagagcctggaggacctgcaggacgagtacgacttcaagtgcaagaccctgcagaacagagagcacgagaccaacggcgtggccaagagcgaccagaagcaggagcagctgctgctgaagaagatgtacctgatgctggacaacaagagaaaggaggtggtgcacaagatcatcgagctgctgaacgtgaccgagctgacccagaacgccctgatcaacgacgagctggtggagtggaagagaagacagcagagcgcctgcatcggcggccccccctag

SEQ ID NO: 238497 - DNA, 2139 bp, Artificial Sequence
  derived and/or modified sequence
atgagccagtggtacgaactgcagcagctagacagtaagttcttagagcaagtccatcagttgtatgatgatagcttccctatggagatccggcagtacctggcgcaatggctagagaaacaggactgggagcacgccgcaaatgatgtttcttttgcaaccatcagatttcacgatctgctatctcagcttgacgatcaatactccaggttcagccttgagaacaacttcctgctgcaacataatatccgaaagtctaaaagaaaccttcaggataattttcaggaagatcccattcagatgtcaatgatcatatattcatgtctaaaggaagagcgaaaaatactggaaaacgcccaacggtttaaccaagcacaatccggaaacatacagtctacagtgatgctagataagcaaaaagaactcgacagcaaggtacgcaacgttaaggacaaagttatgtgtatcgagcatgagattaagagcctcgaggacctccaggacgaatatgatttcaagtgcaagactctccagaaccgggagcacgagaccaacggagtcgctaaatcggaccagaagcaagagcagctgctcctcaaaaagatgtatctgatgctagacaacaaaaggaaggaagtggttcacaagattattgagttgctgaatgttacggaactgacacagaatgccttgatcaacgatgaattggtcgagtggaaacgcaggcagcagtccgcctgtatcggggggccgccgaatgcctgccttgatcagttacagaactggttcacgattgtcgcagaaagtctgcagcaggtgaggcagcaactaaagaaactcgaggaactcgaacagaaatacacctacgagcacgatccgatcacaaagaataaacaggtcttgtgggacaggactttctcccttttccagcaactgattcagagtagcttcgtcgtggagagacagccatgtatgccaactcacccccagcggcctctcgtgcttaagactggcgtacagtttactgttaaactgagactcctcgttaaactacaagaactgaactataaccttaaagtgaaagtcctgtttgataaggacgtgaacgaacgtaacaccgtgaaagggttccgaaaattcaacatactaggcacccataccaaggtcatgaacatggaagagagtaccaacggatccctcgctgccgagttcagacacctgcaactgaaagaacagaaaaatgccgggaccagaactaacgaagggcctctgatcgtgaccgaggagttgcatagcctgagttttgagactcagctgtgccagcctggactcgtaattgatttagaaacaacttccctgcccgttgtcgtgatttctaacgtgagccagctgccctcgggctgggcctcaatcctctggtacaacatgctggttgcagaaccgcgaaacctgagtttttttctaacacctccgtgcgctaggtgggcccagctgtcggaagtgctaagttggcagtttagctctgtcaccaagagggggctgaatgtagaccagctgaacatgctgggtgagaagctcctcggacctaacgccagcccagacggattgatcccgtggaccagattctgtaaagaaaatattaacgataaaaacttcccattttggttgtggatagaatccatcttggagcttattaagaagcatttgctgccgttatggaacgatggatgcattatgggctttattagcaaggagagagaaagggcactgctgaaagatcaacagccaggaacgtttctgcttcgtttcagcgagagcagtcgagagggggctataacctttacatgggttgagcgcagccagaatggcggggagccagactttcatgccgtggaaccctacacgaagaaggagctctccgcggtgacgttccctgatatcatccgtaactataaggtgatggctgctgaaaacatacctgagaatcccttaaagtatctttaccccaatattgataaggatcacgcatttggtaaatactacagtaggcccaaggaagcccccgaaccaatggaactggatggacctaagggaacaggatacattaagaccgaactcatctcagtgagcgaagtgtag

SEQ ID NO: 238498 - DNA, 2145 bp, Artificial Sequence
  derived and/or modified sequence
atgtggatgagccagtggtacgaattgcagcagctggacagcaagttcctcgaacaggtgcaccagttgtacgacgattccttccctatggagattcgccagtatctggcccagtggttagagaaacaggactgggaacacgctgcaaatgacgtgagcttcgccacaatccgctttcacgatctgctctcacaactggacgaccagtactcgagatttagtctggagaacaactttctgctgcagcacaatatccgaaaatcaaaaaggaacctgcaggacaatttccaggaggatccaatccagatgtcgatgattatttactcctgtctgaaagaggagcgcaaaatattggagaacgctcagcgtttcaaccaagcacagtcaggaaacatacaatccaccgtgatgcttgacaagcaaaaggagctggattccaaggtgcggaacgtgaaagataaggtgatgtgcattgaacacgaaatcaagagtcttgaggatctccaggacgagtacgacttcaagtgtaagactcttcagaacagagaacacgaaactaatggggtagcaaagagcgatcagaagcaggagcaacttctgctgaaaaagatgtatttgatgctcgacaataagaggaaggaggttgtgcataagatcatcgaattactcaatgttacagaactgacacagaatgcgctcattaatgacgagttggtggaatggaagcgaagacagcagtcagcgtgcatcggcgggccgccaaatgcctgtttagaccagctgcagaactggttcacaatcgtggctgaatcccttcagcaggtccgacagcagctgaagaaactggaagagctggagcagaaatatacctatgagcatgatccaataacaaaaaacaagcaggtgctctgggaccgcacattttcgctctttcagcagctcatacagagcagttttgtcgttgaaagacagccttgtatgcctacgcacccgcaacggccccttgtgctcaaaacaggtgtacagttcacagtcaaactgaggctcctcgtgaagctccaggaattgaattacaatctgaaggtcaaggttctgtttgataaggacgtaaatgagaggaacacagtgaagggctttcgcaagttcaacatcctggggactcacaccaaggttatgaatatggaagagtcgaccaatggctcactcgcagctgagttcaggcatctccaattaaaggagcagaagaatgctgggaccaggaccaatgaaggtcctctgatagtcactgaagagctccactctctttcctttgagacccagctgtgccagcctggattagtgatcgacctggaaactaccagcctacctgttgtggtcatcagcaatgtatcccagctgcctagcggttgggcctctattctgtggtataatatgctggtggccgagcctaggaacttgagttttttcctgacccccccatgcgctaggtgggctcagctgtccgaagtactcagctggcagtttagtagcgtgacaaaaagaggactcaatgttgatcagctgaatatgcttggtgagaagctgctggggcctaacgccagccccgacggtcttatcccctggacaaggttctgcaaagaaaatatcaatgacaagaatttccccttttggttatggatagaatctatcctggaactgatcaagaagcatcttctcccgctttggaatgacgggtgcattatgggatttattagcaaggagagggaaagggccttgctcaaggaccagcagcccggaacttttcttcttaggtttagtgagtcctcccgtgagggggctatcacctttacatgggttgagagaagccagaacgggggagaaccagacttccacgcggtagaaccctacacgaaaaaagaattgtccgctgtgactttccccgatatcataagaaactataaagtaatggcagccgagaatattcctgagaatcctttgaaatatttataccccaatatcgacaaggatcacgcttttggcaagtattactctaggcctaaagaagccccagaacccatggagctggacgggcccaagggaactggatacatcaagacagaactcatctctgtaagcgaagtctag

SEQ ID NO: 238499 - DNA, 543 bp, Artificial Sequence
  derived and/or modified sequence
atgtctcagtggtacgagctccagcaactggactctaagttcctcgaacaggtgcaccagctgtatgatgattcgttccctatggaaatccgccagtatctggcacaatggctcgaaaaacaggactgggagcatgcggccaatgacgtgagcttcgctaccattagattccacgacttgctgtcccagttagacgatcaatactcaagattcagcctcgaaaacaacttcttgctacagcataatataagaaaatcaaagcgtaacctgcaagacaacttccaggaagatcctatacagatgtctatgatcatttattcctgtttgaaagaagagcggaaaattctggagaacgctcagcggttcaaccaggcacagtctggcaacattcaatcaacagtgatgttagacaagcagaaagaattggacagtaaggttagaaatgtcaaagataaggtgatgtgtatcgagcacgagattaagagtttggaggatttgcaggatgaatacgatttcaagtgcaagactctccaaaataggtag

SEQ ID NO: 238500 - DNA, 213 bp, Artificial Sequence
  derived and/or modified sequence
atgagccagtggtatgaacttcagcagctggattctaaatttctggaacaggtgcatcagctgtacgatgattcctttcccatggagatccgccagtatttggcccagtggctagaaaaacaagattgggagcacgccgccaacgatgtgagtttcgccacaatccgttttcacgacctcctgtcccaactggatgaccagtacagtcgctag

SEQ ID NO: 238501 - DNA, 582 bp, Artificial Sequence
  derived and/or modified sequence
atgagccagtggtatgaattgcaacaattggactccaaatttctggaacaagtgcaccagttgtatgacgactccttcccaatggaaatacggcagtacctggcccaatggctggagaagcaagactgggaacacgccgccaacgatgtgtccttcgccacaataagatttcacgacttgctgtcacagctggatgaccagtattctcgcttcagcctagaaaacaactttctgctccaacataacatccgtaagtctaaaaggaacctccaagataatttccaggaggacccaatccaaatgtcaatgatcatttactcttgccttaaagaagaaagaaagatccttgagaacgctcagaggttcaatcaggcacagtcaggcaacatacaatccactgtaatgttggacaagcaaaaagaattagattcaaaggtgcggaatgtaaaggataaggttatgtgcattgaacacgagatcaaatccctggaggatctgcaagacgaatacgacttcaaatgcaaaacactgcagaaccggggtagcagctctcaaaataatcgggtggctgagtgtcattag

SEQ ID NO: 238502 - DNA, 453 bp, Artificial Sequence
  derived and/or modified sequence
atgagccagtggtacgagttacagcaacttgacagcaagtttctggagcaggttcaccagttatacgacgactctttccccatggagatccggcagtacctggcccagtggctggagaagcaggattgggagcacgctgccaatgatgtgtcctttgcaaccatccgtttccacgatctgctcagccaactcgacgatcagtattccagattctccctggagaataatttcctgctgcagcataatattcggaagtccaagagaaatttgcaggataacttccaggaggaccctatccagatgagcatgatcatttacagttgtctcaaagaggaaagaaagatcctcgaaaacgcccaaaggttcaatcaggcgcaatccggaaatatccagagtaccgtcatgttggacaaacagaaggagcttgattctaaggtccgaaacgtgaagtag

SEQ ID NO: 238503 - DNA, 582 bp, Artificial Sequence
  derived and/or modified sequence
atgtcccagtggtatgagctgcagcagctggactctaaatttctggaacaggtacaccagttatatgacgattcattcccaatggaaatccgccagtatctcgcccagtggctggagaaacaggactgggaacacgcagctaacgatgtgagtttcgctaccattagatttcacgatctgcttagccagcttgatgatcaatatagcagattctccttagaaaacaattttttactccaacacaacattcggaagagtaaaagaaacctgcaagacaacttccaggaggatccaatccagatgtctatgattatttatagttgtctaaaagaggagcgaaagatccttgagaacgctcagcggttcaaccaagcgcagagcggaaacatacagtccacggtgatgttagacaagcaaaaagagttggactctaaggttaggaatgtgaaggacaaagtgatgtgcatcgaacatgaaattaagtcgctggaggacttgcaagatgagtatgactttaagtgcaagactctgcaaaaccgcgggagctcttctcaaaataatcgagtggcagagtgtcattag

SEQ ID NO: 238504 - DNA, 483 bp, Artificial Sequence
  derived and/or modified sequence
gaatgccacgaggatccaatacagatgtccatgataatttacagctgtttaaaagaggaacgcaagattttggagaatgctcaacggttcaatcaggctcaatccggcaatatacagagtacggtaatgctggacaagcaaaaagaattagactcaaaagtgcgtaacgtaaaagataaagtgatgtgcatcgagcacgaaatcaaaagtcttgaagacttacaggatgaatatgacttcaagtgtaagacccttcagaatcgggaacatgagaccaacggcgttgctaaatccgatcagaagcaagagcagctgctacttaagaagatgtacctcatgctggataacaagagaaaagaagtggtccacaaaataatcgagctgctcaacgtcacggaattaacgcagaacgcccttatcaacgacgaattggtcgaatggaaaagaaggcaacagtctgcatgcattgggggcccgccctag

SEQ ID NO: 238505 - DNA, 2139 bp, Artificial Sequence
  derived and/or modified sequence
atgagccagtggtatgagctgcagcagctggacagcaagttcctggagcaggtgcaccagctgtatgatgacagcttccccatggagatccggcagtacctggcccagtggctggagaagcaggactgggagcacgccgccaatgatgtgtcctttgccaccatccgcttccatgacctgctgagccagctggatgaccagtacagccgcttcagcctggagaacaacttcctgctgcagcacaacatcaggaagagcaagaggaacctgcaggacaacttccaggaggaccccatccagatgtccatgatcatctacagctgcctgaaggaggagaggaagatcctggagaatgcccagcgcttcaaccaggcccagagcggcaacatccagagcacagtgatgctggacaagcagaaggagctggacagcaaggtgagaaatgtgaaggacaaggtgatgtgcatcgagcacgagatcaagagcctggaggacctgcaggatgaatatgacttcaagtgcaagaccctgcagaaccgggagcacgagaccaatggagtggccaagagtgaccagaagcaggagcagctgctgctgaagaagatgtacctgatgctggacaacaagaggaaggaggtggtgcacaagatcatcgagctgctgaatgtgacagagctgacccagaatgccctgatcaatgatgagctggtggagtggaagaggcggcagcagagcgcctgcatcggcggccccccaaatgcctgcctggaccagctgcagaactggttcaccatcgtggccgagagcctgcagcaggtgcggcagcagctgaagaagctggaggagctggagcagaagtacacctatgaacatgaccccatcaccaagaacaagcaggtgctgtgggacaggaccttcagcctcttccagcagctgatccagagcagctttgtggtggagcggcagccctgcatgcccacccacccccagaggcccctggtgctgaagacaggagtgcagttcaccgtgaagctgcggctgctggtgaagctgcaggagctgaactacaacctgaaggtgaaggtgctgtttgacaaggatgtgaatgaaagaaacacagtgaagggcttcaggaagttcaacatcctgggcacccacaccaaggtgatgaacatggaggagagcaccaacggcagcctggccgctgagttccgccacctgcagctgaaggagcagaagaatgccggcaccaggaccaatgaaggccccctgattgtgacagaggagctgcacagcctgagctttgagacccagctgtgccagcccggcctggtgattgacctggagaccaccagcctgcctgtggtggtgatcagcaatgtgtcccagctgcccagcggctgggccagcatcctgtggtacaacatgctggtggccgagcccaggaacctgtccttcttcctgaccccaccctgtgcccgctgggcccagctgtctgaggtgctgtcctggcagttcagctctgtgaccaagaggggcctgaatgtggaccagctgaacatgctgggggagaagctgctgggccccaatgccagcccagatggcctcatcccctggacccgcttctgcaaggagaacatcaatgacaagaacttccccttctggctgtggattgagagcatcctggagctgatcaagaagcacctgctgcccctgtggaatgatggctgcatcatgggcttcatcagcaaggagcgggagcgggccctgctgaaggaccagcagcccggcaccttcctgctgcgcttcagcgagagcagccgggagggcgccatcaccttcacctgggtggagaggagccagaatggaggagagccagacttccacgctgtggagccctacaccaagaaggagctgtctgctgtgaccttcccagacatcatccggaactacaaggtgatggctgctgagaacatccctgagaaccccctgaagtacctgtaccccaacatcgacaaggaccacgccttcggcaagtactacagccggcccaaggaggcccctgagcccatggagctggatggccccaagggcaccggctacatcaagacagagctgatctctgtgtctgaggtgtag

SEQ ID NO: 238506 - DNA, 2145 bp, Artificial Sequence
  derived and/or modified sequence
atgtggatgagccagtggtatgagctgcagcagctggacagcaagttcctggagcaggtgcaccagctgtatgatgacagcttccccatggagatccggcagtacctggcccagtggctggagaagcaggactgggagcacgccgccaatgatgtgtcctttgccaccatccgcttccatgacctgctgagccagctggatgaccagtacagccgcttcagcctggagaacaacttcctgctgcagcacaacatcaggaagagcaagaggaacctgcaggacaacttccaggaggaccccatccagatgtccatgatcatctacagctgcctgaaggaggagaggaagatcctggagaatgcccagcgcttcaaccaggcccagagcggcaacatccagagcacagtgatgctggacaagcagaaggagctggacagcaaggtgagaaatgtgaaggacaaggtgatgtgcatcgagcacgagatcaagagcctggaggacctgcaggatgaatatgacttcaagtgcaagaccctgcagaaccgggagcacgagaccaatggagtggccaagagtgaccagaagcaggagcagctgctgctgaagaagatgtacctgatgctggacaacaagaggaaggaggtggtgcacaagatcatcgagctgctgaatgtgacagagctgacccagaatgccctgatcaatgatgagctggtggagtggaagaggcggcagcagagcgcctgcatcggcggccccccaaatgcctgcctggaccagctgcagaactggttcaccatcgtggccgagagcctgcagcaggtgcggcagcagctgaagaagctggaggagctggagcagaagtacacctatgaacatgaccccatcaccaagaacaagcaggtgctgtgggacaggaccttcagcctcttccagcagctgatccagagcagctttgtggtggagcggcagccctgcatgcccacccacccccagaggcccctggtgctgaagacaggagtgcagttcaccgtgaagctgcggctgctggtgaagctgcaggagctgaactacaacctgaaggtgaaggtgctgtttgacaaggatgtgaatgaaagaaacacagtgaagggcttcaggaagttcaacatcctgggcacccacaccaaggtgatgaacatggaggagagcaccaacggcagcctggccgctgagttccgccacctgcagctgaaggagcagaagaatgccggcaccaggaccaatgaaggccccctgattgtgacagaggagctgcacagcctgagctttgagacccagctgtgccagcccggcctggtgattgacctggagaccaccagcctgcctgtggtggtgatcagcaatgtgtcccagctgcccagcggctgggccagcatcctgtggtacaacatgctggtggccgagcccaggaacctgtccttcttcctgaccccaccctgtgcccgctgggcccagctgtctgaggtgctgtcctggcagttcagctctgtgaccaagaggggcctgaatgtggaccagctgaacatgctgggggagaagctgctgggccccaatgccagcccagatggcctcatcccctggacccgcttctgcaaggagaacatcaatgacaagaacttccccttctggctgtggattgagagcatcctggagctgatcaagaagcacctgctgcccctgtggaatgatggctgcatcatgggcttcatcagcaaggagcgggagcgggccctgctgaaggaccagcagcccggcaccttcctgctgcgcttcagcgagagcagccgggagggcgccatcaccttcacctgggtggagaggagccagaatggaggagagccagacttccacgctgtggagccctacaccaagaaggagctgtctgctgtgaccttcccagacatcatccggaactacaaggtgatggctgctgagaacatccctgagaaccccctgaagtacctgtaccccaacatcgacaaggaccacgccttcggcaagtactacagccggcccaaggaggcccctgagcccatggagctggatggccccaagggcaccggctacatcaagacagagctgatctctgtgtctgaggtgtag

SEQ ID NO: 238507 - DNA, 543 bp, Artificial Sequence
  derived and/or modified sequence
atgagccagtggtatgagctgcagcagctggacagcaagttcctggagcaggtgcaccagctgtatgatgacagcttccccatggagatccggcagtacctggcccagtggctggagaagcaggactgggagcacgccgccaatgatgtgtcctttgccaccatccgcttccatgacctgctgagccagctggatgaccagtacagccgcttcagcctggagaacaacttcctgctgcagcacaacatcaggaagagcaagaggaacctgcaggacaacttccaggaggaccccatccagatgtccatgatcatctacagctgcctgaaggaggagaggaagatcctggagaatgcccagcgcttcaaccaggcccagagcggcaacatccagagcacagtgatgctggacaagcagaaggagctggacagcaaggtgagaaatgtgaaggacaaggtgatgtgcatcgagcacgagatcaagagcctggaggacctgcaggatgaatatgacttcaagtgcaagaccctgcagaacagatag

SEQ ID NO: 238508 - DNA, 213 bp, Artificial Sequence
  derived and/or modified sequence
atgagccagtggtatgagctgcagcagctggacagcaagttcctggagcaggtgcaccagctgtatgatgacagcttccccatggagatccggcagtacctggcccagtggctggagaagcaggactgggagcacgccgccaatgatgtgtcctttgccaccatccgcttccatgacctgctgagccagctggatgaccagtacagcaggtag

SEQ ID NO: 238509 - DNA, 582 bp, Artificial Sequence
  derived and/or modified sequence
atgagccagtggtatgagctgcagcagctggacagcaagttcctggagcaggtgcaccagctgtatgatgacagcttccccatggagatccggcagtacctggcccagtggctggagaagcaggactgggagcacgccgccaatgatgtgtcctttgccaccatccgcttccatgacctgctgagccagctggatgaccagtacagccgcttcagcctggagaacaacttcctgctgcagcacaacatcaggaagagcaagaggaacctgcaggacaacttccaggaggaccccatccagatgtccatgatcatctacagctgcctgaaggaggagaggaagatcctggagaatgcccagcgcttcaaccaggcccagagcggcaacatccagagcacagtgatgctggacaagcagaaggagctggacagcaaggtgagaaatgtgaaggacaaggtgatgtgcatcgagcacgagatcaagagcctggaggacctgcaggatgaatatgacttcaagtgcaagaccctgcagaacagaggcagcagcagccagaacaacagagtggccgagtgccactag

SEQ ID NO: 238510 - DNA, 453 bp, Artificial Sequence
  derived and/or modified sequence
atgagccagtggtatgagctgcagcagctggacagcaagttcctggagcaggtgcaccagctgtatgatgacagcttccccatggagatccggcagtacctggcccagtggctggagaagcaggactgggagcacgccgccaatgatgtgtcctttgccaccatccgcttccatgacctgctgagccagctggatgaccagtacagccgcttcagcctggagaacaacttcctgctgcagcacaacatcaggaagagcaagaggaacctgcaggacaacttccaggaggaccccatccagatgtccatgatcatctacagctgcctgaaggaggagaggaagatcctggagaatgcccagcgcttcaaccaggcccagagcggcaacatccagagcacagtgatgctggacaagcagaaggagctggacagcaaggtgagaaatgtgaagtag

SEQ ID NO: 238511 - DNA, 483 bp, Artificial Sequence
  derived and/or modified sequence
gaatgtcatgaggaccccatccagatgtccatgatcatctacagctgcctgaaggaggagaggaagatcctggagaatgcccagcgcttcaaccaggcccagagcggcaacatccagagcacagtgatgctggacaagcagaaggagctggacagcaaggtgagaaatgtgaaggacaaggtgatgtgcatcgagcacgagatcaagagcctggaggacctgcaggatgaatatgacttcaagtgcaagaccctgcagaaccgggagcacgagaccaatggagtggccaagagtgaccagaagcaggagcagctgctgctgaagaagatgtacctgatgctggacaacaagaggaaggaggtggtgcacaagatcatcgagctgctgaatgtgacagagctgacccagaatgccctgatcaatgatgagctggtggagtggaagaggcggcagcagagcgcctgcatcggcggccccccatag

SEQ ID NO: 238512 - DNA, 2139 bp, Artificial Sequence
  derived and/or modified sequence
atgagccagtggtacgagctgcagcagctggacagcaagttcctggaacaggttcaccagctatatgacgactcattccctatggagatccgccagtacctagcacaatggttggaaaagcaagattgggagcatgccgcaaacgatgtttcctttgctacaataaggttccacgatctactgtctcagttggatgaccagtacagccggttttccctagagaacaatttcctgctgcagcacaacatccggaaatctaaaagaaatctgcaggataatttccaagaagatccaatccaaatgtcaatgattatctatagttgcctaaaggaggaacgcaaaatcctggagaacgcacagagattcaatcaggcacagtcaggaaatattcaatcgactgtaatgttggataaacagaaagagcttgactcaaaggttcgcaacgtgaaagacaaggttatgtgtatcgagcacgagattaagagcctggaagacctacaagacgagtacgattttaagtgtaaaaccctgcagaatagagaacatgagaccaatggcgtggccaagtctgaccagaagcaggagcagctgctgctcaagaaaatgtacctgatgctggacaacaaacgaaaagaagtagtacataaaatcatcgagttgctgaatgtcacggaactgactcagaacgctctaattaacgatgaactggtggaatggaagcgtaggcaacaaagcgcttgtattggcggcccgcccaacgcgtgtctggaccagttacaaaactggttcaccatcgtggccgagagtctgcagcaggtgcggcaacagcttaagaagttggaggaacttgaacagaaatatacatacgaacacgaccctatcacaaaaaacaagcaggtcttgtgggatcgcactttcagcttgtttcagcagctgattcagagctcttttgtggtggagagacaaccctgcatgcctacccacccgcagcggccactggtgctcaagactggcgtgcagtttactgtgaaactgaggcttctggtcaagctccaggagctcaactataacctgaaggtgaaagtcctttttgacaaggacgttaacgaaagaaacacggtcaagggttttcgcaaatttaacatcctgggtacccacacgaaggtcatgaatatggaggaaagcacaaacgggtctttggctgctgagtttaggcatctacagttgaaagaacagaagaacgccggcacgcgcaccaacgagggtcctctcatcgtgactgaagagctgcactctttgtcattcgaaacgcagctgtgtcagccaggcctcgttatcgacctggagaccacttctctacctgtggtggtgataagcaacgtatcccaactccctagcggttgggcaagcatcctctggtataatatgttagttgccgagcctagaaacctcagcttcttcctgacgcctccttgcgcccgttgggcccaattgtccgaagttctgtcctggcaattttcttccgttacaaaacgcggcctgaacgtggatcaactaaatatgttgggcgaaaagctactggggcccaatgcctccccagacgggctgataccctggacgaggttttgtaaggaaaacattaatgataaaaactttcctttctggttgtggatcgaatcaatcctcgagttgataaagaaacatctcctgcccttatggaacgatggttgtatcatgggctttatatcaaaagaaagagagagagctttgctaaaggaccagcagcccggcacatttctgctacggttcagtgaaagtagccgtgaaggcgctattaccttcacctgggttgagcggagccagaacggcggtgagccagatttccacgctgtcgaaccctacacaaaaaaggaattgtccgcagtgacattcccagacatcattcgaaattacaaggtgatggcggctgagaacatcccagagaaccccctgaagtatctgtatccaaatatagacaaagaccacgcctttggaaaatattattccaggccaaaggaggcacctgaaccaatggagttggacggcccgaagggcacagggtatattaaaacggagttgatctctgtgtctgaggtgtag

SEQ ID NO: 238513 - DNA, 2145 bp, Artificial Sequence
  derived and/or modified sequence
atgtggatgagccagtggtacgagctgcagcagctggacagcaagtttctggaacaagtgcaccaactgtatgacgacagttttcctatggaaatccggcagtatctggcacagtggctcgagaagcaggactgggagcatgccgcaaatgacgtgtctttcgcaactatcagattccacgacttgctgtcacaactggacgaccagtacagcaggttttccttggaaaataattttctgctgcagcacaatattcggaaatctaagcgcaatctccaggacaatttccaggaggatcctatccagatgagtatgatcatctacagttgcctgaaggaggagaggaagatccttgagaatgcccaacgattcaaccaggctcaatctgggaacatccaaagcactgtcatgctcgataaacaaaaagagcttgatagcaaggtgagaaatgtaaaggacaaggtcatgtgtatcgaacacgagatcaaaagtctcgaagacttacaagatgagtatgacttcaagtgtaaaaccctgcaaaaccgggaacacgaaacgaatggcgtagctaagagcgatcaaaaacaggagcagctgctgcttaagaagatgtaccttatgctggataataaacgcaaggaagttgtccacaaaattatcgaacttcttaacgtgaccgaactgacccagaatgcactcattaatgacgaactggttgaatggaaaaggcggcagcagagcgcatgtattggcggtccaccgaatgcatgcctggatcagctgcaaaattggtttaccatagtggccgagtctctccagcaggtacgccaacagctgaaaaagctggaagagttggaacaaaaatatacgtatgaacatgaccccattacgaaaaataaacaggtgctatgggacaggactttcagcctcttccagcagctgatccaaagttccttcgtggttgaacggcagccatgcatgcctactcatcctcaacggcctctcgtcttaaagactggagtgcagtttacggttaagctccgactcctggtcaaactccaagaactcaactataatcttaaggtgaaggtcctttttgataaggatgtgaacgagaggaatacagtcaagggctttcggaaattcaacatcctggggacccacaccaaggtgatgaacatggaagaatctacgaacggtagcctggccgccgaatttcgacacttacaactcaaagaacagaagaatgccggaacgagaaccaacgaaggaccgcttattgttaccgaggagttacattccctctcattcgagacgcagctttgccagccaggactggtgattgacctggagacgacttctttacccgtggttgtgatttccaatgtgtcgcagttgcccagcggctgggcctccattctctggtataacatgctcgtagctgaacccaggaacttgtcctttttcttgacacccccctgtgctcgttgggcacagctttccgaagtactcagttggcagttctccagcgttacaaagcgtggcttgaatgtcgaccagctgaacatgctgggcgagaaactgcttggtccaaatgcttctcccgatgggctcattccatggacgcgcttctgcaaggaaaatatcaatgataaaaacttcccgttctggttgtggattgaaagcattctcgaattgattaagaagcacttacttccgttgtggaacgacgggtgcatcatgggcttcataagcaaagagcgagagagagccttgcttaaagaccagcagcccggcacttttctgcttcggttctccgagtctagcagagagggcgcaataaccttcacgtgggtggagcgctcgcagaacgggggcgaaccagactttcatgcagttgaaccttatactaagaaagaattatccgctgttacgtttcctgatatcatcagaaattacaaagttatggcagcagaaaacatacccgagaaccccttgaaatatctatacccaaatatcgataaggaccacgccttcgggaagtattattctcgccccaaggaggcacctgaaccaatggagctcgatggccccaagggtaccggatacatcaagaccgaactgatctcagtgtccgaagtgtag

SEQ ID NO: 238514 - DNA, 543 bp, Artificial Sequence
  derived and/or modified sequence
atgagccagtggtacgagctgcagcagctggacagcaagttcctggagcaagtgcaccagctctacgacgattctttcccaatggagatccggcaatacctagcacaatggctggagaagcaggactgggagcacgccgctaacgacgtgtccttcgcgaccatcagatttcacgatttgctctctcaactggacgaccaatatagccggttcagtctggagaataactttctgctgcaacataacatcaggaagagcaaacgaaatttgcaggacaattttcaggaggatcccatccagatgagcatgattatttattcatgtctgaaagaggaacgaaagatcctggagaatgcccaacggttcaaccaggcacagtctgggaatattcagtccactgtgatgctcgacaagcagaaggagctcgactctaaagtgcggaacgtcaaagacaaagtgatgtgtatcgaacacgagattaagtccctcgaggacctgcaggacgagtacgacttcaagtgcaaaacgctccaaaacagatag

SEQ ID NO: 238515 - DNA, 213 bp, Artificial Sequence
  derived and/or modified sequence
atgagccagtggtacgagctgcagcagctggacagcaagttcctggaacaggtccatcagctgtacgatgactcattccccatggagatccgccagtacctggctcagtggcttgagaagcaggattgggagcacgccgcgaacgacgttagctttgctaccatccgattccacgacctgttatcacagctggatgatcagtatagtcgttag

SEQ ID NO: 238516 - DNA, 582 bp, Artificial Sequence
  derived and/or modified sequence
atgagccagtggtacgagctgcagcagctggacagcaagttcctggaacaagtgcaccaactgtacgatgattcatttcccatggagattcggcagtatcttgctcagtggctggagaaacaggactgggagcacgctgcgaatgacgtttccttcgcaaccatacgttttcacgacttgctttcccagcttgacgaccagtacagccgcttctcattagagaataattttctgctgcaacataatatcaggaagtccaaaaggaatctgcaggacaactttcaggaggaccccatccaaatgtctatgattatttacagctgcctaaaagaagagcgaaaaatacttgaaaacgcccagcgcttcaatcaagcccagtccggtaacatccaatcaaccgtcatgctcgataagcagaaggaactggacagtaaggtcaggaatgtgaaggacaaagttatgtgtattgaacatgagattaagtccctggaggaccttcaggatgaatatgatttcaagtgcaagactctgcaaaaccgcggctcctcgagccagaacaatcgcgtagcggaatgccactag

SEQ ID NO: 238517 - DNA, 453 bp, Artificial Sequence
  derived and/or modified sequence
atgagccagtggtacgagctgcagcagctggacagcaagttcctggaacaggtccaccagctgtacgacgatagcttcccaatggaaattagacagtatttggcccagtggctcgaaaaacaggactgggaacacgcggcaaacgatgtctcgtttgcaacaatcaggttccatgatctgctttctcagcttgacgaccagtattcccggttctcgctggaaaacaacttcttgctccagcacaatatacgaaaaagcaagcgcaacttacaggacaacttccaggaggaccccattcagatgagcatgatcatctattcttgtctgaaggaagagagaaaaatcttagaaaatgctcagaggttcaaccaggcccagagcggcaatatacagtctacagtgatgttggacaagcagaaggagctagacagcaaggtgcggaatgttaaatag

SEQ ID NO: 238518 - DNA, 582 bp, Artificial Sequence
  derived and/or modified sequence
atgagccagtggtacgagctgcagcagctggacagcaagttcctggaacaagttcaccaactgtatgacgattcttttccaatggaaatccgccagtatttggcacagtggttggaaaagcaggattgggagcacgctgcaaatgatgtttccttcgcaaccattaggttccatgacctactgagccagctcgatgatcagtattccaggttcagtctcgaaaacaatttcttactccagcataatattaggaagtcaaaaaggaacctgcaagacaacttccaagaggatccaatccagatgtctatgataatctatagctgccttaaagaagagagaaaaattctcgagaacgcccagaggttcaaccaggcccagtcggggaacattcaatccacagtcatgctcgacaaacagaaagagctcgactcaaaggtgagaaacgtcaaagataaagtgatgtgtatcgaacacgagatcaagtcactcgaagatttgcaggatgaatatgattttaagtgcaaaactttgcaaaaccgaggatcgagctcgcagaacaatagggtggctgaatgtcactag

SEQ ID NO: 238519 - DNA, 483 bp, Artificial Sequence
  derived and/or modified sequence
gagtgccacgaggaccccatccagatgagcatgatcatctacagctgcctgaaggaggagcgcaagatcctggaaaatgcacaacgcttcaatcaagcccagtctggaaacattcaaagcacggtcatgctcgataagcagaaggagctggactcaaaggtgcgaaacgtgaaggacaaagttatgtgcatcgaacacgagatcaagtccctggaggatctgcaggacgagtacgactttaaatgcaagactctgcagaacagggagcatgagaccaatggagtcgctaaatccgatcaaaaacaagagcagctgctccttaagaaaatgtaccttatgctcgacaataaacgaaaggaggtggtgcacaagataatagaactcctgaatgtcaccgaactgacacagaatgcactgattaatgatgaactggtcgaatggaaacgcaggcaacagtctgcctgtatcggggggcctccctag

SEQ ID NO: 238520 - DNA, 2139 bp, Artificial Sequence
  derived and/or modified sequence
atgtcgcagtggtacgaactacagcagcttgattccaagtttctggagcaggtgcatcagctctacgacgacagttttcctatggaaattcgtcaatacctcgcccagtggctggaaaagcaagactgggagcatgccgcaaacgacgtgagtttcgccaccattaggttccacgacctcttatcacaacttgacgaccaatactcacgctttagcttggagaacaattttctgctgcagcataacattcggaagagtaaacgcaaccttcaagacaatttccaggaagatccaatccaaatgagcatgatcatttattcgtgccttaaggaagaacgaaaaatacttgagaacgcccaacgatttaaccaggcccagagcggtaacatacaatccacagtcatgctcgataaacagaaggagctggattctaaggtcaggaacgtcaaagataaggttatgtgcatagagcatgagataaaaagtcttgaggaccttcaggatgagtatgactttaaatgcaagacccttcagaatcgcgagcacgaaaccaatggtgtcgccaaaagtgaccagaagcaagaacaactgctactaaagaaaatgtacttgatgctggacaataagcggaaagaagtcgtacacaagatcatagaactgctcaacgtcactgagcttacccaaaatgccctgattaatgacgagctggtcgagtggaagcgcagacagcaatccgcctgtattggtgggccacctaatgcctgcctggaccagcttcaaaactggttcacaatcgtggcggagagcttgcagcaggttagacaacaattgaagaagctcgaagaactggagcagaaatatacctacgagcacgatccgatcaccaaaaataaacaggtgttgtgggatcgtaccttttcgctgttccagcagcttatccagtcttcattcgtagtggagcgacaaccatgtatgcccacacacccccagagaccccttgtgctgaagaccggtgtgcagttcaccgtgaaactacgtctgctggtcaaacttcaggagttgaactataatctgaaggttaaagtgctatttgacaaggacgtaaacgaacgcaatacagtcaagggattcaggaagttcaacatccttggtacacacaccaaggttatgaacatggaggagagtactaatggatccctggctgcagagtttagacatctgcaactcaaggagcagaagaacgcaggaacccgtacgaacgaaggacccctgatcgtcactgaggaacttcactccttatccttcgaaacccaactgtgtcagcctggactcgtaatcgatctcgagactacttctctcccagtggtggtgatcagcaacgtgagccagttgccctctggatgggcctcgattctgtggtacaatatgctcgtggctgagcctcgtaatctgtcattctttttgaccccaccttgtgctagatgggctcaactttctgaggtgctgagctggcagtttagctctgtgacgaaacgtggtctgaatgtagaccaactgaatatgttgggagaaaaactgctcgggcctaatgcttcccccgacggactcatcccttggacacgcttctgtaaggagaacataaacgacaaaaattttcctttctggctctggattgagagcatcctggagctgataaaaaaacacttactgccgttgtggaacgacggatgcattatggggttcatcagcaaggagcgagagagagctttgttgaaagatcaacaacctggtacctttctccttcgtttcagtgagtcttctagagagggcgcaataacgttcacctgggtggaacgatcacagaacggtggcgaacctgatttccatgcagtcgagccctataccaagaaggagctgagtgctgtgacatttcccgatattatacggaattacaaggtgatggccgcagagaacattccagaaaacccattaaagtatttatatccaaatatcgataaggaccatgcatttgggaagtactatagccgacccaaggaagccccagagcccatggaactggacggccctaaaggaacaggctatatcaaaaccgagctgatctcagtaagtgaagtgtag

SEQ ID NO: 238521 - DNA, 2145 bp, Artificial Sequence
  derived and/or modified sequence
atgtggatgtcccagtggtacgagttgcagcagttggatagcaaatttttagaacaagtgcaccagttgtacgacgacagctttccgatggagatccggcagtacctggcacagtggctggagaagcaagactgggaacatgccgctaatgacgttagtttcgccacaatccgtttccacgaccttttatcccagctggatgaccaatattccaggttttcgttggaaaataacttcctgctgcaacataatattcgcaaatcaaagagaaacctgcaggacaacttccaggaagaccctatacaaatgagtatgattatttactcctgccttaaggaggagagaaagattctcgagaatgctcagcgcttcaaccaggcacagtccggcaacatccagtccaccgttatgctagataaacaaaaagagctcgattcgaaagtgcggaacgtgaaggacaaggtaatgtgtatcgaacacgagattaaaagcctggaggacctccaagacgagtatgactttaagtgtaagaccttgcagaatcgcgaacatgaaacaaacggcgtggcaaagagcgatcagaaacaggagcagctccttctgaagaagatgtacctgatgctcgataataagcggaaggaagttgtccacaagatcattgagctgttgaacgtaaccgagctcactcagaatgccctgattaacgacgaactggtggaatggaagcgccgtcaacaaagtgcatgtatcggcggaccacctaacgcatgcctcgatcagcttcagaactggttcaccattgtcgctgaatccctacaacaggtgcgccagcagctgaagaagttggaggagctcgaacagaagtacacgtacgaacatgacccaattacgaaaaacaaacaggtgctttgggataggactttctccctgttccaacagttaatacaatcatccttcgtggtcgagagacagccctgcatgcccacccatccgcagcgcccactcgtgcttaagactggcgtccaatttacagtcaaacttcgcctgcttgtcaagctgcaggagcttaactataacttgaaggtgaaggtgctatttgacaaggacgtcaacgagcgcaatacagtgaaaggttttcggaaattcaacatcctcggcacacacactaaggtcatgaatatggaggaatcaacaaatggatctctcgctgcagagtttagacatttacagctgaaagaacagaagaacgccggaacccgcaccaacgaggggcctctaatagtcacagaagagctgcattctctgtccttcgagacacaactgtgtcagcccggactggtgattgacctagagaccactagtctgccagtcgtggtgatttcaaacgtgtctcagctgccttccggctgggctagtattctctggtacaatatgctagtcgctgaacccaggaacctgtctttcttcctgactcctccgtgtgctcgctgggcacagctttccgaggtgctctcatggcagttctcttccgtcactaagcggggactgaatgtggatcagctgaacatgctaggggaaaaactactgggccctaatgcgtctcctgacggactgatcccatggacccgcttctgcaaggagaatatcaatgacaaaaattttcccttttggctctggattgagtcaattctcgaactcattaaaaagcatcttctgcctctttggaacgacggatgtatcatgggattcatttctaaggagcgggagcgtgcgctactgaaggatcagcagcccggtaccttcttgctgagattctctgagtcctctcgcgagggcgctatcacttttacatgggtggagagatcccaaaacggcggtgaaccggatttccatgccgtggagccatatacaaaaaaggaactttcggcggtcacattccccgatatcatcagaaattataaggtcatggccgctgagaacataccagagaatcctttgaaatacttgtaccccaacatcgataaggaccacgcgtttgggaaatattatagtcggcctaaggaagcgcctgaacccatggagctggatgggcctaagggaacggggtacatcaaaactgagctgatttccgtatccgaggtgtag

SEQ ID NO: 238522 - DNA, 543 bp, Artificial Sequence
  derived and/or modified sequence
atgtcccagtggtatgaactgcagcagctggactcaaagtttctcgaacaggtgcaccagctatacgacgattcttttcctatggagatccgccagtacctggcgcagtggctggagaaacaagactgggagcacgcggcaaatgacgttagtttcgcaactattcggtttcatgatctactgagtcagctggatgatcaatattcgcggtttagcctcgagaataacttcttactgcagcataatattcggaagagcaagagaaatctgcaagacaactttcaggaggacccgatccagatgtccatgatcatatacagttgcctgaaggaggagcgtaaaattctggaaaacgctcagcggtttaatcaggcccagagtggcaacatccagtctacggtcatgctggataagcagaaagaactggatagcaaggtgcggaacgtgaaagacaaggtgatgtgcatagaacacgagatcaaaagtctggaagatctgcaggatgaatatgattttaaatgcaagaccctgcagaaccgttag

SEQ ID NO: 238523 - DNA, 213 bp, Artificial Sequence
  derived and/or modified sequence
atgtcacagtggtacgaattgcaacagttggattcaaagttcttggaacaggtgcatcagctctatgacgactcattccctatggaaattcggcagtacctggcccagtggctcgaaaagcaggattgggagcacgctgccaatgatgtgtctttcgctaccattcgcttccacgacctgctatcacagctcgatgatcagtactctaggtag

SEQ ID NO: 238524 - DNA, 582 bp, Artificial Sequence
  derived and/or modified sequence
atgagccaatggtacgagttacaacaactggattctaaatttttggaacaggtccaccagctctacgatgatagctttcccatggagattagacagtatctggctcagtggctggagaaacaggactgggagcatgcagcaaacgatgtgagcttcgcaacaatccgattccacgacctgctgagccagctagatgaccagtactccaggttttccttagaaaacaacttcctgctgcagcacaacattagaaaaagcaagcggaacctacaggacaactttcaggaggacccaattcaaatgtccatgatcatctactcatgcctgaaggaggagaggaagattttagagaatgcccagcggttcaaccaggcacagtcagggaacatacagagcacagtgatgctcgacaaacaaaaggagctggatagcaaggtgcgcaatgtgaaggataaggttatgtgcatagaacacgagattaaaagcctcgaggatctgcaggacgagtacgatttcaagtgcaagactctgcagaacaggggtagctcttcccaaaacaacagggtcgctgagtgtcactag

SEQ ID NO: 238525 - DNA, 453 bp, Artificial Sequence
  derived and/or modified sequence
atgtcccagtggtatgagctgcagcagcttgacagcaagttcttggaacaggtgcaccagctctacgatgactcttttcctatggaaattaggcagtacctagctcaatggcttgagaaacaggactgggaacatgctgcgaatgatgttagctttgccactattcggtttcacgatcttttgtctcaattggacgaccagtactcaaggtttagcctggaaaataactttctgctgcaacataatatccgtaagtccaaaagaaacctccaggacaatttccaggaagaccccattcaaatgtcgatgatcatctattcttgtctcaaagaggaacgcaagattctggaaaacgcgcagcggtttaatcaggcacagtctgggaatatccagtccacggtcatgctcgataagcagaaagaactggactcgaaggtaagaaacgtaaagtag

SEQ ID NO: 238526 - DNA, 582 bp, Artificial Sequence
  derived and/or modified sequence
atgtcccaatggtacgaactccaacagcttgacagcaagtttctggagcaggttcatcaactatacgatgatagtttccccatggaaattcgtcaatatttggcacagtggctggaaaagcaggactgggagcacgcagccaatgatgtgtcattcgccacaatccgcttccatgatctgctctcccagttagacgatcagtactcacgtttttccctcgaaaataacttcctgttacagcataacattcggaaaagcaaaaggaacctccaagataactttcaagaggaccctattcagatgtccatgataatctattcgtgtttaaaggaagaacggaaaattctggaaaacgctcagcggttcaatcaggcacagtccggcaatatccagagtacagtgatgctcgacaagcagaaggagctcgatagcaaggtgagaaacgtcaaggacaaagtcatgtgtatcgagcacgagatcaagagcctcgaggacctgcaggatgagtacgattttaaatgcaaaaccttgcagaatagaggttcttcaagccagaataaccgtgtcgcggagtgccattag

SEQ ID NO: 238527 - DNA, 483 bp, Artificial Sequence
  derived and/or modified sequence
gagtgtcacgaagaccccatccaaatgagcatgattatctatagctgcttaaaagaagagcggaaaatactggagaacgcccaacggtttaaccaggcccagagcgggaatatacaatcgactgttatgctggataaacagaaagagctggatagtaaagttcgaaacgttaaggataaagtgatgtgtatcgaacacgaaattaaaagcttggaggacctccaggatgagtacgactttaagtgtaagacgctgcagaaccgggagcacgagactaatggagtggctaagagtgatcagaaacaggagcaactgctcctgaaaaagatgtacctgatgctggataataagcggaaggaggtggtccacaagataatcgagctcttgaacgttactgaactgacacagaatgccctgatcaatgacgagcttgtggagtggaaaagacgacagcagtcagcctgcattgggggacctccctag

SEQ ID NO: 238528 - DNA, 2716 bp, Artificial Sequence
  derived and/or modified sequence
tcgctttcctgcgcagagtctgcggaggggctcggctgcaccggggggatcgcgcctggcagaccccagaccgagcagaggcgacccagcgcgctcgggagaggctgcaccgccgcgcccccgcctagcccttccggatcctgcgcgcagaaaagtttcatttgctgtatgccatcctcgagagctgtctaggttaacgttcgcactctgtgtatataacctcgacagtcttggcacctaacgtgctgtgcgtagctgctcctttggttgaatccccaggcccttgttggggcacaaggtggcaggatgtctcagtggtacgaacttcagcagcttgactcaaaattcctggagcaggttcaccagctttatgatgacagttttcccatggaaatcagacagtacctggcacagtggttagaaaagcaagactgggagcacgctgccaatgatgtttcatttgccaccatccgttttcatgacctcctgtcacagctggatgatcaatatagtcgcttttctttggagaataacttcttgctacagcataacataaggaaaagcaagcgtaatcttcaggataattttcaggaagacccaatccagatgtctatgatcatttacagctgtctgaaggaagaaaggaaaattctggaaaacgcccagagatttaatcaggctcagtcggggaatattcagagcacagtgatgttagacaaacagaaagagcttgacagtaaagtcagaaatgtgaaggacaaggttatgtgtatagagcatgaaatcaagagcctggaagatttacaagatgaatatgacttcaaatgcaaaaccttgcagaacagagaacacgagaccaatggtgtggcaaagagtgatcagaaacaagaacagctgttactcaagaagatgtatttaatgcttgacaataagagaaaggaagtagttcacaaaataatagagttgctgaatgtcactgaacttacccagaatgccctgattaatgatgaactagtggagtggaagcggagacagcagagcgcctgtattggggggccgcccaatgcttgcttggatcagctgcagaactggttcactatagttgcggagagtctgcagcaagttcggcagcagcttaaaaagttggaggaattggaacagaaatacacctacgaacatgaccctatcacaaaaaacaaacaagtgttatgggaccgcaccttcagtcttttccagcagctcattcagagctcgtttgtggtggaaagacagccctgcatgccaacgcaccctcagaggccgctggtcttgaagacaggggtccagttcactgtgaagttgagactgttggtgaaattgcaagagctgaattataatttgaaagtcaaagtcttatttgataaagatgtgaatgagagaaatacagtaaaaggatttaggaagttcaacattttgggcacgcacacaaaagtgatgaacatggaggagtccaccaatggcagtctggcggctgaatttcggcacctgcaattgaaagaacagaaaaatgctggcaccagaacgaatgagggtcctctcatcgttactgaagagcttcactcccttagttttgaaacccaattgtgccagcctggtttggtaattgacctcgagacgacctctctgcccgttgtggtgatctccaacgtcagccagctcccgagcggttgggcctccatcctttggtacaacatgctggtggcggaacccaggaatctgtccttcttcctgactccaccatgtgcacgatgggctcagctttcagaagtgctgagttggcagttttcttctgtcaccaaaagaggtctcaatgtggaccagctgaacatgttgggagagaagcttcttggtcctaacgccagccccgatggtctcattccgtggacgaggttttgtaaggaaaatataaatgataaaaattttcccttctggctttggattgaaagcatcctagaactcattaaaaaacacctgctccctctctggaatgatgggtgcatcatgggcttcatcagcaaggagcgagagcgtgccctgttgaaggaccagcagccggggaccttcctgctgcggttcagtgagagctcccgggaaggggccatcacattcacatgggtggagcggtcccagaacggaggcgaacctgacttccatgcggttgaaccctacacgaagaaagaactttctgctgttactttccctgacatcattcgcaattacaaagtcatggctgctgagaatattcctgagaatcccctgaagtatctgtatccaaatattgacaaagaccatgcctttggaaagtattactccaggccaaaggaagcaccagagccaatggaacttgatggccctaaaggaactggatatatcaagactgagttgatttctgtgtctgaagtgtaagtgaacacagaagagtgacatgtttacaaacctcaagccagccttgctcctggctggggcctgttgaagatgcttgtattttacttttccattgtaattgctatcgccatcacagctgaacttgttgagatccccgtgttactgcctatcagcattttactactttaaaaaaaaaaaaaaagccaaaaaccaaatttgtatttaaggtatataaattttcccaaaactgataccctttgaaaaagtataaataaaatgagcaaaagttgat

SEQ ID NO: 238529 - DNA, 2723 bp, Artificial Sequence
  derived and/or modified sequence
agcgctgccttttctcctgccgggtagtttcgctttcctgcgcagagtctgcggaggggctcggctgcaccggggggatcgcgcctggcagaccccagaccgagcagaggcgacccagcgcgctcgggagaggctgcaccgccgcgcccccgcctagcccttccggatcctgcgcgcagaaaagtttcatttgctgtatgccatcctcgagagctgtctaggttaacgttcgcactctgtgtatataacctcgacagtcttggcacctaacgtgctgtgcgtagctgctcctttggttgaatccccaggcccttgttggggcacaaggtggcagggatacaccagtgcacagaatcctccaccaacatccatcccttcaagtggtgaaaacagacaataatgaaaataaaatatgtggatgtctcagtggtacgaacttcagcagcttgactcaaaattcctggagcaggttcaccagctttatgatgacagttttcccatggaaatcagacagtacctggcacagtggttagaaaagcaagactgggagcacgctgccaatgatgtttcatttgccaccatccgttttcatgacctcctgtcacagctggatgatcaatatagtcgcttttctttggagaataacttcttgctacagcataacataaggaaaagcaagcgtaatcttcaggataattttcaggaagacccaatccagatgtctatgatcatttacagctgtctgaaggaagaaaggaaaattctggaaaacgcccagagatttaatcaggctcagtcggggaatattcagagcacagtgatgttagacaaacagaaagagcttgacagtaaagtcagaaatgtgaaggacaaggttatgtgtatagagcatgaaatcaagagcctggaagatttacaagatgaatatgacttcaaatgcaaaaccttgcagaacagagaacacgagaccaatggtgtggcaaagagtgatcagaaacaagaacagctgttactcaagaagatgtatttaatgcttgacaataagagaaaggaagtagttcacaaaataatagagttgctgaatgtcactgaacttacccagaatgccctgattaatgatgaactagtggagtggaagcggagacagcagagcgcctgtattggggggccgcccaatgcttgcttggatcagctgcagaactggttcactatagttgcggagagtctgcagcaagttcggcagcagcttaaaaagttggaggaattggaacagaaatacacctacgaacatgaccctatcacaaaaaacaaacaagtgttatgggaccgcaccttcagtcttttccagcagctcattcagagctcgtttgtggtggaaagacagccctgcatgccaacgcaccctcagaggccgctggtcttgaagacaggggtccagttcactgtgaagttgagactgttggtgaaattgcaagagctgaattataatttgaaagtcaaagtcttatttgataaagatgtgaatgagagaaatacagtaaaaggatttaggaagttcaacattttgggcacgcacacaaaagtgatgaacatggaggagtccaccaatggcagtctggcggctgaatttcggcacctgcaattgaaagaacagaaaaatgctggcaccagaacgaatgagggtcctctcatcgttactgaagagcttcactcccttagttttgaaacccaattgtgccagcctggtttggtaattgacctcgagacgacctctctgcccgttgtggtgatctccaacgtcagccagctcccgagcggttgggcctccatcctttggtacaacatgctggtggcggaacccaggaatctgtccttcttcctgactccaccatgtgcacgatgggctcagctttcagaagtgctgagttggcagttttcttctgtcaccaaaagaggtctcaatgtggaccagctgaacatgttgggagagaagcttcttggtcctaacgccagccccgatggtctcattccgtggacgaggttttgtaaggaaaatataaatgataaaaattttcccttctggctttggattgaaagcatcctagaactcattaaaaaacacctgctccctctctggaatgatgggtgcatcatgggcttcatcagcaaggagcgagagcgtgccctgttgaaggaccagcagccggggaccttcctgctgcggttcagtgagagctcccgggaaggggccatcacattcacatgggtggagcggtcccagaacggaggcgaacctgacttccatgcggttgaaccctacacgaagaaagaactttctgctgttactttccctgacatcattcgcaattacaaagtcatggctgctgagaatattcctgagaatcccctgaagtatctgtatccaaatattgacaaagaccatgcctttggaaagtattactccaggccaaaggaagcaccagagccaatggaacttgatggccctaaaggaactggatatatcaagactgagttgatttctgtgtctgaagtgtaagtgaacacagaagagtgacatgtttacaaacctcaagccagccttgctcctggctggggcctgttgaagatgcttgtattttacttttccattgtaattgctatcgccatcacagctgaacttgttgagatccccgtgttactgcctatcagcattttactacttt

SEQ ID NO: 238530 - DNA, 736 bp, Artificial Sequence
  derived and/or modified sequence
gggggccgggcgccagcgctgccttttctcctgccgggtagtttcgctttcctgcgcagagtctgcggaggggctcggctgcaccggggggatcgcgcctggcagaccccagaccgagcagaggcgacccagcgcgctcgggagaggctgcaccgccgcgcccccgcctagcccttccggatcctgcgcgcagagatgtctcagtggtacgaacttcagcagcttgactcaaaattcctggagcaggttcaccagctttatgatgacagttttcccatggaaatcagacagtacctggcacagtggttagaaaagcaagactgggagcacgctgccaatgatgtttcatttgccaccatccgttttcatgacctcctgtcacagctggatgatcaatatagtcgcttttctttggagaataacttcttgctacagcataacataaggaaaagcaagcgtaatcttcaggataattttcaggaagacccaatccagatgtctatgatcatttacagctgtctgaaggaagaaaggaaaattctggaaaacgcccagagatttaatcaggctcagtcggggaatattcagagcacagtgatgttagacaaacagaaagagcttgacagtaaagtcagaaatgtgaaggacaaggttatgtgtatagagcatgaaatcaagagcctggaagatttacaagatgaatatgacttcaaatgcaaaaccttgcagaacagag

SEQ ID NO: 238531 - DNA, 567 bp, Artificial Sequence
  derived and/or modified sequence
gcagaccgagcctgaggacgcctatagaaactgccagaccccaacctctggttcaagggcagctacccaggctggctgagggtcacagcttaccagacaggacaagatctgagtcagtgcaagtgcaaactgtgtagatagcgaagtgaagcgggtaaaagagaccttttcaggacaaggaaagaaacggtggaagtgcaaggaaagtttcatttgctgtatgccatcctcgagagctgtctaggttaacgttcgcactctgtgtatataacctcgacagtcttggcacctaacgtgctgtgcgtagctgctcctttggttgaatccccaggcccttgttggggcacaaggtggcaggatgtctcagtggtacgaacttcagcagcttgactcaaaattcctggagcaggttcaccagctttatgatgacagttttcccatggaaatcagacagtacctggcacagtggttagaaaagcaagactgggagcacgctgccaatgatgtttcatttgccaccatccgttttcatgacctcctgtcacagctggatgatcaatatagtcg

SEQ ID NO: 238532 - DNA, 2594 bp, Artificial Sequence
  derived and/or modified sequence
gattggtgggggcggaagggggccgggcgccagcgctgccttttctcctgccgggtagtttcgctttcctgcgcagagtctgcggaggggctcggctgcaccggggggatcgcgcctggcagaccccagaccgagcagaggcgacccagcgcgctcgggagaggctgcaccgccgcgcccccgcctagcccttccggatcctgcgcgcagaaaagtttcatttgctgtatgccatcctcgagagctgtctaggttaacgttcgcactctgtgtatataacctcgacagtcttggcacctaacgtgctgtgcgtagctgctcctttggttgaatccccaggcccttgttggggcacaaggtggcaggatgtctcagtggtacgaacttcagcagcttgactcaaaattcctggagcaggttcaccagctttatgatgacagttttcccatggaaatcagacagtacctggcacagtggttagaaaagcaagactgggagcacgctgccaatgatgtttcatttgccaccatccgttttcatgacctcctgtcacagctggatgatcaatatagtcgcttttctttggagaataacttcttgctacagcataacataaggaaaagcaagcgtaatcttcaggataattttcaggaagacccaatccagatgtctatgatcatttacagctgtctgaaggaagaaaggaaaattctggaaaacgcccagagatttaatcaggctcagtcggggaatattcagagcacagtgatgttagacaaacagaaagagcttgacagtaaagtcagaaatgtgaaggacaaggttatgtgtatagagcatgaaatcaagagcctggaagatttacaagatgaatatgacttcaaatgcaaaaccttgcagaacagaggaagtagttcacaaaataatagagttgctgaatgtcactgaacttacccagaatgccctgattaatgatgaactagtggagtggaagcggagacagcagagcgcctgtattggggggccgcccaatgcttgcttggatcagctgcagaactggttcactatagttgcggagagtctgcagcaagttcggcagcagcttaaaaagttggaggaattggaacagaaatacacctacgaacatgaccctatcacaaaaaacaaacaagtgttatgggaccgcaccttcagtcttttccagcagctcattcagagctcgtttgtggtggaaagacagccctgcatgccaacgcaccctcagaggccgctggtcttgaagacaggggtccagttcactgtgaagttgagactgttggtgaaattgcaagagctgaattataatttgaaagtcaaagtcttatttgataaagatgtgaatgagagaaatacagtaaaaggatttaggaagttcaacattttgggcacgcacacaaaagtgatgaacatggaggagtccaccaatggcagtctggcggctgaatttcggcacctgcaattgaaagaacagaaaaatgctggcaccagaacgaatgagggtcctctcatcgttactgaagagcttcactcccttagttttgaaacccaattgtgccagcctggtttggtaattgacctcgagacgacctctctgcccgttgtggtgatctccaacgtcagccagctcccgagcggttgggcctccatcctttggtacaacatgctggtggcggaacccaggaatctgtccttcttcctgactccaccatgtgcacgatgggctcagctttcagaagtgctgagttggcagttttcttctgtcaccaaaagaggtctcaatgtggaccagctgaacatgttgggagagaagcttcttggtcctaacgccagccccgatggtctcattccgtggacgaggttttgtaaggaaaatataaatgataaaaattttcccttctggctttggattgaaagcatcctagaactcattaaaaaacacctgctccctctctggaatgatgggtgcatcatgggcttcatcagcaaggagcgagagcgtgccctgttgaaggaccagcagccggggaccttcctgctgcggttcagtgagagctcccgggaaggggccatcacattcacatgggtggagcggtcccagaacggaggcgaacctgacttccatgcggttgaaccctacacgaagaaagaactttctgctgttactttccctgacatcattcgcaattacaaagtcatggctgctgagaatattcctgagaatcccctgaagtatctgtatccaaatattgacaaagaccatgcctttggaaagtattactccaggccaaaggaagcaccagagccaatggaacttgatggccctaaaggaactggatatatcaagactgagttgatttctgtgtctgaagtgtaagtgaacacagaagagtgacatgtttacaaacctcaagccagccttgctcctggctggggcctgttgaagatgcttgtattttacttttccattgtaattgctatcgccatcacagctgaacttgttgagatccccgtgttactgcctatcagcattttactactttaaaaaaaaaaaaaaa

SEQ ID NO: 238533 - DNA, 572 bp, Artificial Sequence
  derived and/or modified sequence
aaactgcaccgcgcaaagccaggggcgtgggcgggcccgggctgctctacctgcgctcggaaagctagggctccaaagcgttcctgagcggtttttgaccgcgaatgtgatagtgctcatggatgtctcagtggtacgaacttcagcagcttgactcaaaattcctggagcaggttcaccagctttatgatgacagttttcccatggaaatcagacagtacctggcacagtggttagaaaagcaagactgggagcacgctgccaatgatgtttcatttgccaccatccgttttcatgacctcctgtcacagctggatgatcaatatagtcgcttttctttggagaataacttcttgctacagcataacataaggaaaagcaagcgtaatcttcaggataattttcaggaagacccaatccagatgtctatgatcatttacagctgtctgaaggaagaaaggaaaattctggaaaacgcccagagatttaatcaggctcagtcggggaatattcagagcacagtgatgttagacaaacagaaagagcttgacagtaaagtcagaaatgtgaag

SEQ ID NO: 238534 - DNA, 2029 bp, Artificial Sequence
  derived and/or modified sequence
gaatgtcatgaagacccaatccagatgtctatgatcatttacagctgtctgaaggaagaaaggaaaattctggaaaacgcccagagatttaatcaggctcagtcggggaatattcagagcacagtgatgttagacaaacagaaagagcttgacagtaaagtcagaaatgtgaaggacaaggttatgtgtatagagcatgaaatcaagagcctggaagatttacaagatgaatatgacttcaaatgcaaaaccttgcagaacagagaacacgagaccaatggtgtggcaaagagtgatcagaaacaagaacagctgttactcaagaagatgtatttaatgcttgacaataagagaaaggaagtagttcacaaaataatagagttgctgaatgtcactgaacttacccagaatgccctgattaatgatgaactagtggagtggaagcggagacagcagagcgcctgtattggggggccgcccaatgcttgcttggatcagctgcagaactggttcactatagttgcggagagtctgcagcaagttcggcagcagcttaaaaagttggaggaattggaacagaaatacacctacgaacatgaccctatcacaaaaaacaaacaagtgttatgggaccgcaccttcagtcttttccagcagctcattcagagctcgtttgtggtggaaagacagccctgcatgccaacgcaccctcagaggccgctggtcttgaagacaggggtccagttcactgtgaagttgagactgttggtgaaattgcaagagctgaattataatttgaaagtcaaagtcttatttgataaagatgtgaatgagagaaatacagtaaaaggatttaggaagttcaacattttgggcacgcacacaaaagtgatgaacatggaggagtccaccaatggcagtctggcggctgaatttcggcacctgcaattgaaagaacagaaaaatgctggcaccagaacgaatgagggtcctctcatcgttactgaagagcttcactcccttagttttgaaacccaattgtgccagcctggtttggtaattgacctcgagacgacctctctgcccgttgtggtgatctccaacgtcagccagctcccgagcggttgggcctccatcctttggtacaacatgctggtggcggaacccaggaatctgtccttcttcctgactccaccatgtgcacgatgggctcagctttcagaagtgctgagttggcagttttcttctgtcaccaaaagaggtctcaatgtggaccagctgaacatgttgggagagaagcttcttggtcctaacgccagccccgatggtctcattccgtggacgaggttttgtaaggaaaatataaatgataaaaattttcccttctggctttggattgaaagcatcctagaactcattaaaaaacacctgctccctctctggaatgatgggtgcatcatgggcttcatcagcaaggagcgagagcgtgccctgttgaaggaccagcagccggggaccttcctgctgcggttcagtgagagctcccgggaaggggccatcacattcacatgggtggagcggtcccagaacggaggcgaacctgacttccatgcggttgaaccctacacgaagaaagaactttctgctgttactttccctgacatcattcgcaattacaaagtcatggctgctgagaatattcctgagaatcccctgaagtatctgtatccaaatattgacaaagaccatgcctttggaaagtattactccaggccaaaggaagcaccagagccaatggaacttgatggccctaaaggaactggatatatcaagactgagttgatttctgtgtctgaagtgtaagtgaacacagaagagtgacatgtttacaaacctcaagccagccttgctcctggctggggcctgttgaagatgcttgtattttacttttccattgtaattgctatcgccatcacagctgaacttgttgagatccccgtgttactgcctatcagcattttactacttt

SEQ ID NO: 238535 - protein, 726 aa, Artificial Sequence
  derived and/or modified sequence
MADSSGQQGKGRRVQPQWSPPAGTQPCRLHLYNSLTRNKEVFIPQDGKKVTWYCCGPTVYDASHMGHARSYISFDILRRVLKDYFKFDVFYCMNITDIDDKIIKRARQNHLFEQYREKRPEAAQLLEDVQAALKPFSVKLNETTDPDKKQMLERIQHAVQLATEPLEKAVQSRLTGEEVNSCVEVLLEEAKDLLSDWLDSTLGCDVTDNSIFSKLPKFWEGDFHRDMEALNVLPPDVLTRVSEYVPEIVNFVQKIVDNGYGYVSNGSVYFDTAKFASSEKHSYGKLVPEAVGDQKALQEGEGDLSISADRLSEKRSPNDFALWKASKPGEPSWPCPWGKGRPGWHIECSAMAGTLLGASMDIHGGGFDLRFPHHDNELAQSEAYFENDCWVRYFLHTGHLTIAGCKMSKSLKNFITIKDALKKHSARQLRLAFLMHSWKDTLDYSSNTMESALQYEKFLNEFFLNVKDILRAPVDITGQFEKWGEEEAELNKNFYDKKTAIHKALCDNVDTRTVMEEMRALVSQCNLYMAARKAVRKRPNQALLENIALYLTHMLKIFGAVEEDSSLGFPVGGPGTSLSLEATVMPYLQVLSEFREGVRKIAREQKVPEILQLSDALRDNILPELGVRFEDHEGLPTVVKLVDRNTLLKEREEKRRVEEEKRKKKEEAARRKQEQEAAKLAKMKIPPSEMFLSETDKYSKFDENVSMVCPHMTWRAKSSAKGKPRS

SEQ ID NO: 238536 - protein, 739 aa, Artificial Sequence
  derived and/or modified sequence
MEPTSGPFRTDLGYHLVGCSSGKGRRVQPQWSPPAGTQPCRLHLYNSLTRNKEVFIPQDGKKVTWYCCGPTVYDASHMGHARSYISFDILRRVLKDYFKFDVFYCMNITDIDDKIIKRARQNHLFEQYREKRPEAAQLLEDVQAALKPFSVKLNETTDPDKKQMLERIQHAVQLATEPLEKAVQSRLTGEEVNSCVEVLLEEAKDLLSDWLDSTLGCDVTDNSIFSKLPKFWEGDFHRDMEALNVLPPDVLTRVSEYVPEIVNFVQKIVDNGYGYVSNGSVYFDTAKFASSEKHSYGKLVPEAVGDQKALQEGEGDLSISADRLSEKRSPNDFALWKASKPGEPSWPCPWGKGRPGWHIECSAMAGTLLGASMDIHGGGFDLRFPHHDNELAQSEAYFENDCWVRYFLHTGHLTIAGCKMSKSLKNFITIKDALKKHSARQLRLAFLMHSWKDTLDYSSNTMESALQYEKFLNEFFLNVKDILRAPVDITGQFEKWGEEEAELNKNFYDKKTAIHKALCDNVDTRTVMEEMRALVSQCNLYMAARKAVRKRPNQALLENIALYLTHMLKIFGAVEEDSSLGFPVGGPGTSLSLEATVMPYLQVLSEFREGVRKIAREQKVPEILQLSDALRDNILPELGVRFEDHEGLPTVVKLVDRNTLLKEREEKRRVEEEKRKKKEEAARRKQEQEAAKLAKMKIPPSEMFLSETDKYSKFDENVSMVCPHMTWRAKSSAKGKPRS

SEQ ID NO: 238537 - DNA, 2181 bp, Artificial Sequence
  derived and/or modified sequence
atggcagattccagtggacagcaggggaagggacggcgagtccagccccagtggtcacccccagccggcacccagccatgtagactacatctgtacaactctctgacacgtaataaggaagtcttcataccccaggacggaaaaaaggtcacctggtattgttgcggtcccactgtgtacgacgccagtcacatggggcatgcccggtcatacatttcattcgatattctgaggagagtgttgaaggattattttaaatttgacgtattttactgtatgaatataactgacatcgacgacaaaataataaaaagagcccgccagaaccatctctttgaacagtatagagaaaagcgacccgaagcagcacagctgttggaggatgtccaggcagcactcaagccattttcagtgaagctcaatgagaccaccgaccccgataaaaagcaaatgttggagagaattcaacacgcagtgcagcttgccactgagcctctcgagaaagctgtgcagtcgcgcctgacgggcgaagaggtgaatagctgtgttgaggtcctgctcgaggaggccaaggatctgctatcagattggttggactcaactctgggttgtgacgttacagacaacagtatattcagcaagctgcccaaattttgggaaggagattttcatcgggatatggaagctttgaatgtgttacctccagatgtgctgacccgtgtgtccgaatatgtgcccgaaattgtgaattttgtgcagaaaatagtcgataacggctatggttatgtgtctaacggtagcgtttatttcgacacagccaaattcgcttcttctgaaaagcactcctacgggaagctggtgcccgaggctgtgggagaccaaaaggccttacaggaaggcgagggagatttaagtatatctgccgacagactatcagagaagaggagccctaacgattttgccctttggaaagcctctaaaccgggtgaaccaagctggccctgtccctggggcaagggtagacccggatggcacattgagtgctccgccatggcaggtacgcttctgggagcctcaatggatattcatggtggcgggtttgacctgagatttcctcaccacgataacgagcttgcacagtctgaggcatacttcgagaatgattgctgggtccgatatttcttgcataccgggcacttaacaatagctggatgcaaaatgtctaagtcactgaagaattttatcaccatcaaggacgctttgaaaaaacactccgccaggcaactgcggctggcctttctgatgcacagctggaaagatacactggactactctagcaatactatggagtcggcattacagtacgagaaatttctgaatgaattcttcctgaacgtaaaggacattctaagagctcccgtggacattactggacagttcgaaaagtggggcgaggaagaagccgagctgaataaaaatttctacgataaaaagaccgctatccataaggcgctgtgtgacaacgtggacactaggactgtgatggaggagatgcgagccctcgtgagtcagtgcaatctctacatggccgctcgaaaggcggtacgcaagcgtcctaatcaggccttactagagaacatcgccctgtaccttacccacatgcttaaaatattcggggcggtcgaggaggattcatcactggggttcccagtgggcggccccggaacgagcctcagcctcgaggcaactgtcatgccctatctccaagtccttagtgagttccgcgaaggggtcagaaaaatagctagggagcagaaagtccctgaaatcctgcagcttagcgatgctcttagagacaacatcctgccagaattgggagtgagattcgaggatcacgagggacttcccaccgtcgtgaagctggtcgacagaaacactctgctgaaggaacgcgaggagaaacggagggttgaggaagagaagagaaagaagaaagaagaggccgcacggcgaaaacaagaacaagaggcagcaaaattggcaaagatgaagatccctccatctgaaatgttcctgtctgagaccgataagtacagtaaattcgacgagaacgtatcaatggtctgccctcatatgacatggagggccaaaagtagcgcgaaagggaagccccgcagttag

SEQ ID NO: 238538 - DNA, 2220 bp, Artificial Sequence
  derived and/or modified sequence
atggaaccaaccagtggcccgtttaggacggacctcggctaccacctggtcggatgttcaagcggcaaaggaagaagagtgcagccacaatggtccccccctgcaggaacacagccatgcaggctccacctgtataactctttgacaaggaacaaggaagtgtttatccctcaggacggtaagaaagtgacatggtactgttgcggccctaccgtgtacgatgccagtcacatgggacatgcgcgaagctacatatcattcgatatcctgcgacgggtattgaaggactatttcaaatttgatgtgttttactgcatgaatataacagacatagacgacaaaatcatcaaacgcgcccggcagaatcatctgtttgagcagtacagggaaaagcggcccgaagctgctcagctgctcgaggacgtgcaggcggctctcaagcctttcagcgtgaaattaaacgagactactgacccagataagaagcagatgctggagaggattcagcacgctgttcaactggccacggagcccttagagaaagcggtgcagtctcggctaaccggtgaggaggtgaactcctgtgtggaagtgttgctggaagaggctaaagacctgctgtccgactggctagatagtacgttaggctgcgacgtgacggacaatagtatctttagcaagctgccaaaattttgggagggtgattttcacagggacatggaagccctgaatgttctccctccagacgtgctgaccagagtgtcagaatacgtgcccgagattgtcaatttcgtgcagaagattgtcgacaacggctatggatacgtatctaatggttccgtctacttcgacaccgccaaattcgcctcgagcgaaaaacatagctacggaaaactggtgccagaggctgtgggggatcagaaggcgctgcaagaaggagagggtgatctctccattagcgctgatcggttgtcggaaaaacggtcccctaatgacttcgccctgtggaaagcctcgaagccgggcgaaccgtcgtggccttgtccatgggggaagggtcgaccaggatggcacattgagtgctccgcaatggcaggcactctgctcggcgccagtatggacatccacggggggggtttcgacttgagattccctcatcatgacaacgagctggcccagtcggaagcctattttgaaaatgactgttgggtaaggtatttcttacacacgggacacctcactatcgccggttgcaaaatgtccaaaagcctgaaaaatttcatcaccatcaaggacgccttgaaaaaacacagcgcaagacagttgaggctcgcctttctgatgcatagttggaaggacacacttgactacagttccaatacgatggagagcgccctccagtatgagaagtttcttaatgaattttttctgaatgtgaaggacattctacgggctccagtcgatattacaggccaattcgagaaatggggtgaagaagaggccgaactcaataaaaatttctatgacaaaaagactgccatccacaaagccctttgtgataacgtcgatactcggacagtaatggaagaaatgcgagcattagtgagccagtgcaacctgtacatggctgcccggaaagctgtacgaaaacgtccgaaccaggctctgttagaaaacatcgctttatatcttacacacatgctgaagatcttcggagccgtggaagaggatagtagtctaggcttcccggtgggcggtccaggcaccagcctctcactggaggcaaccgtgatgccttacttgcaggtgctgtcagaattcagagagggggtgcgaaagatcgcgagagagcaaaaggtgcctgagattctgcagctgagtgatgcgttacgagacaacatcttacccgaattgggagttcgcttcgaggatcatgaagggttgcctaccgtggtgaaactcgtagaccgaaatactctattaaaggaacgcgaggaaaaaagaagggtcgaagaagagaagcgcaaaaagaaggaggaagctgcacgacggaaacaggagcaggaggctgctaagctggccaagatgaagatccccccttcagagatgtttctcagcgagacagacaaatactccaaatttgatgaaaacgtgagcatggtttgcccacacatgacctggcgcgcaaagtctagtgccaaagggaaacctcggtcgtag

SEQ ID NO: 238539 - DNA, 2181 bp, Artificial Sequence
  derived and/or modified sequence
atggctgacagcagcggccagcagggcaagggccggcgggtgcagccccagtggagccccccagctggcacccagccctgccgcctgcacctgtacaacagcctgaccaggaacaaggaggtgttcatcccccaggacggcaagaaggtgacctggtactgctgcggccccaccgtgtatgatgccagccacatgggccacgcccggagctacatcagctttgacatcctgcggcgggtgctgaaggactacttcaagtttgatgtgttctactgcatgaacatcacagacattgatgacaagatcatcaagagggcccggcagaaccacctgtttgagcagtaccgggagaagaggcctgaggccgcccagctgctggaggatgtgcaggccgccctgaagcccttctctgtgaagctgaatgagaccacagatcctgacaagaagcagatgctggagcgcatccagcacgctgtgcagctggccacagagcccctggagaaggctgtgcagagccggctgactggagaggaggtgaacagctgtgtggaggtgctgctggaggaggccaaggacctgctgagtgactggctggacagcaccctgggctgtgatgtgacagacaacagcatcttcagcaagctgcccaagttctgggagggggacttccaccgggacatggaggccctgaatgtgctgcccccagatgtgctgaccagggtgtctgaatatgtgcctgagatcgtgaactttgtgcagaagatcgtggacaatggctacggctacgtgtccaatggatctgtgtactttgacacagccaagtttgccagcagcgagaagcacagctatggcaagctggtgcctgaggccgtgggggaccagaaggccctgcaggagggggagggggacctgagcatctctgctgaccggctgtctgagaagaggagccccaatgactttgccctgtggaaggccagcaagccaggagagcccagctggccctgcccctggggcaagggccggcccggctggcacattgaatgttctgccatggccggcaccctgctgggcgcctccatggacatccatggaggcggctttgacctgcgcttcccccaccacgacaatgagctggcccagagcgaggcctactttgaaaatgactgctgggtgcgctacttcctgcacacaggccacctgaccatcgccggctgcaagatgagcaagagcctgaagaacttcatcaccatcaaggatgccctgaagaagcacagcgcccggcagctgcggctggccttcctgatgcacagctggaaggacaccctggactacagcagcaacaccatggagagcgccctgcagtatgagaagttcctgaatgagttcttcctgaatgtgaaggacatcctgcgggcccctgtggacatcaccggccagtttgagaagtggggcgaggaggaggccgagctgaacaagaacttctatgacaagaagacagccatccacaaggccctgtgtgacaacgtggacaccaggacagtgatggaggagatgagggccctggtgtcccagtgcaacctgtacatggccgccaggaaggctgtgaggaagaggcccaaccaggccctgctggagaacatcgccctgtacctgacccacatgctgaagatctttggagctgtggaggaggacagcagcctgggcttccctgtgggcggccctggcaccagcctgagcctggaggccaccgtgatgccctacctgcaggtgctgtctgagttccgggagggcgtgaggaagatcgcccgggagcagaaggtgcctgagatcctgcagctgagtgatgccctgcgggacaacatcctgcctgagctgggcgtgcgctttgaggaccacgagggcctgcccaccgtggtgaagctggtggacaggaacaccctgctgaaggagcgggaggagaagagaagagtggaggaggagaagaggaagaagaaggaggaggccgcccggaggaagcaggagcaggaggccgccaagctggccaagatgaagatcccccccagcgagatgttcctgtctgaaacagacaagtacagcaagtttgatgaaaatgtgtccatggtgtgcccccacatgacctggagggccaagagcagcgccaagggcaagcccaggagctag

SEQ ID NO: 238540 - DNA, 2220 bp, Artificial Sequence
  derived and/or modified sequence
atggagcccaccagcggccccttcagaacagacctgggctaccacctggtgggctgcagcagtggaaaaggaagaagagtgcagccccagtggagccccccagctggcacccagccctgccgcctgcacctgtacaacagcctgaccaggaacaaggaggtgttcatcccccaggacggcaagaaggtgacctggtactgctgcggccccaccgtgtatgatgccagccacatgggccacgcccggagctacatcagctttgacatcctgcggcgggtgctgaaggactacttcaagtttgatgtgttctactgcatgaacatcacagacattgatgacaagatcatcaagagggcccggcagaaccacctgtttgagcagtaccgggagaagaggcctgaggccgcccagctgctggaggatgtgcaggccgccctgaagcccttctctgtgaagctgaatgagaccacagatcctgacaagaagcagatgctggagcgcatccagcacgctgtgcagctggccacagagcccctggagaaggctgtgcagagccggctgaccggggaggaggtgaacagctgtgtggaggtgctgctggaggaggccaaggacctgctgagtgactggctggacagcaccctgggctgtgatgtgacagacaacagcatcttcagcaagctgcccaagttctgggagggggacttccaccgggacatggaggccctgaatgtgctgcccccagatgtgctgaccagggtgtctgaatatgtgcctgagatcgtgaactttgtgcagaagatcgtggacaatggctacggctacgtgtccaatggatctgtgtactttgacacagccaagtttgccagcagcgagaagcacagctatggcaagctggtgcctgaggccgtgggggaccagaaggccctgcaggagggggagggggacctgagcatctctgctgaccggctgtctgagaagaggagccccaatgactttgccctgtggaaggccagcaagccaggagagcccagctggccctgcccctggggcaagggccggcccggctggcacatcgagtgcagcgccatggccggcaccctgctgggcgcctccatggacatccacggcggcggctttgacctgcgcttcccccaccacgacaatgagctggcccagagcgaggcctactttgaaaatgactgctgggtgcgctacttcctgcacacaggccacctgaccatcgccggctgcaagatgagcaagagcctgaagaacttcatcaccatcaaggatgccctgaagaagcacagcgcccggcagctgcggctggccttcctgatgcacagctggaaggacaccctggactacagcagcaacaccatggagagcgccctgcagtatgagaagttcctgaatgagttcttcctgaatgtgaaggacatcctgcgggcccctgtggacatcaccggccagtttgagaagtggggcgaggaggaggccgagctgaacaagaacttctatgacaagaagacagccatccacaaggccctgtgtgacaacgtggacaccaggacagtgatggaggagatgagggccctggtgtcccagtgcaacctgtacatggccgccaggaaggctgtgaggaagaggcccaaccaggccctgctggagaacatcgccctgtacctgacccacatgctgaagatctttggagctgtggaggaggacagcagcctgggcttccctgtgggcggccctggcaccagcctgagcctggaggccaccgtgatgccctacctgcaggtgctgtctgagttccgggagggcgtgaggaagatcgcccgggagcagaaggtgcctgagatcctgcagctgagtgatgccctgcgggacaacatcctgcctgagctgggcgtgcgctttgaagatcatgagggcctgcccaccgtggtgaagctggtggacaggaacaccctgctgaaggagcgggaggagaagagaagagtggaggaggagaagaggaagaagaaggaggaggccgcccggaggaagcaggagcaggaggccgccaagctggccaagatgaagatccccccatctgagatgttcctgtctgaaacagacaagtacagcaagtttgatgaaaatgtgtccatggtgtgcccccacatgacctggagggccaagagcagcgccaagggcaagcccaggagctag

SEQ ID NO: 238541 - DNA, 2181 bp, Artificial Sequence
  derived and/or modified sequence
atggccgacagcagcggccagcagggcaagggccggcgggtgcagccccaatggtcacctccagcaggtacacagccatgccgacttcacctgtacaactctctgacaaggaataaggaagtgttcatcccacaagacggcaaaaaggttacctggtactgctgcggcccaacggtttatgacgcttctcacatggggcatgcccggagctacatttcttttgatatcctcagacgcgtgctaaaggactatttcaagttcgatgtgttctactgcatgaatataaccgacatcgacgataagattattaagagggccagacagaatcatctgtttgaacagtaccgggaaaagcgtccggaagccgcccaattactcgaagatgtgcaagccgcacttaagcccttcagtgtaaaactcaacgagacgaccgaccccgacaaaaagcagatgctggaaaggatccaacatgctgtgcaacttgctaccgagccccttgaaaaagcagtccagtcccgcctgactggtgaagaggttaacagttgtgtggaagtgctcctggaggaagctaaggacctcctgtcggattggctggatagtaccttgggctgcgatgtgacggacaactctatctttagcaagttgccaaagttctgggaaggagatttccatcgtgacatggaggcactcaacgtgctgccacccgatgtgcttactcgcgtatccgagtacgtgcctgaaattgtaaatttcgtgcagaaaatcgtggataatgggtatggctacgtgagtaatggttctgtttactttgacacagcaaaattcgcttctagcgagaagcattcatatggcaaactggtgcccgaagcagtaggggaccagaaagcattgcaggagggtgaaggggacctgtcaatctctgcagatcggctttcagagaagcgctctcctaacgacttcgctctctggaaagcaagcaagccgggtgagcccagttggccctgtccctgggggaagggacgccccggctggcacatcgagtgtagtgcaatggccgggaccctactgggggcttcaatggatattcatggcggagggttcgatttgcgttttcctcatcacgataacgagctcgcccagagtgaagcatatttcgagaacgattgctgggtgagatattttctccatacagggcacttaacgatcgctggatgtaagatgtctaagtctcttaagaactttattacaattaaggacgcccttaagaaacactctgctcggcaactgcgactcgcttttttgatgcactcttggaaggacacattggactactctagcaacactatggagtcagccctccagtatgaaaagtttctgaacgagttctttctaaacgtgaaggatatccttcgcgctccagtggatatcaccggccagttcgagaaatggggagaagaggaagccgagcttaataagaacttttatgataagaagacagcaatacacaaggctctctgcgacaacgtagatactcggacagttatggaagaaatgcgagctctcgtgtctcagtgtaatctctatatggcggctcggaaagctgtccgcaagaggcccaaccaggctcttctggaaaatattgcgctgtacctgactcatatgcttaaaattttcggtgcagtagaggaagacagcagcctcgggttccccgtgggaggccccgggacctctttgtctcttgaggctaccgtgatgccatatctgcaggtactaagcgaatttagggagggggtgaggaaaatcgcaagggaacaaaaggttccggagattctgcaactgtctgacgctttgagggacaacattttgccggagctgggagtgcgtttcgaagaccacgaaggccttccaaccgtggtaaagctggtggaccgaaatacattactgaaagaacgcgaggaaaaaaggcgcgttgaagaggagaagcgcaaaaagaaagaagaggctgccaggcggaagcaggaacaggaagccgccaaactcgccaaaatgaaaatccctccatctgagatgttcctgtctgagacagataaatactccaaatttgatgagaatgtatcaatggtgtgtcctcacatgacttggcgcgccaagtcttccgccaagggcaaacctagaagttag

SEQ ID NO: 238542 - DNA, 2220 bp, Artificial Sequence
  derived and/or modified sequence
atggagcccaccagcggccccttccggaccgacctgggctaccacttggtgggatgttcttctggtaaaggtagacgcgtgcagccgcagtggagtccaccagctggcactcagccgtgtcggctgcatttgtacaacagtctgactagaaacaaggaagtgttcatcccacaagatggaaagaaagtgacctggtactgctgcgggcctaccgtgtacgacgctagtcacatgggacacgctcgcagttatatctcgtttgacattctgaggagagtgcttaaagactacttcaagtttgatgttttctattgcatgaatattaccgacatcgatgacaagataattaagagggcccgtcagaaccacctcttcgaacagtaccgggagaaacggccagaggctgcccagctcctagaagacgtccaggcagcactgaaaccgttctctgtcaagctgaacgaaacaaccgatccagacaagaaacagatgctggagcggatacagcatgccgtgcagttggccactgagcctctcgaaaaagctgttcaatcacggctgactggggaggaagtcaattcttgtgtggaagtgctgctcgaagaggctaaggacctcctcagcgactggctcgacagcaccctgggttgcgacgtcaccgacaattcaatcttttctaaattacccaaattctgggagggggattttcaccgagacatggaggctcttaacgtgctccctccagatgtgctcacacgcgtgtcggagtacgtcccggaaatagtcaacttcgtacagaaaattgtcgacaacggatatggttatgtgtccaatggatcagtctacttcgatacagcaaaattcgcaagcagcgagaagcattcctatggaaagcttgttcctgaagccgtaggtgatcagaaggcattacaggagggggaaggggacctgtccatttcagccgatcggctgtctgagaaacgtagcccaaatgacttcgccttgtggaaagcttccaagcctggggagcctagttggccctgtccctggggcaaaggccgacctggatggcacattgaatgtagcgcaatggctggcactcttctgggggcctccatggatattcatggtggcggcttcgatttgcgctttccacatcatgataacgagttagcacagtctgaagcctattttgaaaacgattgttgggtgcgctattttcttcacacggggcaccttaccatagcaggttgtaagatgagcaaatcactaaagaactttattacgataaaagacgccctgaagaaacacagcgctcgccagttgcggttagcctttctcatgcacagttggaaggacaccctggactattcttccaacacaatggaatctgccctacagtatgagaagttcctgaatgaattctttcttaatgtaaaggacattctacgggcccccgttgatataacaggacagttcgagaagtggggagaggaagaggctgagttgaataagaacttctacgacaagaagaccgcaattcacaaggccctctgtgataatgtggacacacgaacagttatggaggagatgagggcgctcgtgagtcaatgcaacctgtatatggctgcccgaaaagccgtgaggaaaagacccaaccaagccctgctggagaacattgctctttacctcacccacatgctcaagatatttggagcggtggaagaggactcatctcttggattcccggtgggcgggccagggacctccctcagcctggaggctactgtgatgccttatctgcaggtgttaagcgagtttcgagaaggggtcaggaagattgccagagagcagaaagttccagaaattctgcagttgtccgacgccctcagggacaacatcctgccggagctgggtgtcagatttgaagaccatgagggattgcccaccgttgttaaacttgtagaccgcaacaccttgttaaaggaacgggaggaaaagcggcgagttgaagaagaaaaacgaaagaagaaagaggaagctgctcgccgcaaacaggaacaggaagctgcgaagttggccaagatgaagatccctcctagcgagatgttcctgagtgaaactgataagtattcaaagttcgatgagaatgtatcaatggtctgtccccacatgacttggagagctaaaagcagtgctaagggcaagcctcgctcctag

SEQ ID NO: 238543 - DNA, 2181 bp, Artificial Sequence
  derived and/or modified sequence
atggcggactcctccggacaacaaggaaaaggcagaagggttcagccgcagtggtcacctccagctgggacccagccttgtcgtctacacttgtataattcgctgactagaaataaggaggtcttcattccacaagacggcaagaaggtcacatggtattgctgcggccctacagtgtacgatgctagccatatggggcacgcgagaagttatatttcttttgacatactccgacgagtgcttaaagactatttcaaatttgatgtcttctactgcatgaacataacggacattgacgacaaaattatcaaaagagcgaggcagaaccatctatttgagcagtatagagagaagcgaccagaggcggcacagctattagaggacgtgcaggcagctctcaagccttttagcgtcaaactgaacgaaaccaccgaccctgataaaaaacagatgctggaaaggattcagcacgccgtccaactagccaccgaaccgctcgagaaagctgttcaaagcaggcttacgggcgaagaagtaaattcatgtgtagaggtgttacttgaagaggccaaggacttattgagcgattggctggactctaccttgggatgcgatgtcacagacaactcaatcttttccaaactgccgaaattctgggaaggcgactttcatagggatatggaggcgctgaacgtcctccctcctgacgtccttacacgggtctcagaatatgttcccgaaattgtgaacttcgtgcagaagattgtcgacaacggatatggctatgtctcaaatggtagcgtctatttcgacacggcgaaatttgcttcgagcgaaaagcattcatacggcaaactcgtgcccgaggcagtgggtgaccagaaagccctgcaggagggtgagggcgatctgtccatctctgccgaccggctgtcggagaagcgcagccccaatgattttgcattgtggaaagcaagcaagccaggcgaaccttcttggccatgtccctggggcaagggcaggccaggatggcatatcgaatgcagcgccatggccggaacgctgctcggggcatccatggacattcacgggggtggcttcgatcttcgcttcccacaccatgacaatgagctggcccagtcggaggcctattttgagaacgattgctgggttagatattttctgcacaccgggcatctcaccatagctggatgcaaaatgagtaagtctttaaagaattttatcaccattaaggacgcccttaaaaagcattccgccagacaactgagactggcttttttgatgcatagctggaaggatacccttgattattcatcaaatacgatggagtcggcactgcagtacgaaaaatttctgaacgaattttttttgaacgtgaaagatatcctgcgggcaccagtggacatcactggccagtttgaaaagtggggtgaggaggaggcagaactcaacaaaaatttctatgataagaaaacagccatccacaaggcactctgcgacaatgtagacacccggaccgtaatggaagagatgagggcccttgtttcccagtgcaatctgtacatggcggcacgaaaagcagtgcgaaaaaggcctaatcaggctctgctggaaaatatcgccctttatctgacgcacatgctgaagatttttggcgctgttgaggaggactcatctctcgggttcccagtaggagggccaggcacctcccttagtcttgaggcgacggtgatgccttacctccaagtcctctccgaatttagagagggagtgcgcaagatagccagagaacaaaaggttcccgagatcttgcaactctcagacgctctgcgcgataatatcctcccagagctgggagtgcggtttgaagaccacgagggcctgcccaccgtagtcaagttagtggacaggaatactctgcttaaggagagggaggagaaaaggagagtagaggaggaaaagcgcaagaaaaaagaagaagccgcaaggcgaaagcaagagcaagaggccgctaaacttgcgaagatgaaaattccaccctccgagatgttcctatcagagacagataagtactccaagtttgacgaaaacgtgagcatggtatgccctcatatgacttggagagcaaaatcatccgccaaaggcaaaccacgctcgtag

SEQ ID NO: 238544 - DNA, 2220 bp, Artificial Sequence
  derived and/or modified sequence
atggaaccgacctcaggcccttttcgtaccgatctcggataccatttggtgggatgcagtagtggaaaagggcgaagggtccagccacaatggtccccaccagctggaacacagccttgcaggctgcacctgtataactcgctcactcgaaacaaggaagtatttattccacaggacgggaaaaaggtgacatggtactgctgtgggccaactgtgtacgacgctagtcatatgggtcatgcaagaagctatatttccttcgacatactgagacgcgttctgaaggactacttcaagttcgatgtgttctactgtatgaacataacagatatcgacgataagatcattaagcgtgcacgacagaatcacctgttcgagcagtaccgagagaagcggcctgaagccgctcagcttctagaagacgttcaggctgccctgaaaccattctccgtaaaactgaatgagactacagaccctgacaagaagcagatgctagaaagaatacagcacgcagtccagctcgccacggaacctctggaaaaagccgtgcaatcgcgcctgacaggagaggaggttaacagctgcgtggaggtattgctcgaagaagccaaggacctgctgtctgattggctcgacagcacactcggatgcgatgtaactgacaattccatcttttcaaaactgcccaaattctgggaaggcgactttcacagagacatggaagccctcaacgtgctgcctcccgatgtcctgaccagagtgtcagagtatgtgcccgagatagtcaacttcgtgcagaaaatcgtagataatgggtacggctacgtttccaacgggtcagtttacttcgacacagccaaattcgccagcagcgaaaagcactcctacggtaagttagtccctgaagctgtgggcgatcagaaggccttgcaggaaggcgaaggcgatcttagtatcagcgctgatcgattaagcgagaagcggtcacctaatgatttcgcactgtggaaggcgtcaaagcctggcgagccgtcctggccctgcccttggggcaagggaaggccgggatggcatattgagtgcagcgctatggcaggcactctgctaggcgcaagtatggatatccacggagggggattcgacctgcgattccctcaccacgataacgagctggcacagtccgaagcctactttgaaaatgactgttgggtgcgctacttcctccataccggccacttaaccatcgcaggttgcaagatgtctaagtccttaaagaactttattaccatcaaggatgctctgaaaaaacactcagctcgccagctaaggctagcatttctcatgcacagttggaaggacaccctcgactattcctccaacacaatggaatctgccctgcagtatgagaagtttctgaatgagttcttcctaaacgtcaaagacatcttgagggcccctgtggatataactggtcagttcgagaagtggggagaagaagaggctgagctgaacaagaacttttatgataaaaagaccgccatacacaaagcactgtgtgacaacgtggataccaggaccgtgatggaagagatgcgcgcattggtgtcgcaatgtaacctatatatggccgcacgcaaggccgttcgcaagagacctaaccaggcgctgctagaaaacattgcactttacctgacacacatgctgaaaattttcggtgcggtcgaggaggattcctctctcgggtttccagtgggcggtcctgggacttcactgtctcttgaagccaccgtgatgccatacttgcaagtgttgagtgagttccgtgagggggtgcggaaaattgctagggagcagaaggtccctgagattctgcagctgagcgacgctctgcgagacaacatcctgcccgagctgggcgtgcggtttgaggaccatgagggcttaccaaccgtagtgaagcttgtggaccgcaacacgcttctgaaggagagagaggagaagcggagagttgaggaagagaagcggaagaagaaggaagaagctgcccgaagaaaacaggagcaggaggctgccaagctggctaaaatgaagatccccccatcggagatgtttctatccgaaacagataaatactctaagttcgacgaaaacgtgagcatggtgtgccctcacatgacctggcgggctaaatcctccgcgaagggcaagcctcggtcctag

SEQ ID NO: 238545 - DNA, 2491 bp, Artificial Sequence
  derived and/or modified sequence
agattctaggaagtgtctgtagccgcagctgcgggtccgggattcccagccatggcagattcctccgggcagcagggcaaaggccggcgtgtgcagccccagtggtcccctcctgctgggacccagccatgcagactccacctttacaacagcctcaccaggaacaaggaagtgttcatacctcaagatgggaaaaaggtgacgtggtattgctgtgggccaaccgtctatgacgcatctcacatggggcacgccaggtcctacatctcttttgatatcttgagaagagtgttgaaggattacttcaaatttgatgtcttttattgcatgaacattacggatattgatgacaagatcatcaagagggcccggcagaaccacctgttcgagcagtatcgggagaagaggcctgaagcggcacagctcttggaggatgttcaggccgccctgaagccattttcagtaaaattaaatgagaccacggatcccgataaaaagcagatgctcgaacggattcagcacgcagtgcagcttgccacagagccacttgagaaagctgtgcagtccagactcacgggagaggaagtcaacagctgtgtggaggtgttgctggaagaagccaaggatttgctctctgactggctggattctacacttggctgtgatgtcactgacaattccatcttctccaagctgcccaagttctgggagggggacttccacagagacatggaagctctgaatgttctccctccagatgtcttaacccgggttagtgagtatgtgccagaaattgtgaactttgtccagaagattgtggacaacggttacggctatgtctccaatgggtctgtctactttgatacagcgaagtttgcttctagcgagaagcactcctatgggaagctggtgcctgaggccgttggagatcagaaagcccttcaagaaggggaaggtgacctgagcatctctgcagaccgcctgagtgagaagcgctctcccaacgactttgccttatggaaggcctctaagcccggagaaccgtcctggccgtgcccttggggaaagggtcgtccgggctggcatatcgagtgctcggccatggcaggcaccctcctaggggcttcgatggacattcacggaggtgggttcgacctccggttcccccaccatgacaatgagctggcacagtcggaggcctactttgaaaacgactgctgggtcaggtacttcctgcacacaggccacctgaccattgcaggctgcaaaatgtcaaagtcactaaaaaacttcatcaccattaaagatgccttgaaaaagcactcagcacggcagttgcggctggccttcctcatgcactcgtggaaggacaccctggactactccagcaacaccatggagtcagcgcttcaatatgagaagttcttgaatgagtttttcttaaatgtgaaagatatccttcgcgctcctgttgacatcactggtcagtttgagaagtggggagaagaagaagcagaactgaataagaacttttatgacaagaagacagcaattcacaaagccctctgtgacaatgttgacacccgcaccgtcatggaagagatgcgggccttggtcagtcagtgcaacctctatatggcagcccggaaagccgtgaggaagaggcccaaccaggctctgctggagaacatcgccctgtacctcacccatatgctgaagatctttggggccgtagaagaggacagctccctgggattcccggtcggagggcctggaaccagcctcagtctcgaggccacagtcatgccctaccttcaggtgttatcagaattccgagaaggagtgcggaagattgcccgagagcaaaaagtccctgagattctgcagctcagcgatgccctgcgggacaacatcctgcccgagcttggggtgcggtttgaagaccacgaaggactgcccacagtggtgaaactggtagacagaaacaccttattaaaagagagagaagaaaagagacgggttgaagaggagaagaggaagaagaaagaggaggcggcccggaggaaacaggaacaagaagcagcaaagctggccaagatgaagattccccccagtgagatgttcttgtcagaaaccgacaaatactccaagtttgatgaaaatgtaagcatggtctgcccacacatgacatggagggcaaagagctcagcaaagggcaagccaagaagctgaagaagctcttcgaggctcaggagaagctctacaaggaatatctgcagatggcccagaatggaagcttccagtgagggggcacaggactgactttttaaaccattgtggactagtggctgctgtctgcctcagtgacaatgtcccagcgctcctatcatgtttacagtcacccttgggtcctaaattaagagttgtgttcatgtaggttcgtgtcgtcgttggctctgagacattgataataaatttttctcaacagtga

SEQ ID NO: 238546 - DNA, 2637 bp, Artificial Sequence
  derived and/or modified sequence
ctgtagccgcagctgcgggtccgggattcccagccatggcagattcctccgggcagcaggcttttcctttgcggtcttgaaggtgcataggcttggtgcctgtccaagagcctgattatttcagaaggatgagtttcatttctgaggtttctggggtagatggagcctacctcagggcctttccgcacagacttgggataccacttggtcggctgctcatcaggcaaaggccggcgtgtgcagccccagtggtcccctcctgctgggacccagccatgcagactccacctttacaacagcctcaccaggaacaaggaagtgttcatacctcaagatgggaaaaaggtgacgtggtattgctgtgggccaaccgtctatgacgcatctcacatggggcacgccaggtcctacatctcttttgatatcttgagaagagtgttgaaggattacttcaaatttgatgtcttttattgcatgaacattacggatattgatgacaagatcatcaagagggcccggcagaaccacctgttcgagcagtatcgggagaagaggcctgaagcggcacagctcttggaggatgttcaggccgccctgaagccattttcagtaaaattaaatgagaccacggatcccgataaaaagcagatgctcgaacggattcagcacgcagtgcagcttgccacagagccacttgagaaagctgtgcagtccagactcacgggagaggaagtcaacagctgtgtggaggtgttgctggaagaagccaaggatttgctctctgactggctggattctacacttggctgtgatgtcactgacaattccatcttctccaagctgcccaagttctgggagggggacttccacagagacatggaagctctgaatgttctccctccagatgtcttaacccgggttagtgagtatgtgccagaaattgtgaactttgtccagaagattgtggacaacggttacggctatgtctccaatgggtctgtctactttgatacagcgaagtttgcttctagcgagaagcactcctatgggaagctggtgcctgaggccgttggagatcagaaagcccttcaagaaggggaaggtgacctgagcatctctgcagaccgcctgagtgagaagcgctctcccaacgactttgccttatggaaggcctctaagcccggagaaccgtcctggccgtgcccttggggaaagggtcgtccgggctggcatatcgagtgctcggccatggcaggcaccctcctaggggcttcgatggacattcacggaggtgggttcgacctccggttcccccaccatgacaatgagctggcacagtcggaggcctactttgaaaacgactgctgggtcaggtacttcctgcacacaggccacctgaccattgcaggctgcaaaatgtcaaagtcactaaaaaacttcatcaccattaaagatgccttgaaaaagcactcagcacggcagttgcggctggccttcctcatgcactcgtggaaggacaccctggactactccagcaacaccatggagtcagcgcttcaatatgagaagttcttgaatgagtttttcttaaatgtgaaagatatccttcgcgctcctgttgacatcactggtcagtttgagaagtggggagaagaagaagcagaactgaataagaacttttatgacaagaagacagcaattcacaaagccctctgtgacaatgttgacacccgcaccgtcatggaagagatgcgggccttggtcagtcagtgcaacctctatatggcagcccggaaagccgtgaggaagaggcccaaccaggctctgctggagaacatcgccctgtacctcacccatatgctgaagatctttggggccgtagaagaggacagctccctgggattcccggtcggagggcctggaaccagcctcagtctcgaggccacagtcatgccctaccttcaggtgttatcagaattccgagaaggagtgcggaagattgcccgagagcaaaaagtccctgagattctgcagctcagcgatgccctgcgggacaacatcctgcccgagcttggggtgcggtttgaagaccacgaaggactgcccacagtggtgaaactggtagacagaaacaccttattaaaagagagagaagaaaagagacgggttgaagaggagaagaggaagaagaaagaggaggcggcccggaggaaacaggaacaagaagcagcaaagctggccaagatgaagattccccccagtgagatgttcttgtcagaaaccgacaaatactccaagtttgatgaaaatgtaagcatggtctgcccacacatgacatggagggcaaagagctcagcaaagggcaagccaagaagctgaagaagctcttcgaggctcaggagaagctctacaaggaatatctgcagatggcccagaatggaagcttccagtgagggggcacaggactgactttttaaaccattgtggactagtggctgctgtctgcctcagtgacaatgtcccagcgctcctatcatgtttacagtcacccttgggtcctaaattaagagttgtgttcatgtaggttcgtgtcgtcgttggctctgagacattgataataaatttttctcaacagtg

SEQ ID NO: 238547 - DNA, 2181 bp, Artificial Sequence
  derived and/or modified sequence
atggccgacagcagcggccagcagggcaagggcagaagagtgcagccccagtggagcccccccgccggcacccagccctgcagactgcacctgtacaacagcctgaccagaaacaaggaggtgttcatcccccaggacggcaagaaggtgacctggtactgctgcggccccaccgtgtacgacgccagccacatgggccacgccagaagctacatcagcttcgacatcctgagaagagtgctgaaggactacttcaagttcgacgtgttctactgcatgaacatcaccgacatcgacgacaagatcatcaagagagccagacagaaccacctgttcgagcagtacagagagaagagacccgaggccgcccagctgctggaggacgtgcaggccgccctgaagcccttcagcgtgaagctgaacgagaccaccgaccccgacaagaagcagatgctggagagaatccagcacgccgtgcagctggccaccgagcccctggagaaggccgtgcagagcagactgaccggcgaggaggtgaacagctgcgtggaggtgctgctggaggaggccaaggacctgctgagcgactggctggacagcaccctgggctgcgacgtgaccgacaacagcatcttcagcaagctgcccaagttctgggagggcgacttccacagagacatggaggccctgaacgtgctgccccccgacgtgctgaccagagtgagcgagtacgtgcccgagatcgtgaacttcgtgcagaagatcgtggacaacggctacggctacgtgagcaacggcagcgtgtacttcgacaccgccaagttcgccagcagcgagaagcacagctacggcaagctggtgcccgaggccgtgggcgaccagaaggccctgcaggagggcgagggcgacctgagcatcagcgccgacagactgagcgagaagagaagccccaacgacttcgccctgtggaaggccagcaagcccggcgagcccagctggccctgcccctggggcaagggcagacccggctggcacatcgagtgcagcgccatggccggcaccctgctgggcgccagcatggacatccacggcggcggcttcgacctgagattcccccaccacgacaacgagctggcccagagcgaggcctacttcgagaacgactgctgggtgagatacttcctgcacaccggccacctgaccatcgccggctgcaagatgagcaagagcctgaagaacttcatcaccatcaaggacgccctgaagaagcacagcgccagacagctgagactggccttcctgatgcacagctggaaggacaccctggactacagcagcaacaccatggagagcgccctgcagtacgagaagttcctgaacgagttcttcctgaacgtgaaggacatcctgagagcccccgtggacatcaccggccagttcgagaagtggggcgaggaggaggccgagctgaacaagaacttctacgacaagaagaccgccatccacaaggccctgtgcgacaacgtggacaccagaaccgtgatggaggagatgagagccctggtgagccagtgcaacctgtacatggccgccagaaaggccgtgagaaagagacccaaccaggccctgctggagaacatcgccctgtacctgacccacatgctgaagatcttcggcgccgtggaggaggacagcagcctgggcttccccgtgggcggccccggcaccagcctgagcctggaggccaccgtgatgccctacctgcaggtgctgagcgagttcagagagggcgtgagaaagatcgccagagagcagaaggtgcccgagatcctgcagctgagcgacgccctgagagacaacatcctgcccgagctgggcgtgagattcgaggaccacgagggcctgcccaccgtggtgaagctggtggacagaaacaccctgctgaaggagagagaggagaagagaagagtggaggaggagaagagaaagaagaaggaggaggccgccagaagaaagcaggagcaggaggccgccaagctggccaagatgaagatcccccccagcgagatgttcctgagcgagaccgacaagtacagcaagttcgacgagaacgtgagcatggtgtgcccccacatgacctggagagccaagagcagcgccaagggcaagcccagaagctag

SEQ ID NO: 238548 - DNA, 2220 bp, Artificial Sequence
  derived and/or modified sequence
atggagcccaccagcggccccttcagaaccgacctgggctaccacctggtgggctgcagcagcggcaagggcagaagagtgcagccccagtggagcccccccgccggcacccagccctgcagactgcacctgtacaacagcctgaccagaaacaaggaggtgttcatcccccaggacggcaagaaggtgacctggtactgctgcggccccaccgtgtacgacgccagccacatgggccacgccagaagctacatcagcttcgacatcctgagaagagtgctgaaggactacttcaagttcgacgtgttctactgcatgaacatcaccgacatcgacgacaagatcatcaagagagccagacagaaccacctgttcgagcagtacagagagaagagacccgaggccgcccagctgctggaggacgtgcaggccgccctgaagcccttcagcgtgaagctgaacgagaccaccgaccccgacaagaagcagatgctggagagaatccagcacgccgtgcagctggccaccgagcccctggagaaggccgtgcagagcagactgaccggcgaggaggtgaacagctgcgtggaggtgctgctggaggaggccaaggacctgctgagcgactggctggacagcaccctgggctgcgacgtgaccgacaacagcatcttcagcaagctgcccaagttctgggagggcgacttccacagagacatggaggccctgaacgtgctgccccccgacgtgctgaccagagtgagcgagtacgtgcccgagatcgtgaacttcgtgcagaagatcgtggacaacggctacggctacgtgagcaacggcagcgtgtacttcgacaccgccaagttcgccagcagcgagaagcacagctacggcaagctggtgcccgaggccgtgggcgaccagaaggccctgcaggagggcgagggcgacctgagcatcagcgccgacagactgagcgagaagagaagccccaacgacttcgccctgtggaaggccagcaagcccggcgagcccagctggccctgcccctggggcaagggcagacccggctggcacatcgagtgcagcgccatggccggcaccctgctgggcgccagcatggacatccacggcggcggcttcgacctgagattcccccaccacgacaacgagctggcccagagcgaggcctacttcgagaacgactgctgggtgagatacttcctgcacaccggccacctgaccatcgccggctgcaagatgagcaagagcctgaagaacttcatcaccatcaaggacgccctgaagaagcacagcgccagacagctgagactggccttcctgatgcacagctggaaggacaccctggactacagcagcaacaccatggagagcgccctgcagtacgagaagttcctgaacgagttcttcctgaacgtgaaggacatcctgagagcccccgtggacatcaccggccagttcgagaagtggggcgaggaggaggccgagctgaacaagaacttctacgacaagaagaccgccatccacaaggccctgtgcgacaacgtggacaccagaaccgtgatggaggagatgagagccctggtgagccagtgcaacctgtacatggccgccagaaaggccgtgagaaagagacccaaccaggccctgctggagaacatcgccctgtacctgacccacatgctgaagatcttcggcgccgtggaggaggacagcagcctgggcttccccgtgggcggccccggcaccagcctgagcctggaggccaccgtgatgccctacctgcaggtgctgagcgagttcagagagggcgtgagaaagatcgccagagagcagaaggtgcccgagatcctgcagctgagcgacgccctgagagacaacatcctgcccgagctgggcgtgagattcgaggaccacgagggcctgcccaccgtggtgaagctggtggacagaaacaccctgctgaaggagagagaggagaagagaagagtggaggaggagaagagaaagaagaaggaggaggccgccagaagaaagcaggagcaggaggccgccaagctggccaagatgaagatcccccccagcgagatgttcctgagcgagaccgacaagtacagcaagttcgacgagaacgtgagcatggtgtgcccccacatgacctggagagccaagagcagcgccaagggcaagcccagaagctag

SEQ ID NO: 238549 - protein, 770 aa, Artificial Sequence
  derived and/or modified sequence
MAQWNQLQQLDTRYLEQLHQLYSDSFPMELRQFLAPWIESQDWAYAASKESHATLVFHNLLGEIDQQYSRFLQESNVLYQHNLRRIKQFLQSRYLEKPMEIARIVARCLWEESRLLQTAATAAQQGGQANHPTAAVVTEKQQMLEQHLQDVRKRVQDLEQKMKVVENLQDDFDFNYKTLKSQGDMQDLNGNNQSVTRQKMQQLEQMLTALDQMRRSIVSELAGLLSAMEYVQKTLTDEELADWKRRQQIACIGGPPNICLDRLENWITSLAESQLQTRQQIKKLEELQQKVSYKGDPIVQHRPMLEERIVELFRNLMKSAFVVERQPCMPMHPDRPLVIKTGVQFTTKVRLLVKFPELNYQLKIKVCIDKDSGDVAALRGSRKFNILGTNTKVMNMEESNNGSLSAEFKHLTLREQRCGNGGRANCDASLIVTEELHLITFETEVYHQGLKIDLETHSLPVVVISNICQMPNAWASILWYNMLTNNPKNVNFFTKPPIGTWDQVAEVLSWQFSSTTKRGLSIEQLTTLAEKLLGPGVNYSGCQITWAKFCKENMAGKGFSFWVWLDNIIDLVKKYILALWNEGYIMGFISKERERAILSTKPPGTFLLRFSESSKEGGVTFTWVEKDISGKTQIQSVEPYTKQQLNNMSFAEIIMGYKIMDATNILVSPLVYLYPDIPKEEAFGKYCRPESQEHPEADPGSAAPYLKTKFICVTPTTCSNTIDLPMSPRTLDSLMQFGNNGEGAEPSAGGQFESLTFDMELTSECATSPM

SEQ ID NO: 238550 - protein, 672 aa, Artificial Sequence
  derived and/or modified sequence
MEIARIVARCLWEESRLLQTAATAAQQGGQANHPTAAVVTEKQQMLEQHLQDVRKRVQDLEQKMKVVENLQDDFDFNYKTLKSQGDMQDLNGNNQSVTRQKMQQLEQMLTALDQMRRSIVSELAGLLSAMEYVQKTLTDEELADWKRRQQIACIGGPPNICLDRLENWITSLAESQLQTRQQIKKLEELQQKVSYKGDPIVQHRPMLEERIVELFRNLMKSAFVVERQPCMPMHPDRPLVIKTGVQFTTKVRLLVKFPELNYQLKIKVCIDKDSGDVAALRGSRKFNILGTNTKVMNMEESNNGSLSAEFKHLTLREQRCGNGGRANCDASLIVTEELHLITFETEVYHQGLKIDLETHSLPVVVISNICQMPNAWASILWYNMLTNNPKNVNFFTKPPIGTWDQVAEVLSWQFSSTTKRGLSIEQLTTLAEKLLGPGVNYSGCQITWAKFCKENMAGKGFSFWVWLDNIIDLVKKYILALWNEGYIMGFISKERERAILSTKPPGTFLLRFSESSKEGGVTFTWVEKDISGKTQIQSVEPYTKQQLNNMSFAEIIMGYKIMDATNILVSPLVYLYPDIPKEEAFGKYCRPESQEHPEADPGSAAPYLKTKFICVTPTTCSNTIDLPMSPRTLDSLMQFGNNGEGAEPSAGGQFESLTFDMELTSECATSPM

SEQ ID NO: 238551 - DNA, 2313 bp, Artificial Sequence
  derived and/or modified sequence
atggcccagtggaaccagctgcagcagctggacaccagatacctggagcagctgcaccagctgtacagcgacagcttccccatggagctgagacagttcctggccccctggatcgagagccaggactgggcctacgccgccagcaaggagagccacgccaccctggtgttccacaacctgctgggcgagatcgaccagcagtacagcagattcctgcaggagagcaacgtgctgtaccagcacaacctgagaagaatcaagcagttcctgcagagcagatacctggagaagcccatggagatcgccagaatcgtggccagatgcctgtgggaggagagcagactgctgcagaccgccgccaccgccgcccagcagggcggccaggccaaccaccccaccgccgccgtggtgaccgagaagcagcagatgctggagcagcacctgcaggacgtgagaaagagagtgcaggacctggagcagaagatgaaggtggtggagaacctgcaggacgacttcgacttcaactacaagaccctgaagagccagggcgacatgcaggacctgaacggcaacaaccagagcgtgaccagacagaagatgcagcagctggagcagatgctgaccgccctggaccagatgagaagaagcatcgtgagcgagctggccggcctgctgagcgccatggagtacgtgcagaagaccctgaccgacgaggagctggccgactggaagagaagacagcagatcgcctgcatcggcggcccccccaacatctgcctggacagactggagaactggatcaccagcctggccgagagccagctgcagaccagacagcagatcaagaagctggaggagctgcagcagaaggtgagctacaagggcgaccccatcgtgcagcacagacccatgctggaggagagaatcgtggagctgttcagaaacctgatgaagagcgccttcgtggtggagagacagccctgcatgcccatgcaccccgacagacccctggtgatcaagaccggcgtgcagttcaccaccaaggtgagactgctggtgaagttccccgagctgaactaccagctgaagatcaaggtgtgcatcgacaaggacagcggcgacgtggccgccctgagaggcagcagaaagttcaacatcctgggcaccaacaccaaggtgatgaacatggaggagagcaacaacggcagcctgagcgccgagttcaagcacctgaccctgagagagcagagatgcggcaacggcggcagagccaactgcgacgccagcctgatcgtgaccgaggagctgcacctgatcaccttcgagaccgaggtgtaccaccagggcctgaagatcgacctggagacccacagcctgcccgtggtggtgatcagcaacatctgccagatgcccaacgcctgggccagcatcctgtggtacaacatgctgaccaacaaccccaagaacgtgaacttcttcaccaagccccccatcggcacctgggaccaggtggccgaggtgctgagctggcagttcagcagcaccaccaagagaggcctgagcatcgagcagctgaccaccctggccgagaagctgctgggccccggcgtgaactacagcggctgccagatcacctgggccaagttctgcaaggagaacatggccggcaagggcttcagcttctgggtgtggctggacaacatcatcgacctggtgaagaagtacatcctggccctgtggaacgagggctacatcatgggcttcatcagcaaggagagagagagagccatcctgagcaccaagccccccggcaccttcctgctgagattcagcgagagcagcaaggagggcggcgtgaccttcacctgggtggagaaggacatcagcggcaagacccagatccagagcgtggagccctacaccaagcagcagctgaacaacatgagcttcgccgagatcatcatgggctacaagatcatggacgccaccaacatcctggtgagccccctggtgtacctgtaccccgacatccccaaggaggaggccttcggcaagtactgcagacccgagagccaggagcaccccgaggccgaccccggcagcgccgccccctacctgaagaccaagttcatctgcgtgacccccaccacctgcagcaacaccatcgacctgcccatgagccccagaaccctggacagcctgatgcagttcggcaacaacggcgagggcgccgagcccagcgccggcggccagttcgagagcctgaccttcgacatggagctgaccagcgagtgcgccaccagccccatgtag

SEQ ID NO: 238552 - DNA, 2019 bp, Artificial Sequence
  derived and/or modified sequence
atggagatcgccagaatcgtggccagatgcctgtgggaggagagcagactgctgcagaccgccgccaccgccgcccagcagggcggccaggccaaccaccccaccgccgccgtggtgaccgagaagcagcagatgctggagcagcacctgcaggacgtgagaaagagagtgcaggacctggagcagaagatgaaggtggtggagaacctgcaggacgacttcgacttcaactacaagaccctgaagagccagggcgacatgcaggacctgaacggcaacaaccagagcgtgaccagacagaagatgcagcagctggagcagatgctgaccgccctggaccagatgagaagaagcatcgtgagcgagctggccggcctgctgagcgccatggagtacgtgcagaagaccctgaccgacgaggagctggccgactggaagagaagacagcagatcgcctgcatcggcggcccccccaacatctgcctggacagactggagaactggatcaccagcctggccgagagccagctgcagaccagacagcagatcaagaagctggaggagctgcagcagaaggtgagctacaagggcgaccccatcgtgcagcacagacccatgctggaggagagaatcgtggagctgttcagaaacctgatgaagagcgccttcgtggtggagagacagccctgcatgcccatgcaccccgacagacccctggtgatcaagaccggcgtgcagttcaccaccaaggtgagactgctggtgaagttccccgagctgaactaccagctgaagatcaaggtgtgcatcgacaaggacagcggcgacgtggccgccctgagaggcagcagaaagttcaacatcctgggcaccaacaccaaggtgatgaacatggaggagagcaacaacggcagcctgagcgccgagttcaagcacctgaccctgagagagcagagatgcggcaacggcggcagagccaactgcgacgccagcctgatcgtgaccgaggagctgcacctgatcaccttcgagaccgaggtgtaccaccagggcctgaagatcgacctggagacccacagcctgcccgtggtggtgatcagcaacatctgccagatgcccaacgcctgggccagcatcctgtggtacaacatgctgaccaacaaccccaagaacgtgaacttcttcaccaagccccccatcggcacctgggaccaggtggccgaggtgctgagctggcagttcagcagcaccaccaagagaggcctgagcatcgagcagctgaccaccctggccgagaagctgctgggccccggcgtgaactacagcggctgccagatcacctgggccaagttctgcaaggagaacatggccggcaagggcttcagcttctgggtgtggctggacaacatcatcgacctggtgaagaagtacatcctggccctgtggaacgagggctacatcatgggcttcatcagcaaggagagagagagagccatcctgagcaccaagccccccggcaccttcctgctgagattcagcgagagcagcaaggagggcggcgtgaccttcacctgggtggagaaggacatcagcggcaagacccagatccagagcgtggagccctacaccaagcagcagctgaacaacatgagcttcgccgagatcatcatgggctacaagatcatggacgccaccaacatcctggtgagccccctggtgtacctgtaccccgacatccccaaggaggaggccttcggcaagtactgcagacccgagagccaggagcaccccgaggccgaccccggcagcgccgccccctacctgaagaccaagttcatctgcgtgacccccaccacctgcagcaacaccatcgacctgcccatgagccccagaaccctggacagcctgatgcagttcggcaacaacggcgagggcgccgagcccagcgccggcggccagttcgagagcctgaccttcgacatggagctgaccagcgagtgcgccaccagccccatgtag

SEQ ID NO: 238553 - DNA, 2313 bp, Artificial Sequence
  derived and/or modified sequence
atggcccagtggaatcagctgcaacagctggataccaggtatttagaacaactgcaccagctatactctgatagcttccctatggagctcaggcagtttctagctccttggattgagtctcaagactgggcctatgccgcttccaaagagtctcatgcaaccctggttttccacaaccttcttggtgagattgatcagcagtacagcagatttctccaggagagcaacgtattgtaccaacacaacctgcgccggataaagcagtttttgcagtcacggtaccttgagaaacccatggaaatcgcacgcatagtggcacgatgcctgtgggaggaaagtcggttgctacagactgctgctacagccgcacagcaggggggccaagccaatcacccaacagccgctgttgtcacggaaaagcagcaaatgttggaacagcacctgcaagatgtgaggaaacgcgtgcaggacctggagcagaaaatgaaggtggttgaaaacctccaggatgatttcgactttaattataaaactctgaagtcccagggagacatgcaggatttgaatggaaacaatcaatccgtaacacgtcagaagatgcaacagctggagcagatgctgaccgctctggaccagatgaggaggagtattgtaagtgagctggcgggattactgagcgccatggagtatgtgcaaaagacattgacggacgaagagcttgcagactggaaaaggcggcagcaaatagcctgcatcggggggccccctaacatttgtcttgataggctcgagaattggattacatccttagcagagtctcagctgcagacccgacagcagatcaagaagctggaggagctccagcagaaagtgagctataaaggcgaccctatcgtccagcaccgcccaatgctggaagagagaatcgtggagttattccgtaatctgatgaagtcggcatttgtcgtagagcggcaaccttgtatgcccatgcatcctgatcgcccactggtgatcaaaacaggggtgcaattcacaactaaggtgcggctgctggtgaagtttcctgaacttaactatcaactgaaaataaaagtgtgcatcgataaggatagtggggatgtagccgctctgagggggtctcgtaagttcaatatcttaggtacaaatacgaaagtgatgaacatggaggagtcaaacaacggctccctgtccgctgagttcaagcacctgaccctcagagaacaaagatgcgggaatggagggagagctaactgtgatgcctccttaatcgtgaccgaggagcttcacctgattacattcgaaacagaggtgtaccaccaagggctgaagattgacttagagactcacagcctgcccgtagtcgtcatcagcaacatatgccagatgcctaacgcctgggccagtatattgtggtacaatatgcttaccaacaaccccaagaatgtgaacttcttcacgaagcccccgatcgggacctgggaccaggtggctgaagtcctgagctggcagttttccagcaccaccaagcgcggcctgtccattgaacagcttacaactctcgccgaaaagctgctggggccaggtgtgaactacagcggatgccaaattacctgggctaaattttgtaaggagaacatggcgggaaaaggtttctcgttttgggtgtggcttgataacatcatcgacctggttaaaaagtatatactggctttgtggaatgaagggtacataatgggattcatctctaaggaacgtgagcgagcaatcctgtctacgaagccacctggaaccttccttcttaggttcagcgaatcttcaaaggagggtggcgttaccttcacatgggttgagaaagacatttcaggcaagacccagatccagtcagtggagccctacacaaagcaacaactcaacaatatgtctttcgctgagataattatggggtacaaaatcatggatgctactaacatcctggtaagtccgctggtctacctgtacccagatatacctaaggaggaagcctttggcaagtactgcagaccagaaagtcaagagcatcctgaggctgaccccggctctgcagccccatacctaaagaccaaattcatttgtgtgacacctacgacctgttcaaatacaatcgacctcccaatgtcccctcggactctggacagtctcatgcagtttggaaacaatggcgagggggctgaaccatccgccggtggtcaattcgaatctttgacattcgacatggaattaaccagcgagtgcgccacaagcccaatgtag

SEQ ID NO: 238554 - DNA, 2019 bp, Artificial Sequence
  derived and/or modified sequence
atggaaattgccagaatcgtcgctagatgcttgtgggaggagtctcgtttgctgcaaaccgcagctaccgccgctcagcagggcggccaggcgaatcaccctaccgcagcggtcgtgactgagaagcagcagatgctagagcagcacctccaggacgtgcgaaagcgagttcaggatcttgagcagaagatgaaggtggtggagaatttgcaggatgattttgacttcaactacaagaccctgaagtcccagggggacatgcaagacctaaatggtaataaccagtctgtgaccagacagaaaatgcagcagttggagcagatgcttactgcactcgatcaaatgagacggtccattgtcagtgagctggctggtctgctttcggcgatggaatacgtacagaaaacacttacagacgaggagctggccgattggaagaggcgtcagcagatcgcgtgtatcgggggaccccctaacatatgtctagataggctggagaattggatcacatcactagccgagtcgcaactccagacccgacagcaaattaagaaactggaggagttgcagcagaaagtgagctacaaaggagaccccatagtgcagcataggcctatgctagaagagaggatcgtcgagttgtttagaaacttgatgaaatctgcctttgttgtcgagaggcagccctgcatgcctatgcacccagacagacccctagtgattaagactggtgtccagtttaccacgaaagtgcggctgctcgttaaattcccagaattgaactaccagctcaaaatcaaagtttgcattgataaggattccggcgacgtcgcagcactgcgaggaagtagaaagtttaatattctggggaccaacacgaaagtcatgaatatggaggagtctaacaacggctcactgagtgccgagttcaagcacctaactttaagagaacagagatgtggcaacggcggccgagccaactgcgacgccagcttgatcgtgactgaagagctgcacttgatcacattcgagactgaagtgtaccaccaggggctcaaaatagacctggaaactcattccctacctgtggtcgtaatcagcaacatctgccagatgcccaacgcatgggccagcatcctgtggtacaacatgctcacaaataatcccaaaaatgttaactttttcacaaaaccccctattggcacctgggatcaggtggccgaagttctgagttggcagttctcttctaccaccaagaggggcctgagtattgagcagttaactacacttgctgagaagctcttaggcccaggcgtaaattacagcggatgccagattacatgggctaagttttgtaaagaaaatatggccggaaaagggttcagtttttgggtgtggttggacaacattatcgaccttgtgaagaaatatattctggcgctctggaatgagggctacataatgggtttcatcagcaaggaaagggaacgagctattctgagcactaagccccccggcacatttctgctgagattttccgagtcttccaaggaaggaggggtcactttcacatgggtggagaaagacatatcggggaaaacacagattcagtccgttgagccttatacgaagcaacagttgaataatatgtcttttgctgaaattattatggggtacaagatcatggacgccactaatatcctcgtgagccccctcgtatatttgtaccccgacatcccaaaagaagaagcatttggcaaatactgtagacctgaaagtcaggaacaccctgaggcagacccaggatctgctgccccctatctgaaaaccaagtttatatgtgtcacacccacaacttgttcgaatacaatcgacctgccaatgtccccgcggacccttgacagtttgatgcagtttggcaataacggagagggagctgaaccatccgctggcggccagtttgaatcattgacatttgatatggagctgacctcagaatgtgccacctcccccatgtag

SEQ ID NO: 238555 - DNA, 2313 bp, Artificial Sequence
  derived and/or modified sequence
atggcccagtggaaccagctgcagcagctggacacccgctacctggagcagctgcaccagctgtacagcgacagcttccccatggagctgcggcagttcctggccccctggattgagagccaggactgggcctatgctgccagcaaggagagccacgccaccctggtgttccacaacctgctgggggagattgaccagcagtacagccgcttcctgcaggagagcaatgtgctgtaccagcacaacctgcggcgcatcaagcagttcctgcagagccgctacctggagaagcccatggagatcgcccgcatcgtggcccgctgcctgtgggaggagagccggctgctgcagacagctgccacagctgcccagcagggcggccaggccaaccaccccacagctgctgtggtgacagagaagcagcagatgctggagcagcacctgcaggatgtgaggaagagggtgcaggacctggagcagaagatgaaggtggtggagaacctgcaggatgactttgacttcaactacaagaccctgaagagccagggcgacatgcaggacctgaatggaaacaaccagagcgtgacccggcagaagatgcagcagctggagcagatgctgacagccctggaccagatgaggaggagcatcgtgtctgagctggccggcctgctgagcgccatggagtatgtgcagaagaccctgacagatgaggagctggccgactggaagaggcggcagcagatcgcctgcatcggcggcccccccaacatctgcctggaccggctggagaactggatcaccagcctggccgagagccagctgcagacccggcagcagatcaagaagctggaggagctgcagcagaaggtgtcctacaagggggaccccatcgtgcagcaccggcccatgctggaggagagaattgtggagctgttcaggaacctgatgaagagcgcctttgtggtggagcggcagccctgcatgcccatgcacccagaccggcccctggtgatcaagacaggagtgcagttcaccaccaaggtgcggctgctggtgaagtttcctgagctgaactaccagctgaagatcaaggtgtgcatcgacaaggacagcggagatgtggccgccctgcggggcagcaggaagttcaacatcctgggcaccaacaccaaggtgatgaacatggaggagagcaacaacggcagcctgtctgctgagttcaagcacctgaccctgcgggagcagagatgtggaaatggaggccgggccaactgtgatgccagcctgattgtgacagaggagctgcacctgatcacctttgaaacagaggtgtaccaccagggcctgaagattgacctggagacccacagcctgcctgtggtggtgatcagcaacatctgccagatgcccaatgcctgggccagcatcctgtggtacaacatgctgaccaacaaccccaagaatgtgaacttcttcaccaagccacccatcggcacctgggaccaggtggccgaggtgctgtcctggcagttcagcagcaccaccaagaggggcctgagcattgagcagctgaccaccctggccgagaagctgctgggccctggggtgaactacagcggctgccagatcacctgggccaagttctgcaaggagaacatggccggcaagggcttctccttctgggtgtggctggacaacatcatcgacctggtgaagaagtacatcctggccctgtggaatgaaggctacatcatgggcttcatcagcaaggagcgggagcgggccatcctgagcaccaagcccccaggcaccttcctgctgcgcttcagcgagagcagcaaggagggcggcgtgaccttcacctgggtggagaaggacatcagcggcaagacccagatccagagcgtggagccctacaccaagcagcagctgaacaacatgagctttgctgagatcatcatgggctacaagatcatggatgccaccaacatcctggtgagccccctggtgtacctgtacccagacatccccaaggaggaggccttcggcaagtactgcaggcctgagagccaggagcaccctgaggccgaccccggcagcgctgccccctacctgaagaccaagttcatctgtgtgacccccaccacctgcagcaacaccatcgacctgcccatgagccccaggaccctggacagcctgatgcagtttggaaacaacggggagggcgctgagcccagcgctgggggccagtttgagagcctgacctttgacatggagctgaccagtgaatgtgccaccagccccatgtag

SEQ ID NO: 238556 - DNA, 2019 bp, Artificial Sequence
  derived and/or modified sequence
atggagatcgcccgcatcgtggcccgctgcctgtgggaggagagccggctgctgcagacagctgccacagctgcccagcagggcggccaggccaaccaccccacagctgctgtggtgacagagaagcagcagatgctggagcagcacctgcaggatgtgaggaagagggtgcaggacctggagcagaagatgaaggtggtggagaacctgcaggatgactttgacttcaactacaagaccctgaagagccagggcgacatgcaggacctgaatggaaacaaccagagcgtgacccggcagaagatgcagcagctggagcagatgctgacagccctggaccagatgaggaggagcatcgtgtctgagctggccggcctgctgagcgccatggagtatgtgcagaagaccctgacagatgaggagctggccgactggaagaggcggcagcagatcgcctgcatcggcggcccccccaacatctgcctggaccggctggagaactggatcaccagcctggccgagagccagctgcagacccggcagcagatcaagaagctggaggagctgcagcagaaggtgtcctacaagggggaccccatcgtgcagcaccggcccatgctggaggagagaattgtggagctgttcaggaacctgatgaagagcgcctttgtggtggagcggcagccctgcatgcccatgcacccagaccggcccctggtgatcaagacaggagtgcagttcaccaccaaggtgcggctgctggtgaagtttcctgagctgaactaccagctgaagatcaaggtgtgcatcgacaaggacagcggagatgtggccgccctgcggggcagcaggaagttcaacatcctgggcaccaacaccaaggtgatgaacatggaggagagcaacaacggcagcctgtctgctgagttcaagcacctgaccctgcgggagcagagatgtggaaatggaggccgggccaactgtgatgccagcctgattgtgacagaggagctgcacctgatcacctttgaaacagaggtgtaccaccagggcctgaagattgacctggagacccacagcctgcctgtggtggtgatcagcaacatctgccagatgcccaatgcctgggccagcatcctgtggtacaacatgctgaccaacaaccccaagaatgtgaacttcttcaccaagccacccatcggcacctgggaccaggtggccgaggtgctgtcctggcagttcagcagcaccaccaagaggggcctgagcattgagcagctgaccaccctggccgagaagctgctgggccctggggtgaactacagcggctgccagatcacctgggccaagttctgcaaggagaacatggccggcaagggcttctccttctgggtgtggctggacaacatcatcgacctggtgaagaagtacatcctggccctgtggaatgaaggctacatcatgggcttcatcagcaaggagcgggagcgggccatcctgagcaccaagcccccaggcaccttcctgctgcgcttcagcgagagcagcaaggagggcggcgtgaccttcacctgggtggagaaggacatcagcggcaagacccagatccagagcgtggagccctacaccaagcagcagctgaacaacatgagctttgctgagatcatcatgggctacaagatcatggatgccaccaacatcctggtgagccccctggtgtacctgtacccagacatccccaaggaggaggccttcggcaagtactgcaggcctgagagccaggagcaccctgaggccgaccccggcagcgctgccccctacctgaagaccaagttcatctgtgtgacccccaccacctgcagcaacaccatcgacctgcccatgagccccaggaccctggacagcctgatgcagtttggaaacaacggggagggcgctgagcccagcgctgggggccagtttgagagcctgacctttgacatggagctgaccagtgaatgtgccaccagccccatgtag

SEQ ID NO: 238557 - DNA, 2313 bp, Artificial Sequence
  derived and/or modified sequence
atggcccagtggaaccagctgcagcagctggacacccggtacctggagcagctgcatcagctgtacagtgatagcttccctatggaactccgccagtttctggctccatggattgaaagccaggattgggcctatgctgcgagtaaagagtcccacgccaccctcgtgttccacaatctgctgggcgagattgatcagcagtattcaagatttttgcaggaatctaacgttctctatcagcacaacctgcgaagaattaaacaatttctgcagagccgctacctagagaaacccatggagatagcacggattgtggcccgatgtttgtgggaggaatcccgtttgctccagaccgctgcgaccgccgctcaacagggcggccaagctaatcaccccacagccgcagtggtgaccgagaaacagcagatgctggagcagcaccttcaggacgttcgcaagagggtccaggatctggagcagaagatgaaagtcgtggaaaacctccaggacgattttgacttcaactacaaaactctaaagagccagggtgacatgcaggatctcaatggaaacaaccaaagtgtgacaagacagaaaatgcagcagctggagcagatgctcacggctctcgaccagatgagacgctcaattgtctctgagttggcaggacttctatccgccatggagtatgtccagaagacattgacagatgaggaattggcagattggaagaggaggcagcagatcgcgtgcatcggtgggccccctaatatttgcctcgaccggcttgagaactggataacttctttagccgaatcccagttgcagacccgacaacaaatcaaaaagctggaggagttgcagcagaaagtctcctacaagggagatccgattgtccagcatcgccccatgctggaggaaagaattgtggagctttttaggaatctgatgaagtctgctttcgttgtggaacggcagccctgcatgcccatgcaccccgatcggccgttagtgatcaaaaccggtgttcaattcaccactaaggtcagactgctggttaaatttcccgaactaaattatcagctgaagataaaagtgtgcatcgataaggactcaggcgacgtcgccgcactacgaggatcccggaagtttaacattctgggaactaatacgaaagtgatgaacatggaggagtctaacaatggctccctgtccgcagaatttaaacatctgaccctgcgcgagcagagatgtggcaatggtggacgcgccaattgcgacgcctcactcatcgtgacggaggagttgcatcttatcacattcgaaacagaggtttaccaccagggcctgaagatcgacctggagactcacagcctgcccgtggttgtgatttcgaatatctgccagatgccaaatgcatgggcctccattctctggtataatatgcttacgaataatccgaaaaacgtgaattttttcactaagccccccatcggcacttgggatcaggtcgccgaagtcctgtcctggcagttctcctcaacaaccaaaagaggcctgtcaatcgaacaacttacaactctcgccgaaaaactgctcggtcccggtgtgaactatagtggatgtcagattacctgggccaaattctgtaaggagaatatggccggaaagggtttttccttctgggtgtggctggacaatataatcgatctcgttaagaagtacatccttgctctttggaatgagggctacattatgggatttatctcaaaggaacgagaacgcgctattctgagtacgaagccccccggcacattcctgctgcgattcagcgagtccagcaaggaaggaggcgtgaccttcacatgggttgagaaggacatttccggtaagactcaaattcagtctgtcgagccatatacaaagcagcaactgaataatatgtcctttgcagagataataatgggatacaagattatggacgctacgaacatcctggtgagccccctggtgtacctgtatcctgatattcccaaagaagaagccttcggaaagtactgccgacctgagtcccaggagcacccagaagctgaccctggcagcgcagctccgtacctaaaaaccaagttcatctgtgtgactccaaccacttgtagtaatacaatcgatctgccgatgagccccaggaccctagactcacttatgcagttcggcaacaacggagagggggccgaaccttccgcgggcggacagttcgagtcgctcactttcgacatggaactgacctccgagtgtgcaacatcccctatgtag

SEQ ID NO: 238558 - DNA, 2019 bp, Artificial Sequence
  derived and/or modified sequence
atggagatcgcccggatcgtggcccggtgcctgtgggaggagagccgccttttacagaccgctgctacggccgcgcaacagggcggccaggcgaatcacccaactgccgccgtggttacagaaaaacagcagatgctggaacagcacctgcaggacgttagaaaaagggtgcaggatttagaacagaagatgaaggtagttgaaaacctccaggatgattttgattttaactataaaactctgaagagtcagggggacatgcaggacctgaatgggaacaaccagtccgtgacgcggcagaagatgcagcagttggaacagatgctgacagcacttgaccagatgcgtcgatctattgtgtcagaactcgctggtcttctttctgccatggaatacgtgcaaaagaccttgaccgatgaggaacttgctgattggaaaaggcggcaacagatagcttgtatcggcggccctcctaacatttgcctggaccgactggagaactggatcacctcactggctgaaagtcagcttcagaccaggcagcagatcaaaaagcttgaagagcttcaacagaaggtgtcttataaaggggacccgattgttcagcatcgacccatgttagaagaacggatcgtggagctttttcgcaacttgatgaaatcagcttttgttgtggagcgccagccctgcatgcctatgcaccccgaccggcccctggtcattaagacaggggtccagttcacaaccaaggtgcgcctgctcgtgaagtttcccgagctaaattaccagttaaagattaaggtatgtattgacaaagactctggcgacgtagcggcccttaggggatcacgcaaatttaacatcctgggaaccaacaccaaagtcatgaacatggaggaatcgaacaatggctctttgtcagctgaatttaaacacttaactctgcgcgaacagcgatgtggtaacggaggccgggccaactgcgatgccagtctgatcgtgaccgaagaattgcacctgatcactttcgaaacagaggtataccaccaaggcctgaaaatcgaccttgagacacacagcctgccggtggtggtgattagtaatatctgtcagatgcccaacgcctgggcctccatcctctggtataatatgctcaccaacaaccccaagaacgtaaatttttttacaaagcctccaatcggaacctgggaccaggttgcagaagtcctcagttggcaatttagtagtacaactaagcgtggattgtcaattgagcaattgaccacactagctgaaaaactgctgggtcccggggtgaactatagtggctgccaaattacttgggcaaaattctgcaaagaaaacatggccggcaaggggtttagtttttgggtgtggctggacaacattattgatctagtaaaaaaatatatccttgccctatggaatgaaggctacattatgggttttatctccaaggaaagagaacgagcaattttgagtacaaaacctccaggcaccttcctccttcgattcagtgaaagctccaaagagggtggcgtaaccttcacctgggttgagaaagatatttcaggcaaaacgcagattcagtccgttgaaccctacacaaagcagcaactgaataatatgtccttcgctgagatcatcatgggatacaagatcatggacgcaacaaatatattagtaagccccctggtgtacttatatcccgatatccccaaggaagaggcttttggcaaatactgtcggcccgaaagccaggaacaccccgaggcagaccccggatcggctgcgccctatctgaagactaaattcatctgcgtgacccccaccacctgttctaacaccatagatctccccatgtcgccccggaccctggacagcctgatgcagttcgggaataatggagaaggggccgaaccttcagctggcgggcaattcgagtcgctgactttcgacatggaactgacaagcgagtgcgccacatcccctatgtag

SEQ ID NO: 238559 - DNA, 2313 bp, Artificial Sequence
  derived and/or modified sequence
atggcacaatggaatcaactgcagcaacttgatacccgttatttagagcagctacaccagttgtactccgatagttttcctatggaactccgtcagttcctggccccatggatcgaatcacaggactgggcttatgcggctagcaaggagagtcatgctacactggtctttcataaccttctgggggagatagaccagcagtatagtagatttctgcaggagtctaacgtcctctatcagcacaatctaagacgcattaagcaatttttacaatcccgataccttgaaaaacctatggagattgcgaggattgttgctaggtgcctgtgggaggagagccgactgctgcagaccgctgcaactgcggcacagcagggaggccaggctaatcacccaacggcggctgtcgtgaccgaaaagcagcagatgttggagcagcatcttcaagacgtacgaaaaagggtgcaggacttggagcagaaaatgaaagtcgtggagaacctgcaggatgatttcgacttcaattataagaccctgaagagccagggggacatgcaagatctgaacggtaacaaccagagtgtcaccagacagaaaatgcagcagcttgagcagatgttgacagctctcgaccagatgagaaggtctatcgttagtgagctcgcaggactcctgagcgctatggaatacgtgcagaagactcttacagacgaggaacttgccgattggaagcgccgacagcaaatcgcctgcataggtggaccaccaaacatttgcctggaccggctggagaactggattacttcactggcggaatcgcagttacagaccagacagcagattaagaagctggaagagctgcaacagaaggtctcgtacaaaggggatccaatcgtccagcataggcccatgttggaggagcggattgtggagctgtttcgcaatttgatgaagagcgctttcgtcgtggagcgtcagccctgcatgccgatgcacccggatagacccttggtgatcaaaacaggcgttcagtttactaccaaggttaggctcctcgtaaaattccccgagctgaattaccagctaaaaatcaaggtatgtatagacaaagattcgggtgatgtggccgctctgcggggatctaggaaatttaatatccttgggactaacacaaaggttatgaatatggaggagagcaataacggatcgctgagtgcagagttcaagcacctgaccttacgcgagcagcgatgtggtaatggcggacgggctaactgcgacgcttccttaatcgtgacagaggagttgcacctgatcaccttcgagaccgaagtgtaccatcaggggcttaaaatcgatttagaaactcactccttgcccgttgtggtcataagtaatatttgccaaatgcccaacgcgtgggcgtccatactatggtacaacatgttgacaaacaatccaaagaatgtaaacttctttaccaaaccccctattggaacttgggatcaggtggctgaagtcctaagttggcagttttcctctacgactaaacggggactgtcgatcgaacagttgactacactcgctgagaagcttcttggacccggagtcaattattcaggttgccagatcacctgggccaaattctgcaaggaaaacatggcaggcaagggctttagtttttgggtatggctggataatattattgaccttgttaaaaaatacatccttgcgctctggaatgaaggctacataatgggattcatcagcaaggaaagagagagagccattttgagtaccaagcctcctggaacctttttactgcgcttttcagagtcttccaaggaaggaggagtgacatttacctgggtggagaaagatatcagcggtaaaactcagatacagtccgtggagccctataccaagcagcaactgaataacatgagctttgccgaaatcatcatgggctacaagattatggacgcaactaacatcctagtgagcccactcgtatatctctatccagacattcctaaagaggaagcttttgggaagtactgccggccagagtcccaggagcaccccgaagctgatcctgggagcgccgcaccctacctgaagactaaattcatctgtgtgacacccactacatgtagtaacaccatcgatctgccaatgtcaccgcgtacgctggacagtcttatgcagttcggcaataacggtgaaggcgcagaaccaagcgcaggaggacaattcgagtcattaactttcgacatggaactcacctccgaatgcgctactagtccaatgtag

SEQ ID NO: 238560 - DNA, 2019 bp, Artificial Sequence
  derived and/or modified sequence
atggagatcgccagaatcgtcgcacggtgcctttgggaggagtcccgcctgctgcaaacagccgcaacggccgcacagcagggcggacaggccaatcatcctactgccgctgtggtgactgagaaacagcagatgttggagcagcatctgcaggatgtgagaaagcgtgtgcaggacctcgagcaaaagatgaaggtggtggagaatttgcaggatgattttgatttcaattacaagacactgaaaagccagggtgatatgcaagaccttaacggcaataaccagtcagtgacacggcagaaaatgcagcagctagagcagatgctgactgctctggatcagatgcgacgcagtatcgtctccgagctggccggactgctgagtgctatggagtacgtgcagaaaactctcaccgacgaggaactggccgactggaaacgtagacagcagattgcatgtatcggagggccacctaatatatgtctggatcgcctggaaaactggatcacgtccttggccgaaagccagctgcaaacaagacagcagatcaaaaaattggaggaactacaacagaaagtatcatacaagggcgaccctattgtacagcatagaccaatgttggaagagcggattgtggagcttttccgcaacttaatgaaaagcgcatttgtggtggagcgacagccctgcatgccgatgcacccagataggcctctggtgattaaaaccggggtacaattcacaaccaaggtgcggttgttggtgaagttccctgagttgaattatcagctgaaaatcaaggtttgcatcgacaaggattcaggagacgtggctgctttgaggggctctcgcaagttcaatattttggggactaataccaaagttatgaatatggaggaaagtaacaatggttctctgtcagcagagttcaagcacctgactctgagagagcagcgctgcggaaacgggggacgcgcaaattgtgatgcgagcctgatcgtgaccgaagaactacatctgatcacattcgaaacagaagtttatcatcaaggtcttaagattgatctcgagacgcactccctgcccgtagtcgttataagtaatatctgccaaatgccaaatgcatgggcttccattctgtggtataacatgttgaccaataaccccaaaaatgtgaacttctttacgaagccaccgatcgggacttgggaccaggttgctgaagtacttagctggcagttctcctcaaccacaaaaaggggactctccatcgaacagctcactacactggctgagaaactgctcggccctggtgtgaattattccggatgccagattacctgggccaagttctgcaaggagaatatggcaggcaaagggttttccttctgggtctggctggacaatattatagacttggtgaagaagtacattttggcgttatggaacgagggatatattatgggatttatctccaaggagagagaaagagccattttgtcaaccaaaccgcctgggacgtttcttctccgtttcagcgagtcaagcaaggagggcggagtgactttcacttgggtggagaaagatatttccggcaaaactcagatccagtccgtggagccttatactaaacagcagctgaataacatgtccttcgccgaaattattatggggtataagatcatggatgcgacgaacatcctcgtgtcccctctggtttacctgtatccagacattcccaaggaagaagcatttggcaaatactgccgacccgaatcacaggagcaccctgaggctgaccctgggagcgcggcaccctatctaaagacgaaattcatttgcgttaccccaaccacgtgtagcaacacaatcgacttgcccatgagcccacggacactggattctctgatgcaatttggtaacaacggggaaggggctgagccgtccgctgggggacagtttgagagcctgactttcgacatggaactgaccagcgagtgtgccacaagtcctatgtag

SEQ ID NO: 238561 - DNA, 4866 bp, Artificial Sequence
  derived and/or modified sequence
cgctgtctctccccctcggctcggagaggcccttcggcctgagggagcctcgccgcccgtccccggcacacgcgcagccccggcctctcggcctctgccggagaaacagttgggacccctgattttagcaggatggcccaatggaatcagctacagcagcttgacacacggtacctggagcagctccatcagctctacagtgacagcttcccaatggagctgcggcagtttctggccccttggattgagagtcaagattgggcatatgcggccagcaaagaatcacatgccactttggtgtttcataatctcctgggagagattgaccagcagtatagccgcttcctgcaagagtcgaatgttctctatcagcacaatctacgaagaatcaagcagtttcttcagagcaggtatcttgagaagccaatggagattgcccggattgtggcccggtgcctgtgggaagaatcacgccttctacagactgcagccactgcggcccagcaagggggccaggccaaccaccccacagcagccgtggtgacggagaagcagcagatgctggagcagcaccttcaggatgtccggaagagagtgcaggatctagaacagaaaatgaaagtggtagagaatctccaggatgactttgatttcaactataaaaccctcaagagtcaaggagacatgcaagatctgaatggaaacaaccagtcagtgaccaggcagaagatgcagcagctggaacagatgctcactgcgctggaccagatgcggagaagcatcgtgagtgagctggcggggcttttgtcagcgatggagtacgtgcagaaaactctcacggacgaggagctggctgactggaagaggcggcaacagattgcctgcattggaggcccgcccaacatctgcctagatcggctagaaaactggataacgtcattagcagaatctcaacttcagacccgtcaacaaattaagaaactggaggagttgcagcaaaaagtttcctacaaaggggaccccattgtacagcaccggccgatgctggaggagagaatcgtggagctgtttagaaacttaatgaaaagtgcctttgtggtggagcggcagccctgcatgcccatgcatcctgaccggcccctcgtcatcaagaccggcgtccagttcactactaaagtcaggttgctggtcaaattccctgagttgaattatcagcttaaaattaaagtgtgcattgacaaagactctggggacgttgcagctctcagaggatcccggaaatttaacattctgggcacaaacacaaaagtgatgaacatggaagaatccaacaacggcagcctctctgcagaattcaaacacttgaccctgagggagcagagatgtgggaatgggggccgagccaattgtgatgcttccctgattgtgactgaggagctgcacctgatcacctttgagaccgaggtgtatcaccaaggcctcaagattgacctagagacccactccttgccagttgtggtgatctccaacatctgtcagatgccaaatgcctgggcgtccatcctgtggtacaacatgctgaccaacaatcccaagaatgtaaacttttttaccaagcccccaattggaacctgggatcaagtggccgaggtcctgagctggcagttctcctccaccaccaagcgaggactgagcatcgagcagctgactacactggcagagaaactcttgggacctggtgtgaattattcagggtgtcagatcacatgggctaaattttgcaaagaaaacatggctggcaagggcttctccttctgggtctggctggacaatatcattgaccttgtgaaaaagtacatcctggccctttggaacgaagggtacatcatgggctttatcagtaaggagcgggagcgggccatcttgagcactaagcctccaggcaccttcctgctaagattcagtgaaagcagcaaagaaggaggcgtcactttcacttgggtggagaaggacatcagcggtaagacccagatccagtccgtggaaccatacacaaagcagcagctgaacaacatgtcatttgctgaaatcatcatgggctataagatcatggatgctaccaatatcctggtgtctccactggtctatctctatcctgacattcccaaggaggaggcattcggaaagtattgtcggccagagagccaggagcatcctgaagctgacccaggtagcgctgccccatacctgaagaccaagtttatctgtgtgacaccaacgacctgcagcaataccattgacctgccgatgtccccccgcactttagattcattgatgcagtttggaaataatggtgaaggtgctgaaccctcagcaggagggcagtttgagtccctcacctttgacatggagttgacctcggagtgcgctacctcccccatgtgaggagctgagaacggaagctgcagaaagatacgactgaggcgcctacctgcattctgccacccctcacacagccaaaccccagatcatctgaaactactaactttgtggttccagattttttttaatctcctacttctgctatctttgagcaatctgggcacttttaaaaatagagaaatgagtgaatgtgggtgatctgcttttatctaaatgcaaataaggatgtgttctctgagacccatgatcaggggatgtggcggggggtggctagagggagaaaaaggaaatgtcttgtgttgttttgttcccctgccctcctttctcagcagctttttgttattgttgttgttgttcttagacaagtgcctcctggtgcctgcggcatccttctgcctgtttctgtaagcaaatgccacaggccacctatagctacatactcctggcattgcactttttaaccttgctgacatccaaatagaagataggactatctaagccctaggtttctttttaaattaagaaataataacaattaaagggcaaaaaacactgtatcagcatagcctttctgtatttaagaaacttaagcagccgggcatggtggctcacgcctgtaatcccagcactttgggaggccgaggcggatcataaggtcaggagatcaagaccatcctggctaacacggtgaaaccccgtctctactaaaagtacaaaaaattagctgggtgtggtggtgggcgcctgtagtcccagctactcgggaggctgaggcaggagaatcgcttgaacctgagaggcggaggttgcagtgagccaaaattgcaccactgcacactgcactccatcctgggcgacagtctgagactctgtctcaaaaaaaaaaaaaaaaaaaagaaacttcagttaacagcctccttggtgctttaagcattcagcttccttcaggctggtaatttatataatccctgaaacgggcttcaggtcaaacccttaagacatctgaagctgcaacctggcctttggtgttgaaataggaaggtttaaggagaatctaagcattttagacttttttttataaatagacttattttcctttgtaatgtattggccttttagtgagtaaggctgggcagagggtgcttacaaccttgactccctttctccctggacttgatctgctgtttcagaggctaggttgtttctgtgggtgccttatcagggctgggatacttctgattctggcttccttcctgccccaccctcccgaccccagtccccctgatcctgctagaggcatgtctccttgcgtgtctaaaggtccctcatcctgtttgttttaggaatcctggtctcaggacctcatggaagaagagggggagagagttacaggttggacatgatgcacactatggggccccagcgacgtgtctggttgagctcagggaatatggttcttagccagtttcttggtgatatccagtggcacttgtaatggcgtcttcattcagttcatgcagggcaaaggcttactgataaacttgagtctgccctcgtatgagggtgtatacctggcctccctctgaggctggtgactcctccctgctggggccccacaggtgaggcagaacagctagagggcctccccgcctgcccgccttggctggctagctcgcctctcctgtgcgtatgggaacacctagcacgtgctggatgggctgcctctgactcagaggcatggccggatttggcaactcaaaaccaccttgcctcagctgatcagagtttctgtggaattctgtttgttaaatcaaattagctggtctctgaattaagggggagacgaccttctctaagatgaacagggttcgccccagtcctcctgcctggagacagttgatgtgtcatgcagagctcttacttctccagcaacactcttcagtacataataagcttaactgataaacagaatatttagaaaggtgagacttgggcttaccattgggtttaaatcatagggacctagggcgagggttcagggcttctctggagcagatattgtcaagttcatggccttaggtagcatgtatctggtcttaactctgattgtagcaaaagttctgagaggagctgagccctgttgtggcccattaaagaacagggtcctcaggccctgcccgcttcctgtccactgccccctccccatccccagcccagccgagggaatcccgtgggttgcttacctacctataaggtggtttataagctgctgtcctggccactgcattcaaattccaatgtgtacttcatagtgtaaaaatttatattattgtgaggttttttgtcttttttttttttttttttttttggtatattgctgtatctactttaacttccagaaataaacgttatataggaaccgtc

SEQ ID NO: 238562 - DNA, 2615 bp, Artificial Sequence
  derived and/or modified sequence
gggaacaagccccaaccggatcctggacaggcaccccggcttggcgctgtctctccccctcggctcggagaggcccttcggcctgagggagcctcgccgcccgtccccggcacacgcgcagccccggcctctcggcctctgccggagaaacagggcatatgcggccagcaaagaatcacatgccactttggtgtttcataatctcctgggagagattgaccagcagtatagccgcttcctgcaagagtcgaatgttctctatcagcacaatctacgaagaatcaagcagtttcttcagagcaggtatcttgagaagccaatggagattgcccggattgtggcccggtgcctgtgggaagaatcacgccttctacagactgcagccactgcggcccagcaagggggccaggccaaccaccccacagcagccgtggtgacggagaagcagcagatgctggagcagcaccttcaggatgtccggaagagagtgcaggatctagaacagaaaatgaaagtggtagagaatctccaggatgactttgatttcaactataaaaccctcaagagtcaaggagacatgcaagatctgaatggaaacaaccagtcagtgaccaggcagaagatgcagcagctggaacagatgctcactgcgctggaccagatgcggagaagcatcgtgagtgagctggcggggcttttgtcagcgatggagtacgtgcagaaaactctcacggacgaggagctggctgactggaagaggcggcaacagattgcctgcattggaggcccgcccaacatctgcctagatcggctagaaaactggataacgtcattagcagaatctcaacttcagacccgtcaacaaattaagaaactggaggagttgcagcaaaaagtttcctacaaaggggaccccattgtacagcaccggccgatgctggaggagagaatcgtggagctgtttagaaacttaatgaaaagtgcctttgtggtggagcggcagccctgcatgcccatgcatcctgaccggcccctcgtcatcaagaccggcgtccagttcactactaaagtcaggttgctggtcaaattccctgagttgaattatcagcttaaaattaaagtgtgcattgacaaagactctggggacgttgcagctctcagaggatcccggaaatttaacattctgggcacaaacacaaaagtgatgaacatggaagaatccaacaacggcagcctctctgcagaattcaaacacttgaccctgagggagcagagatgtgggaatgggggccgagccaattgtgatgcttccctgattgtgactgaggagctgcacctgatcacctttgagaccgaggtgtatcaccaaggcctcaagattgacctagagacccactccttgccagttgtggtgatctccaacatctgtcagatgccaaatgcctgggcgtccatcctgtggtacaacatgctgaccaacaatcccaagaatgtaaacttttttaccaagcccccaattggaacctgggatcaagtggccgaggtcctgagctggcagttctcctccaccaccaagcgaggactgagcatcgagcagctgactacactggcagagaaactcttgggacctggtgtgaattattcagggtgtcagatcacatgggctaaattttgcaaagaaaacatggctggcaagggcttctccttctgggtctggctggacaatatcattgaccttgtgaaaaagtacatcctggccctttggaacgaagggtacatcatgggctttatcagtaaggagcgggagcgggccatcttgagcactaagcctccaggcaccttcctgctaagattcagtgaaagcagcaaagaaggaggcgtcactttcacttgggtggagaaggacatcagcggtaagacccagatccagtccgtggaaccatacacaaagcagcagctgaacaacatgtcatttgctgaaatcatcatgggctataagatcatggatgctaccaatatcctggtgtctccactggtctatctctatcctgacattcccaaggaggaggcattcggaaagtattgtcggccagagagccaggagcatcctgaagctgacccaggtagcgctgccccatacctgaagaccaagtttatctgtgtgacaccaacgacctgcagcaataccattgacctgccgatgtccccccgcactttagattcattgatgcagtttggaaataatggtgaaggtgctgaaccctcagcaggagggcagtttgagtccctcacctttgacatggagttgacctcggagtgcgctacctcccccatgtgaggagctgagaacggaagctgcagaaagatacgactgaggcgcctacctgcattctgccacccctcacacagccaaaccccagatcatctgaaactactaactttgtggttccagattttttttaatctcctacttctgctatctttgagcaatctgggcacttttaaaaatagagaaatgagtgaatgtgggtgatctgcttttatctaaatgcaaataaggatgtgttctctgagacccatgatcaggggatgtggcggggggtggctagagggag

SEQ ID NO: 238563 - DNA, 2313 bp, Artificial Sequence
  derived and/or modified sequence
atggctcagtggaaccagctgcagcagctggacacacgctacctgaagcagctgcaccagctgtacagcgacagcttccccatggagctgcggcagttcctggcaccttggattgagagtcaagactgggcatatgcagccagcaaagagtcacatgccacgttggtgtttcataatctcttgggtgaaattgaccagcaatatagccgattcctgcaagagtccaatgtcctctatcagcacaaccttcgaagaatcaagcagtttctgcagagcaggtatcttgagaagccaatggaaattgcccggatcgtggcccgatgcctgtgggaagagtctcgcctcctccagacggcagccacggcagcccagcaagggggccaggccaaccacccaacagccgccgtagtgacagagaagcagcagatgttggagcagcatcttcaggatgtccggaagcgagtgcaggatctagaacagaaaatgaaggtggtggagaacctccaggacgactttgatttcaactacaaaaccctcaagagccaaggagacatgcaggatctgaatggaaacaaccagtctgtgaccagacagaagatgcagcagctggaacagatgctcacagccctggaccagatgcggagaagcattgtgagtgagctggcggggctcttgtcagcaatggagtacgtgcagaagacactgactgatgaagagctggctgactggaagaggcggcagcagatcgcgtgcatcggaggccctcccaacatctgcctggaccgtctggaaaactggataacttcattagcagaatctcaacttcagacccgccaacaaattaagaaactggaggagctgcagcagaaagtgtcctacaagggcgaccctatcgtgcagcaccggcccatgctggaggagaggatcgtggagctgttcagaaacttaatgaagagtgccttcgtggtggagcggcagccctgcatgcccatgcacccggaccggcccttagtcatcaagactggtgtccagtttaccacgaaagtcaggttgctggtcaaatttcctgagttgaattatcagcttaaaattaaagtgtgcattgataaagactctggggatgttgctgccctcagagggtctcggaaatttaacattctgggcacgaacacaaaagtgatgaacatggaggagtctaacaacggcagcctgtctgcagagttcaagcacctgacccttagggagcagagatgtgggaatggaggccgtgccaattgtgatgcctccttgatcgtgactgaggagctgcacctgatcaccttcgagactgaggtgtaccaccaaggcctcaagattgacctagagacccactccttgccagttgtggtgatctccaacatctgtcagatgccaaatgcttgggcatcaatcctgtggtataacatgctgaccaataaccccaagaacgtgaacttcttcactaagccgccaattggaacctgggaccaagtggccgaggtgctcagctggcagttctcgtccaccaccaagcgagggctgagcatcgagcagctgacaacgctggctgagaagctcctagggcctggtgtgaactactcagggtgtcagatcacatgggctaaattctgcaaagaaaacatggctggcaagggcttctccttctgggtctggctagacaatatcatcgaccttgtgaaaaagtatatcttggccctttggaatgaagggtacatcatgggtttcatcagcaaggagcgggagcgggccatcctaagcacaaagcccccgggcaccttcctactgcgcttcagcgagagcagcaaagaaggaggggtcactttcacttgggtggaaaaggacatcagtggcaagacccagatccagtctgtagagccatacaccaagcagcagctgaacaacatgtcatttgctgaaatcatcatgggctataagatcatggattgtacctgcatcctggtgtctccacttgtctacctctaccccgacattcccaaggaggaggcatttggaaagtactgtaggcccgagagccaggagcaccccgaagccgacccaggtagtgctgccccgtacctgaagaccaagttcatctgtgtgacaccaacgacctgcagcaataccattgacctgccgatgtccccccgcactttagattcattgatgcagtttggaaataacggtgaaggtgctgagccctcagcaggagggcagtttgagtcgctcacgtttgacatggatctgacctcggagtgtgctacctcccccatgtga

SEQ ID NO: 238564 - DNA, 2504 bp, Artificial Sequence
  derived and/or modified sequence
aagcttttggaccctcgtacagaagctaatacgactcactatagggaaataagagagaaaagaagagtaagaagaaatataagagccaccatggctcagtggaaccagctgcagcagctggacacacgctacctgaagcagctgcaccagctgtacagcgacagcttccccatggagctgcggcagttcctggcaccttggattgagagtcaagactgggcatatgcagccagcaaagagtcacatgccacgttggtgtttcataatctcttgggtgaaattgaccagcaatatagccgattcctgcaagagtccaatgtcctctatcagcacaaccttcgaagaatcaagcagtttctgcagagcaggtatcttgagaagccaatggaaattgcccggatcgtggcccgatgcctgtgggaagagtctcgcctcctccagacggcagccacggcagcccagcaagggggccaggccaaccacccaacagccgccgtagtgacagagaagcagcagatgttggagcagcatcttcaggatgtccggaagcgagtgcaggatctagaacagaaaatgaaggtggtggagaacctccaggacgactttgatttcaactacaaaaccctcaagagccaaggagacatgcaggatctgaatggaaacaaccagtctgtgaccagacagaagatgcagcagctggaacagatgctcacagccctggaccagatgcggagaagcattgtgagtgagctggcggggctcttgtcagcaatggagtacgtgcagaagacactgactgatgaagagctggctgactggaagaggcggcagcagatcgcgtgcatcggaggccctcccaacatctgcctggaccgtctggaaaactggataacttcattagcagaatctcaacttcagacccgccaacaaattaagaaactggaggagctgcagcagaaagtgtcctacaagggcgaccctatcgtgcagcaccggcccatgctggaggagaggatcgtggagctgttcagaaacttaatgaagagtgccttcgtggtggagcggcagccctgcatgcccatgcacccggaccggcccttagtcatcaagactggtgtccagtttaccacgaaagtcaggttgctggtcaaatttcctgagttgaattatcagcttaaaattaaagtgtgcattgataaagactctggggatgttgctgccctcagagggtctcggaaatttaacattctgggcacgaacacaaaagtgatgaacatggaggagtctaacaacggcagcctgtctgcagagttcaagcacctgacccttagggagcagagatgtgggaatggaggccgtgccaattgtgatgcctccttgatcgtgactgaggagctgcacctgatcaccttcgagactgaggtgtaccaccaaggcctcaagattgacctagagacccactccttgccagttgtggtgatctccaacatctgtcagatgccaaatgcttgggcatcaatcctgtggtataacatgctgaccaataaccccaagaacgtgaacttcttcactaagccgccaattggaacctgggaccaagtggccgaggtgctcagctggcagttctcgtccaccaccaagcgagggctgagcatcgagcagctgacaacgctggctgagaagctcctagggcctggtgtgaactactcagggtgtcagatcacatgggctaaattctgcaaagaaaacatggctggcaagggcttctccttctgggtctggctagacaatatcatcgaccttgtgaaaaagtatatcttggccctttggaatgaagggtacatcatgggtttcatcagcaaggagcgggagcgggccatcctaagcacaaagcccccgggcaccttcctactgcgcttcagcgagagcagcaaagaaggaggggtcactttcacttgggtggaaaaggacatcagtggcaagacccagatccagtctgtagagccatacaccaagcagcagctgaacaacatgtcatttgctgaaatcatcatgggctataagatcatggattgtacctgcatcctggtgtctccacttgtctacctctaccccgacattcccaaggaggaggcatttggaaagtactgtaggcccgagagccaggagcaccccgaagccgacccaggtagtgctgccccgtacctgaagaccaagttcatctgtgtgacaccaacgacctgcagcaataccattgacctgccgatgtccccccgcactttagattcattgatgcagtttggaaataacggtgaaggtgctgagccctcagcaggagggcagtttgagtcgctcacgtttgacatggatctgacctcggagtgtgctacctcccccatgtgagctgccttctgcggggcttgccttctggccatgcccttcttctctcccttgcacctgtacctcttggtctttgaataaagcctgagtaggaaggcggccgc

SEQ ID NO: 238565 - protein, 951 aa, Artificial Sequence
  derived and/or modified sequence
MCCTEGSLRKRDSQRAPEAVLCLQLWQRTVPLDTLKGLGTCFPSGPELRGAGIAAAMERASERRTASALFAGFRALGLFSNDIPHVVRFSALKRRFYVTTCVGKSFHTYDVQKLSLVAVSNSVPQDICCMAADGRLVFAAYGNVFSAFARNKEIVHTFKGHKAEIHFLQPFGDHIISVDTDGILIIWHIYSEEEYLQLTFDKSVFKISAILHPSTYLNKILLGSEQGSLQLWNVKSNKLLYTFPGWKVGVTALQQAPAVDVVAIGLMSGQVIIHNIKFNETLMKFRQDWGPITSISFRTDGHPVMAAGSPCGHIGLWDLEDKKLINQMRNAHSTAIAGLTFLHREPLLVTNGADNALRIWIFDGPTGEGRLLRFRMGHSAPLTNIRYYGQNGQQILSASQDGTLQSFSTVHEKFNKSLGHGLINKKRVKRKGLQNTMSVRLPPITKFAAEEARESDWDGIIACHQGKLSCSTWNYQKSTIGAYFLKPKELKKDDITATAVDITSCGNFAVIGLSSGTVDVYNMQSGIHRGSFGKDQAHKGSVRGVAVDGLNQLTVTTGSEGLLKFWNFKNKILIHSVSLSSSPNIMLLHRDSGILGLALDDFSISVLDIETRKIVREFSGHQGQINDMAFSPDGRWLISAAMDCSIRTWDLPSGCLIDCFLLDSAPLNVSMSPTGDFLATSHVDHLGIYLWSNISLYSVVSLRPLPADYVPSIVMLPGTCQTQDVEVSEETVEPSDELIEYDSPEQLNEQLVTLSLLPESRWKNLLNLDVIKKKNKPKEPPKVPKSAPFFIPTIPGLVPRYAAPEQNNDPQQSKVVNLGVLAQKSDFCLKLEEGLVNNKYDTALNLLKESGPSGIETELRSLSPDCGGSIEVMQSFLKMIGMMLDRKRDFELAQAYLALFLKLHLKMLPSEPVLLEEITNLSSQVEENWTHLQSLFNQSMCILNYLKSALL

SEQ ID NO: 238566 - DNA, 2856 bp, Artificial Sequence
  derived and/or modified sequence
atgtgctgcaccgagggcagcctgagaaagagagacagccagagagcccccgaggccgtgctgtgcctgcagctgtggcagagaaccgtgcccctggacaccctgaagggcctgggcacctgcttccccagcggccccgagctgagaggcgccggcatcgccgccgccatggagagagccagcgagagaagaaccgccagcgccctgttcgccggcttcagagccctgggcctgttcagcaacgacatcccccacgtggtgagattcagcgccctgaagagaagattctacgtgaccacctgcgtgggcaagagcttccacacctacgacgtgcagaagctgagcctggtggccgtgagcaacagcgtgccccaggacatctgctgcatggccgccgacggcagactggtgttcgccgcctacggcaacgtgttcagcgccttcgccagaaacaaggagatcgtgcacaccttcaagggccacaaggccgagatccacttcctgcagcccttcggcgaccacatcatcagcgtggacaccgacggcatcctgatcatctggcacatctacagcgaggaggagtacctgcagctgaccttcgacaagagcgtgttcaagatcagcgccatcctgcaccccagcacctacctgaacaagatcctgctgggcagcgagcagggcagcctgcagctgtggaacgtgaagagcaacaagctgctgtacaccttccccggctggaaggtgggcgtgaccgccctgcagcaggcccccgccgtggacgtggtggccatcggcctgatgagcggccaggtgatcatccacaacatcaagttcaacgagaccctgatgaagttcagacaggactggggccccatcaccagcatcagcttcagaaccgacggccaccccgtgatggccgccggcagcccctgcggccacatcggcctgtgggacctggaggacaagaagctgatcaaccagatgagaaacgcccacagcaccgccatcgccggcctgaccttcctgcacagagagcccctgctggtgaccaacggcgccgacaacgccctgagaatctggatcttcgacggccccaccggcgagggcagactgctgagattcagaatgggccacagcgcccccctgaccaacatcagatactacggccagaacggccagcagatcctgagcgccagccaggacggcaccctgcagagcttcagcaccgtgcacgagaagttcaacaagagcctgggccacggcctgatcaacaagaagagagtgaagagaaagggcctgcagaacaccatgagcgtgagactgccccccatcaccaagttcgccgccgaggaggccagagagagcgactgggacggcatcatcgcctgccaccagggcaagctgagctgcagcacctggaactaccagaagagcaccatcggcgcctacttcctgaagcccaaggagctgaagaaggacgacatcaccgccaccgccgtggacatcaccagctgcggcaacttcgccgtgatcggcctgagcagcggcaccgtggacgtgtacaacatgcagagcggcatccacagaggcagcttcggcaaggaccaggcccacaagggcagcgtgagaggcgtggccgtggacggcctgaaccagctgaccgtgaccaccggcagcgagggcctgctgaagttctggaacttcaagaacaagatcctgatccacagcgtgagcctgagcagcagccccaacatcatgctgctgcacagagacagcggcatcctgggcctggccctggacgacttcagcatcagcgtgctggacatcgagaccagaaagatcgtgagagagttcagcggccaccagggccagatcaacgacatggccttcagccccgacggcagatggctgatcagcgccgccatggactgcagcatcagaacctgggacctgcccagcggctgcctgatcgactgcttcctgctggacagcgcccccctgaacgtgagcatgagccccaccggcgacttcctggccaccagccacgtggaccacctgggcatctacctgtggagcaacatcagcctgtacagcgtggtgagcctgagacccctgcccgccgactacgtgcccagcatcgtgatgctgcccggcacctgccagacccaggacgtggaggtgagcgaggagaccgtggagcccagcgacgagctgatcgagtacgacagccccgagcagctgaacgagcagctggtgaccctgagcctgctgcccgagagcagatggaagaacctgctgaacctggacgtgatcaagaagaagaacaagcccaaggagccccccaaggtgcccaagagcgcccccttcttcatccccaccatccccggcctggtgcccagatacgccgcccccgagcagaacaacgacccccagcagagcaaggtggtgaacctgggcgtgctggcccagaagagcgacttctgcctgaagctggaggagggcctggtgaacaacaagtacgacaccgccctgaacctgctgaaggagagcggccccagcggcatcgagaccgagctgagaagcctgagccccgactgcggcggcagcatcgaggtgatgcagagcttcctgaagatgatcggcatgatgctggacagaaagagagacttcgagctggcccaggcctacctggccctgttcctgaagctgcacctgaagatgctgcccagcgagcccgtgctgctggaggagatcaccaacctgagcagccaggtggaggagaactggacccacctgcagagcctgttcaaccagagcatgtgcatcctgaactacctgaagagcgccctgctgtag

SEQ ID NO: 238567 - DNA, 2856 bp, Artificial Sequence
  derived and/or modified sequence
atgtgctgcacggaaggctccctccgaaagcgggactcccagcgggcccccgaagccgtgttgtgcctccagctatggcagaggaccgtcccgcttgataccttgaaggggctaggaacttgctttccttctggccccgagcttagaggagctggaatcgcagctgccatggagagagcttctgagcgacggacagccagcgccctgtttgccggatttagggctctgggcctcttctcaaacgacattcctcatgtcgtccgctttagtgctcttaaacgaaggttttacgtgacaacatgtgtggggaagtccttccacacctacgatgttcagaagctgagcttagtcgcagtttcaaactccgtcccacaagatatttgttgtatggctgccgacgggcggctcgttttcgcggcctacggcaacgtctttagcgccttcgcaaggaacaaggagatcgtccatactttcaaggggcacaaagccgagatccattttctacagcccttcggcgatcacatcatttccgttgatacggatgggatacttattatttggcacatctactcagaggaagagtacctccagttgacctttgacaaaagcgtgtttaagatttccgcaatcctccacccatcaacatatctaaataagatcctgttgggctctgagcagggcagcctacaactgtggaacgtgaagtcaaacaaacttctgtacactttcccgggctggaaggtcggcgtaactgccctacaacaggctcctgctgttgatgtagttgccattggcctgatgagcggccaggtcataatccacaacatcaagttcaacgagacacttatgaaattcagacaggattgggggcccataacctcaatttccttccgaaccgatggacaccctgtgatggcagcaggctcgccatgtggccacatcggactgtgggacttagaagacaagaagctcatcaaccagatgcgtaatgctcatagtaccgccatagctgggctgacttttttacacagagagccgctgctggtgactaacggcgcagacaatgcgcttcgaatttggatcttcgatggaccaaccggtgaaggacgtctgcttcgtttccggatgggacattccgctccccttacaaatatcagatattacggccaaaacgggcagcagattctgagtgccagccaagacggcacactccagagcttcagcaccgtgcatgagaagttcaataagtctctgggccatgggctgatcaataagaagagggtcaagcgaaaaggacttcagaatactatgagtgttaggttgcctcccatcactaaattcgctgcagaagaggccagagaatctgattgggatggcattatcgcatgtcaccaggggaaactgagctgctcaacgtggaactaccagaaatccactataggcgcctacttcctcaaacctaaggaacttaagaaagatgacatcacagcgactgcagtggatattacgtcttgtggtaacttcgcagtgataggattgagctccggcaccgtggatgtatataacatgcagagcgggattcatagaggctcttttggaaaggatcaggcccataagggctccgtccgcggcgttgcagtcgatggcttaaatcagctgacagtaacaaccgggagcgaggggcttctgaagttttggaactttaaaaacaagatccttatacacagcgtctcactgtcgagctcaccgaatattatgctccttcatagggattctggcatacttggcctggccctggacgatttttctatctcggtgctcgatattgaaacacgcaagatagtccgcgaattctccggccaccagggacaaatcaacgacatggctttttcccccgacggccggtggctgatctcagctgcaatggattgctccattcgaacgtgggatttgccaagtgggtgcctgattgattgcttcttgctcgactcagctcctctgaatgttagcatgagcccaacaggggacttcctggccacaagtcatgtggaccatctgggaatctatctgtggtctaatatcagtctttacagcgttgtgtcgcttcggcctttgccggctgactacgttcctagcattgtgatgctaccgggtacctgtcagacacaagacgtggaggtcagcgaagagacagtggaacccagtgacgagttgatcgaatatgatagtcctgagcaactcaacgaacagttggttacgctgtctctgctgcctgagtcacgatggaagaatctgctaaatttggacgtgatcaagaagaagaacaagcctaaggagcccccgaaggtgccaaaaagcgctccctttttcatacccacgatacctggcttggttccccggtacgctgcgcctgaacaaaacaatgacccgcagcaaagcaaagtcgtcaacctgggagtcttggcccaaaaatctgacttctgcctcaagttggaggagggcctggtgaacaacaaatatgacacggcacttaacctgctgaaagagagtggcccttctggaatcgaaaccgagctgcggtccctgagcccagattgtggaggaagcatagaggtgatgcagagctttcttaagatgatcgggatgatgctcgaccgaaaaagggattttgagctagctcaggcttacctggctcttttcttgaagttgcatctgaagatgttgccatccgaacctgtgttactggaagaaattacaaatctgtctagccaggtggaagagaattggacacaccttcaatccctctttaatcaatcgatgtgcatcctgaactatctgaagtctgcactgctctag

SEQ ID NO: 238568 - DNA, 2856 bp, Artificial Sequence
  derived and/or modified sequence
atgtgttgtactgaagggtccctcagaaagcgtgacagccagcgcgcacctgaagcagtgctgtgcctgcagctgtggcagaggaccgtaccactggataccttaaaagggttaggcacttgctttcctagcgggccggagttgcgcggagccgggatcgccgccgctatggagagagccagcgagcgacggaccgcctctgcgctcttcgctggcttcagggccttaggcctcttctcgaacgatatcccacatgttgtgagattcagcgctctaaaaaggagattttacgtaacaacttgtgtcgggaaaagcttccatacctatgacgttcaaaagctgagcctcgtcgcagtctccaacagtgtgccacaggatatctgttgcatggccgctgacggaaggttggtgtttgccgcctatggcaacgtcttctcggctttcgctaggaacaaagaaatcgttcataccttcaagggccacaaagctgaaatccatttcctgcagccatttggcgaccatataatatccgtcgacacagatggcatacttatcatatggcacatatattccgaggaagaatatctgcagcttacgttcgacaaaagcgtctttaaaatcagcgcgattcttcatccctcgacatacctaaataaaattctgttgggctccgaacaaggaagcctgcagttgtggaacgttaagagcaacaagctgctctacaccttccctgggtggaaggtaggcgtgacagcacttcagcaggcccctgccgtggacgtggtggctattggtctcatgtcaggccaggtcattattcataacataaagtttaacgagactctgatgaagtttcggcaggattggggtccaatcacatccatatcgtttaggactgacggtcatccagtgatggctgctggaagcccatgcggacatataggcctctgggacctggaggacaagaaactcattaatcagatgcgtaacgcacatagcactgccatcgccggcctgacgtttctgcaccgcgagccgcttctagtgactaacggagcagataatgctttaaggatctggatcttcgatggaccaacaggcgagggtcgcctgttaaggtttcgtatgggccacagcgcacccctgacaaatattcggtattacggccaaaatgggcagcagatattatctgcaagccaggacgggacactacaatcgttttctaccgtgcacgaaaaattcaataagagtcttggtcatgggttgatcaataaaaaacgggtgaagagaaagggcttgcaaaacaccatgagtgttcgcctgccacccatcacaaaattcgcagcagaggaggcgagagagagtgactgggatggaattatagcttgtcaccaaggaaagctgtcgtgcagcacatggaattaccagaagtcaaccataggcgcctactttcttaagcccaaggaattgaagaaagatgatatcacagctacagccgtggacatcacaagctgtggaaatttcgctgtcataggattaagctccgggactgttgacgtgtacaacatgcaaagtggcatccacagggggagcttcgggaaagatcaggcccacaagggatctgttcggggtgtcgcagttgacggcctaaatcagctgaccgtcacgacgggctctgaggggctgttgaagttttggaactttaaaaataagattctgatccacagcgtctcactgtccagctctccaaatattatgctgcttcatagggattccgggatcttgggattggcgctggatgatttcagcatttccgtcctggacatcgaaacacgcaaaatagtgcgggagtttagtggccatcagggtcagataaacgatatggcattttccccagatgggcgttggctgatctccgccgcaatggactgttctattcgcacatgggatctgccttccggctgtctgatcgattgctttctcttagactcagcccccctgaacgtgagcatgtcacccaccggagactttctggcaaccagccacgtggaccacctggggatctacctctggagcaacatctccctgtactccgtagtttccctcagacctcttcctgctgactacgtgccttcaattgttatgttgccaggcacatgccaaacacaggacgtagaggtcagcgaggagaccgtggagccttcagatgagctgattgaatatgattcccctgaacagttgaatgaacaactggtcactctgtccctcctgcccgagagtcggtggaagaacctgctgaacttagatgtcataaaaaaaaaaaataagccaaaggaaccacccaaagtcccgaagagcgccccatttttcattccaaccatccccgggctggtgcccaggtacgcagcaccagagcagaacaacgatcctcagcagtctaaggtcgtgaatctgggggtccttgctcaaaaatctgacttttgtttaaaactggaagaaggtctggtgaataacaaatacgatactgccttgaatttactgaaggagtcaggaccctcaggaattgagactgagttgcggtccctctccccagattgtggtgggtcaattgaggtcatgcagagcttcctaaagatgataggcatgatgctcgacagaaagagggactttgaactggctcaggcctatctggccctgttccttaagctacacctgaagatgctacccagtgaacccgtcttgctagaagaaataacaaacctatcctctcaagtggaggagaactggacccacctccagtctctgtttaatcagtctatgtgtattctcaactatctcaagtcagctttgctctag

SEQ ID NO: 238569 - DNA, 2856 bp, Artificial Sequence
  derived and/or modified sequence
atgtgctgcacagagggcagcctgaggaagagggacagccagagggcccctgaggccgtgctgtgcctgcagctgtggcagaggacagtgcccctggacaccctgaagggcctgggcacctgcttccccagcggccctgagctgcggggagctggcattgctgctgccatggagcgggccagcgagaggagaacagccagcgccctgtttgctggcttccgggccctgggcctcttcagcaatgacatcccccacgtggtgcgcttcagcgccctgaagaggcgcttctacgtgaccacctgtgtgggcaagagcttccacacctatgatgtgcagaagctgagcctggtggccgtgagcaacagcgtgccccaggacatctgctgcatggccgcagatggccgcctggtgtttgctgcctatggaaatgtgttcagcgcctttgccaggaacaaggagatcgtgcacaccttcaagggccacaaggccgagatccacttcctgcagccctttggagaccacatcatctctgtggacacagatggcatcctgatcatctggcacatctacagcgaggaggagtacctgcagctgacctttgacaagtctgtgttcaagatcagcgccatcctgcaccccagcacctacctgaacaagatcctgctgggcagcgagcagggcagcctgcagctgtggaatgtgaagagcaacaagctgctgtacaccttccctggctggaaggtgggcgtgacagccctgcagcaggccccagctgtggatgtggtggccatcggcctgatgagcggccaggtgatcatccacaacatcaagttcaatgagaccctgatgaagttccggcaggactggggccccatcaccagcatctccttcagaacagatggccaccctgtgatggctgctggcagcccctgtggccacatcggcctgtgggacctggaggacaagaagctgatcaaccagatgagaaatgcccacagcacagccatcgccggcctgaccttcctgcaccgggagcccctgctggtgaccaatggagctgacaatgccctgcgcatctggatctttgatggccccaccggggagggccgcctgctgcgcttcaggatgggccacagcgcccccctgaccaacatccgctactacggccagaatggccagcagatcctgagcgccagccaggacggcaccctgcagagcttcagcacagtgcatgagaagttcaacaagagcctgggccacggcctcatcaacaagaagagggtgaagaggaagggcctgcagaacaccatgtctgtgcggctgccccccatcaccaagtttgctgctgaggaggcccgggagagtgactgggatggcatcatcgcctgccaccagggcaagctgagctgcagcacctggaactaccagaagagcaccatcggggcctacttcctgaagcccaaggagctgaagaaggatgacatcacagccacagctgtggacatcaccagctgtggcaactttgctgtgattggcctgagcagcggcaccgtggatgtgtacaacatgcagagcggcatccaccggggcagctttgggaaggaccaggcccacaagggctctgtgcggggcgtggccgtggatggcctgaaccagctgactgtgaccactggaagtgagggcctgctgaagttctggaacttcaagaacaagatcctgatccacagcgtgtccctgagcagcagccccaacatcatgctgctgcaccgggacagcggcatcctgggcctggccctggatgacttcagcatctctgtgctggacatcgagaccaggaagatcgtgcgggagttcagcggccaccagggccagatcaatgacatggccttctccccagatggccgctggctgatctctgctgccatggactgcagcatccgcacctgggacctgcccagcggctgcctgattgactgcttcctgctggacagcgcccccctgaatgtgtccatgagccccaccggggacttcctggccaccagccacgtggaccacctgggcatctacctgtggagcaacatcagcctgtacagcgtggtgtccctgcggcccctgcctgctgactatgtgcccagcatcgtgatgctgcccggcacctgccagacccaggatgtggaggtgtctgaggagaccgtggagcccagtgatgagctgattgaatatgacagccctgagcagctgaatgagcagctggtgaccctgagcctgctgcctgagagccgctggaagaacctgctgaacctggatgtgatcaagaagaagaacaagcccaaggagccccccaaggtgcccaagagcgcccccttcttcatccccaccatccctggcctggtgcccaggtatgctgcccctgagcagaacaatgacccccagcagagcaaggtggtgaacctgggcgtgctggcccagaagagtgacttctgcctgaagctggaggagggcctggtgaacaacaagtatgacacagccctgaacctgctgaaggagagcggccccagcggcattgaaacagagctgcggagcctgagcccagactgtggcggcagcattgaggtgatgcagagcttcctgaagatgattggcatgatgctggacaggaagagggactttgagctggcccaggcctacctggccctcttcctgaagctgcacctgaagatgctgcccagcgagcctgtgctgctggaggagatcaccaacctgagcagccaggtggaggagaactggacccacctgcagagcctcttcaaccagagcatgtgcatcctgaactacctgaagagcgccctgctgtag

SEQ ID NO: 238570 - DNA, 2856 bp, Artificial Sequence
  derived and/or modified sequence
atgtgctgcaccgagggcagcctgcggaagcgggacagccagcgggctccagaagccgttctgtgtttgcagttatggcagagaactgtccctcttgacactctgaagggcctgggcacttgcttcccctcaggcccagaattgcggggtgctgggatagccgcggcaatggaaagagccagcgaacgtcgaaccgccagtgctctctttgccgggttcagggcactgggcctcttcagcaatgacattccccacgttgtgcgctttagcgccctgaagagaagattttatgttacgacatgtgtgggcaagagttttcacacctacgacgtgcagaagctgagcctcgtggctgtctcaaactcggtgcctcaagacatctgctgtatggcggcagacggcagacttgtcttcgccgcttacggtaacgtatttagtgctttcgcccgaaataaggagattgtccacacgttcaaggggcataaggccgagattcactttctccagccttttggcgaccatataatcagtgtggataccgatgggattctcattatttggcatatttactcggaagaggaatacctgcaactgactttcgacaagagcgtgttcaagatctccgcaattctgcatccgtcaacttacctgaataaaattctgttaggttctgaacagggctctctgcagctgtggaacgtcaaaagtaataaactgttgtacacatttcccgggtggaaggtcggagtgacggccctgcagcaagctcccgcagtggacgtggttgccattggactgatgtcagggcaggtcattatccacaacattaaatttaacgaaaccttaatgaaattcagacaggactggggaccaatcacgtctattagcttccgcaccgatggccaccccgttatggctgccggaagcccctgtggacacatcggtctgtgggacttagaggacaaaaaactgatcaatcagatgaggaacgcgcattcaaccgccatcgcaggattaacatttctccacagagagccgctcctcgttacgaatggggctgacaacgctctcagaatctggatcttcgacggacccactggtgaggggcggctgttacgctttcgcatgggccactccgccccactcacgaacatccggtactacggccagaatggtcagcaaattctttccgcctctcaggacggaacactccagagcttcagtaccgtccatgaaaagtttaacaaaagtcttggacacggtctgataaataaaaaacgggtgaaacgtaaggggctgcagaacaccatgagtgtgcgcctaccgccaattactaagtttgcagccgaggaagcaagagagtcagattgggacggaatcattgcgtgccatcaaggtaagctatcctgctctacctggaattatcaaaaaagcacaattggagcctattttttgaagcccaaggagcttaagaaggacgacatcactgccaccgcagtcgatatcactagctgcggaaacttcgccgttataggactttcgtccggcaccgttgacgtgtacaatatgcagtctggcatccataggggcagcttcggaaaggatcaggcccataaagggagtgtacgcggagtggcagtggacggactcaatcagctgaccgtgactactggttctgaagggctgctgaagttctggaatttcaagaacaaaatcctcattcacagcgttagtctgtcaagcagcccaaacatcatgttgctgcaccgtgattcaggcatcctgggtctggctctggacgactttagtatcagcgtccttgacatcgagacaagaaaaatcgtcagagagttctctgggcatcagggtcaaatcaacgatatggctttcagccccgatggtagatggctcatctccgcagcgatggattgttccattaggacctgggatttgccaagcggttgccttatcgattgttttctgcttgattctgcacccctgaacgtgtcaatgtcccccacaggagatttcctcgccaccagtcacgttgaccatttggggatctacctctggtctaatatcagtttgtatagcgtggttagtttacgccccttgcctgcggattacgttccatcaatcgtgatgcttcccgggacatgtcagactcaggacgtcgaggtcagcgaggagacagtcgagccttctgatgagttaattgaatatgacagtccggagcagctcaacgaacaattggtgacgctctccctccttccggagtccaggtggaaaaatctgcttaacttggacgttattaaaaaaaagaacaaaccaaaggagccgcctaaggtaccaaaatccgccccgttcttcattcctaccattccaggcctcgtgccacgttatgccgcacctgagcagaacaacgacccacaacagtccaaggtcgtgaacctgggggtgctggctcagaagtcggacttctgcctgaagctggaggagggcctggtgaacaacaagtatgacacagccctgaatttactcaaggagtccggccctagtgggatagagacggagctccgatccttatcccccgactgcggcggaagcattgaagttatgcagtcatttctgaaaatgataggtatgatgttggatcggaagcgggactttgagctggcccaagcatatctagccctcttcctgaaactgcacctgaagatgttgccttccgagcctgtcttactggaggagattacaaatctgagctctcaggttgaagagaactggacgcacttacaatcgcttttcaatcaatctatgtgtatactgaactatctgaaatctgccctcttatag

SEQ ID NO: 238571 - DNA, 2856 bp, Artificial Sequence
  derived and/or modified sequence
atgtgctgcaccgagggcagcctgcggaagcgggacagccagcgggcacccgaagccgtgctctgcctgcagttgtggcagcggaccgtgccacttgacaccttgaagggcctaggcacatgctttcccagcggtcctgaactcagaggtgccggcattgccgcagcaatggagcgcgctagcgaaagacggactgccagcgccctcttcgcgggttttagagcccttggacttttttctaacgatattcctcacgtggtgcgtttcagcgcactgaaaaggcgtttttatgtaaccacatgcgtgggcaagagcttccacacttatgatgtgcagaagttatcactcgttgctgtgagtaattctgtcccacaagatatatgctgcatggccgccgatggtcggctcgtgttcgccgcatacgggaacgtcttcagcgcctttgcccggaataaggaaatcgtccatacttttaaggggcataaggctgaaatccatttcctacagcctttcggcgaccacattatttcggtcgacaccgatggtatcttgataatctggcatatttacagcgaagaggaatacttacagctgactttcgataaatctgttttcaaaatctctgctatcctgcatccatccacatacctgaacaaaattctcctgggaagcgaacagggttccctccagctgtggaacgtcaagtcaaacaaactgctgtacacctttcctggctggaaggtgggcgttaccgcactgcagcaggcccccgccgttgacgtggtcgccattggactaatgtcggggcaagtgatcatacacaatatcaaattcaacgaaacgctgatgaaattccgtcaggactggggcccaataacgtcaatatctttccggaccgatggccacccggtcatggccgctggatccccctgtggccatatcggtctgtgggacttagaagataaaaaactcataaatcagatgcgcaatgcacactccacagcaattgcagggctaacatttctccaccgggaaccgcttctggttacaaatggcgcagataacgctctgaggatctggatctttgatggacccaccggcgagggccgccttttacggttccggatggggcatagcgcccctctgaccaatatccggtactatgggcagaatgggcagcaaattctgtctgccagtcaggacgggactttgcagagcttttctactgtacatgaaaagtttaataagtccctcggacacggactcatcaacaaaaagcgagtgaaaaggaaagggttgcagaacaccatgtcagtgcggctgccgcccatcacaaagttcgccgccgaagaggctcgggaatccgactgggatgggatcatcgcctgccatcaaggcaagctttcttgttcaacttggaactatcagaaaagcacaataggagcatatttcctgaagcccaaagaactgaaaaaggacgatattactgccactgctgtcgacattacgtcatgcggaaacttcgcagtcattggcctgtcgtcagggaccgtagacgtttacaacatgcaaagcgggattcatcgcgggagctttggaaaggaccaggcacataaaggatccgttcgcggtgtggccgtggacgggcttaaccagctgacagtcaccactggctccgagggtttgctgaaattctggaactttaaaaacaaaatcctcatacatagcgtcagcctgtcgtcatcacccaatatcatgctgctacaccgggactcagggattttgggcctcgctttggacgattttagcatttccgtgttggacatagagactaggaaaatcgtccgcgaattctcggggcaccagggacagattaatgatatggccttctctcctgacgggcgctggctcataagtgccgccatggactgcagcatccgaacatgggacctgcctagtggctgcctcattgattgttttcttctagattcggccccgttgaacgtgagcatgtcccctaccggcgattttctcgccaccagccacgtcgaccacctaggaatctacctgtggtccaatatttcactctacagtgtcgtatcgctaaggcccttaccagccgactacgtcccgagtatcgtcatgctgcctgggacgtgccaaacgcaagacgtggaggttagtgaagagacggtggaaccatcggacgaactgatagaatacgactctccggagcagctaaatgagcaactggtgacactgagcctgttacctgagtcccgatggaagaatcttctgaatcttgatgttattaaaaaaaagaacaagccaaaagagccccccaaggtcccaaagagtgcacccttctttatccctaccattcccggcctggtccctcgttacgccgcgcccgagcagaataatgatcctcagcaatccaaggtggtgaatttgggagtgctcgcacaaaaatcagatttttgtctaaagttagaggaagggctggtaaataataagtacgacacggccttaaatctgctgaaggagagcggtccaagcggcatcgagactgagcttcgttcactttccccagactgcgggggcagtattgaagttatgcagtcattcctgaaaatgattggaatgatgctggataggaagcgcgatttcgagctcgcgcaagcgtacttagccttgttcctgaagcttcacctgaagatgctgcctagtgagcccgtgctccttgaagagatcacgaatctgtccagccaggtagaggagaactggactcacctccaatccctgttcaatcagagtatgtgcattctaaattacctcaaatccgccctgctctag

SEQ ID NO: 238572 - DNA, 2856 bp, Artificial Sequence
  derived and/or modified sequence
atgtgctgtacggagggctcactgcgaaagagggacagccaacgcgctcctgaagccgtgctatgcctccagttatggcaacggactgtgccattagatactctgaaaggcctaggcacgtgtttcccttccggccctgagctgcgcggagcaggcattgcggctgccatggagagggcttccgagcgccgaaccgcttctgccctgtttgcaggattcagagcgctgggtttatttagtaacgacatcccacatgttgtacgattctcggcgttgaagagaagattctatgtgacgacttgcgtgggcaagtctttccatacttatgacgtgcagaaactgtctctcgtagccgtctccaattccgtcccacaggacatctgctgcatggccgctgatggccgtttggttttcgcagcatatggcaacgtgtttagcgcctttgcacgaaataaagagatcgtgcacactttcaaaggacacaaggccgagatccatttcctgcagccgttcggtgaccacatcatttccgtggatacggatggaatattaatcatctggcatatttacagcgaagaggaatatttacaacttacttttgataaatccgtatttaagattagtgctatcctgcatccctcaacatacctcaacaagatcctgctgggctcagagcaggggtcattacagctttggaatgtgaaatccaataagctcctgtacacattccccggatggaaggtgggtgtgactgccttacagcaagccccagctgtggacgtggtggcaatcggccttatgtccggacaggtcataattcacaatattaagtttaatgagacactgatgaagttcaggcaggattggggaccgataacctccatttcctttaggacagatgggcaccctgtaatggcagccggttccccttgtgggcatataggcttgtgggatcttgaagacaagaagctcatcaaccaaatgagaaacgcccatagcactgctatagcagggctcactttcctgcatagagagcctctgctggtcactaatggcgcagacaatgctctgcgcatttggattttcgacggtcccacaggcgaagggcgtctgctgagattcaggatgggacacagcgccccactcactaatatccgatactacggtcagaatggacagcagatccttagtgcatctcaggacggcacacttcagagcttctccaccgtgcacgagaaatttaacaagagtcttgggcatggcctcattaataaaaagagggtgaaacgcaaaggtctgcagaacacaatgagtgtgcgccttcccccaattaccaaattcgcggcagaagaggcgagagagagcgattgggatggcattatcgcttgccatcaagggaagctgtcgtgttctacctggaactaccagaagtcaacaatcggagcatactttttgaaacctaaggagcttaagaaggatgacattacagctacagcagtggacatcacttcttgcggcaactttgcggtcatagggctgtcaagcggcacagtcgacgtgtataacatgcagtccggcattcatcggggttcttttggcaaggatcaggcacataagggatcggtccggggagtggcggttgatgggctgaaccagctgacagtgacgaccggcagtgaaggcctgctaaagttttggaattttaaaaataagatccttattcactccgttagcctttcctcaagcccgaatatcatgttgctccatcgcgatagcgggatacttggtctagcactggatgatttcagtatatctgtgctcgatatagaaactaggaaaatcgtgagagagttctcgggccaccagggacagattaatgatatggcctttagtcctgacggcagatggcttatctcggctgccatggactgctctatccggacttgggatctgcctagcggctgtcttatagattgttttttgcttgactcagctccactcaacgtgagcatgagccctacaggcgacttcctagccacatcacacgtggatcatctgggtatatatctatggagcaatattagtctttatagcgtagtgagcctccggccattgccagcggactacgtcccatcaatagttatgttgccaggaacctgtcagactcaagacgtggaggtctctgaagagaccgtggagccgtcagatgagttgatcgaatacgactcccccgagcagcttaatgagcagctggtgactctgtccctgttaccggagagtagatggaagaacctactgaatctggacgtgatcaagaagaagaacaagcctaaggaaccacctaaggtgccgaaaagcgctccatttttcatccccactataccaggcctcgtgcccaggtacgcggcacctgaacaaaacaatgatccacagcagagcaaggtggtgaacctgggggtcctggcccagaagtctgatttctgccttaaattggaagaagggctggtcaacaacaagtatgataccgcgctcaacctattgaaggagtcaggccctagcggcatcgaaactgagcttagatccctatctcccgattgcggaggttccatcgaagtcatgcaaagcttcttgaagatgatcggtatgatgctcgacaggaagcgtgatttcgagctcgcgcaggcctacctcgcactgtttctaaagttacatctgaagatgctaccatcggaaccagtactgttggaagagatcacaaatctcagctcacaggttgaagagaactggacacacctgcagagcctgttcaaccaatccatgtgcatacttaattatttgaaatcagcactgctctag

SEQ ID NO: 238573 - DNA, 2856 bp, Artificial Sequence
  derived and/or modified sequence
atgtgttgtacagaaggttctttacggaagagagacagccagagagcgcctgaggccgtcttgtgcctccagctctggcaaagaaccgtaccacttgacacactgaaagggctagggacatgttttcccagcggccctgagctacgaggagccggaatcgcggctgcgatggaacgcgcaagcgagagaaggactgcatcagccctgtttgccggattcagggctctcgggcttttcagtaacgacataccacacgtggttagattttccgccttgaagagaaggttctatgtcaccacctgtgtaggcaaaagctttcacacatacgatgtacaaaaacttagtcttgttgccgtgtctaactcagtaccacaggacatttgttgtatggccgcagacggaagactggttttcgcggcttatggtaatgtgttcagtgcattcgctagaaacaaagaaattgtccataccttcaaggggcataaggctgagattcatttcctgcagcctttcggcgatcacatcatatctgtcgacacggatggcattttgataatttggcatatttatagcgaggaagagtatctccagctcacattcgataagtccgtatttaaaatctctgctatccttcaccctagcacctacttgaataagatcctgctgggctcagagcaaggcagtcttcagctgtggaacgtgaagagcaacaaattgctctatacatttccaggttggaaggtgggtgtaaccgcgcttcaacaggccccagctgtggacgtggtagccattggcctcatgtcagggcaggtgataatacataatatcaagttcaatgagacactcatgaagttccgccaagattggggccctattactagcatctctttcaggacagatggccatccagtcatggccgcaggctctccatgtggccacattggtttatgggatctggaagataagaagcttatcaaccagatgagaaatgcccattccaccgctattgcagggctcacattcttacaccgggaaccgcttctggtgaccaacggcgctgataacgcattacggatttggatatttgatggaccgacaggcgaaggcagactcttgcgcttccggatgggacattccgcaccactaaccaatatcaggtactatggccagaacggacagcaaatcctgtcagcgtcccaggatggcacgctccagagcttttctacggtgcacgagaaattcaacaaatctctggggcacggcctcatcaacaaaaaaagagttaaacggaaagggttgcagaacactatgtcagtccggctccctccgataaccaaatttgccgctgaggaggctcgggagagcgactgggatggcataatcgcttgccaccaggggaagctctcctgcagtacttggaattatcagaagagtacaataggagcttactttctgaagcctaaggaactcaagaaagacgacatcacagccacagcagtcgacataacgtcctgcgggaacttcgccgtgatcgggctcagctctggaaccgtagatgtgtacaatatgcagtctggcatccatcgagggtccttcgggaaagaccaagcgcacaaggggagtgtgcgcggtgtcgctgtggatgggcttaatcagttaacagttacaaccgggtccgaaggtttgctgaagttttggaactttaagaacaagatcttaattcactctgtgagcctgagctccagtcccaacatcatgcttttgcaccgggacagcgggatcctcggactagctcttgatgacttctcaatctccgttctagatatagagacaaggaaaatcgtaagggagttctcaggtcaccaggggcagatcaacgacatggcctttagtcccgacggacgctggctgatctccgctgctatggactgcagcattcgtacttgggatttgcccagtggttgcctgatcgattgctttctgctcgactccgcaccattgaatgtttcaatgtcccccaccggagattttctggccacttcacatgttgatcacttggggatttacctgtggtctaacattagtctatacagtgtggtttcactaagacctctcccagccgactacgtcccctcgatagttatgcttcccggaacatgccagacccaggatgtcgaggtgtccgaagagacagtcgagccatctgacgaactaatcgaatatgatagccccgagcagctgaacgagcagctggtcactctctcgttgttgccagaatccaggtggaagaacctcctcaacctcgatgtgataaagaagaagaacaaaccaaaggagccgcctaaggtgcctaagtctgcgccattttttatcccaactatacccggactcgttccaaggtacgccgcacccgagcagaataatgaccctcagcagagcaaggtcgtgaatctcggggtgctggcccagaagtccgacttctgcctcaaactagaggagggcctggtgaacaataagtatgacacagccctgaacttgttgaaggagtccggacccagcggcatcgaaaccgagctacgctctctctccccagactgtggaggaagcattgaagtgatgcagagcttcctgaaaatgataggaatgatgctggaccgcaagagagatttcgaactagcccaggcctaccttgccctgttcttgaaactgcatctgaaaatgcttccttcggaaccagtgctgttggaggaaattactaacttgagctcccaggtggaagagaactggactcatctgcagtcgctgttcaaccagtccatgtgtatactaaattacctgaagtccgctctgttgtag

SEQ ID NO: 238574 - DNA, 7048 bp, Artificial Sequence
  derived and/or modified sequence
tcaaggaatactgacttaatccaggaatcccaataacatttaatatttatcttccttttctgggaggaatctacacttatccaagttgcccaagtgagcagttccctccccacaagtaattagttctactccccagagggtctgtgagtgaatccctctgtcagttttgaaatgtcccattatagttttcatctgtaaatatgtcaatatgtatccaaaagatgaggatctttaaaaacgtaatcataatgctactatcatatgtaaaaatgaaacataattccttaatatcatcagatatccagtgtttaaatttttccagtctcatgtttttgtacatttttaaataatcacatgtttaaatcgtttccatctccaaggcgtcgacctcccctccattctcctgggcgtcgcgcttccctctttgtttcccgcccttgcggttctgtcggaacctaacgagcttccttccaccgcaaaagagctggagaacaatgctaggcaacgtgctggagaccttggccctcggaacccaagtcacgcctcccatgtgagctctggagggagaactttatgtgttgcactgagggcagtctccggaaacgcgattcgcagcgggcgccggaagcggtgttgtgtctgcagctctggcagaggactgttccactagacacgctgaagggactgggtacgtgttttccttcaggaccagagctgagaggagctgggatcgcggcggcaatggaacgggcctcagaaaggcgcacggccagcgcgctttttgcggggttccgggccttgggacttttcagcaacgacattccacacgtggtgcggttcagcgcgctcaagcgccggttctatgtaacaacctgcgtgggcaagagtttccacacctatgacgttcagaaacttagtctggttgcagtaagtaattctgttccacaggatatctgctgtatggcagctgatggcagattagtctttgctgcttatggaaatgttttctctgcatttgcccgtaataaagagatagtacatacctttaagggtcataaggcagaaatccatttcttgcaaccctttggagaccacattatctctgttgatactgatggcattcttattatttggcacatatattcagaagaagaatacctgcagttgacttttgataaatcagtatttaaaatttctgcaattttgcatccaagtacctacttgaataaaatacttctgggcagtgaacaaggaagcctgcagttgtggaatgtaaaatccaataaacttctatatacatttccaggatggaaagttggagtgacagctcttcagcaggcaccagccgtggatgttgttgctattggtcttatgtcaggtcaagttatcattcacaacattaaatttaatgaaacattaatgaagtttcgtcaagactggggacccattacttcaatttcatttcgcacagatggtcatccagtaatggcagctggaagcccatgtggccatattggactctgggatctagaagacaaaaaattaatcaaccaaatgagaaatgcacactctacagcaattgccggactgacatttctccatagagagccacttcttgtcacaaatggcgctgacaatgctcttaggatatggatatttgatggtcctacaggtgaaggccgacttttgagattcagaatgggtcatagtgctcctcttaccaatatcagatattatggacagaatggacagcagattctaagtgcaagtcaagatggaactcttcagtcattttccacggtacatgaaaaattcaataagagcttgggacatggattaataaataaaaagagagttaaacgtaaaggacttcagaataccatgtcagtgagacttccacccatcacaaagtttgcagcagaggaagctcgtgaaagtgactgggatggtatcattgcttgccatcaaggtaagctatcttgctcaacctggaattatcagaaatctacaataggcgcttactttctcaagccaaaagagttgaagaaagatgacataactgcaacagcagtggatataacttcttgtggaaactttgctgtaattggcctctcatcaggaactgtagatgtatataacatgcagtctggcatacatcgaggaagttttggcaaggatcaagctcacaagggatctgttagaggtgtcgcagtggatggattaaaccagttgacagttacaactggtagtgaaggattactcaaattctggaactttaaaaacaaaattttaatccattctgtgagcctcagttcatctccaaatatcatgttgctacatagggacagtggcattctgggactcgccttggatgacttctccattagtgttctggacatagaaactaggaagattgtcagagagttttctggacaccaaggccaaataaatgacatggcttttagtcctgatggtcgttggttaataagtgctgcgatggattgctctattaggacttgggaccttccttctgggtgccttatagactgctttttgttggactcggctcctctcaatgtttctatgtctcctactggagactttctggcaacttcccatgtggaccaccttggaatttatctatggtccaatatttccctgtattcagttgtttcattacggccacttcctgcagattatgtcccttcaatagtcatgcttcctggtacttgtcaaacccaagatgtagaagtatcagaagaaacagtagaaccaagtgatgaattgatagaatatgattcgccagaacagttgaatgagcaattggtgactctttcacttcttcctgaatcacgatggaaaaaccttcttaaccttgatgttattaagaaaaagaataaaccaaaggaaccacccaaagtacccaaatcagcaccatttttcattccaacaattcctggccttgtacccagatatgctgcacctgaacaaaataatgatccccagcagtctaaagtggtaaatcttggagttttggctcaaaaatcagatttctgcttgaaacttgaagaaggactggtaaataataagtatgacactgctctcaaccttctgaaagaatcaggcccatcaggaattgaaacagagctgcgaagcttgtctcctgattgtggtgggtccatagaagttatgcagagcttcttgaaaatgattgggatgatgctggacagaaagcgtgattttgagttagcccaggcataccttgcattgtttctaaagttacaccttaaaatgcttccttcagagccagtactcctagaagaaataacaaatttgtcatcccaggtggaagaaaactggacccatttgcaatcactcttcaatcaaagcatgtgtattttaaattatctcaaaagtgctttgttgtaaaaataaatttgtgactaaacaaagactttcatattaaatgggttcaattgaactcatttcttattttccaagtgtcaatgtgaaaagaaaataaatgctagcactactgactagtcagtatatctccactttaaatgctaaatactttcttgaaataaaatcgcacctcccggccaggcatgatggataatgcctgtaattccagcactttcagaggccaaagcgggaggattgcttgaagccaggaatttgagcccagcctgggcaacatagcaagcaagatcccatctctacaaaaagttaaaaaaataaattacacctgccttttgttttgaagacttaaagaatctgctcaaatgatttattttctgagtctcttcacattaacttttatatgatttttaaaaaattattacctgcttatattttttgagtatctgtttcatataaagagatgctgcatgttcactgtgaagtattgctgaattaaattgaaaatgtcagataaaactgatacatgatgtagttataaaaatgctgttatgaagaaaaaaggaatgcttttttcctcggtggcctttgataaaaatatgaatgattgactctcagagttggaggataaactaatcatcttctagcacagccctgttgtgttgcaggagaggaatcaggctaaagtctgctggtatttcagtgacagattaaaactttctaacagtggcctagtgctttctccattgtaatgtactgaaaggaagttgttcatggatcagaaatgtgggaggcccttccttgcccaaggcaagtcgctgtagatggttaaactgataccaaggataggtaagggaaattccaaattccattggaagatggccttttactgacactgcagacatgtagataacaatagtttaatgtcctctgaaaaggtaaaaattccataaatccttgcaaacaatttttagcaatattgtttattgctaccacagccaagaatgggtatttcaaagccagggttttttttattttgttttgttttgtttttttttttttttttttggctacacttttttgggggggaccttttaatttgggaagaaaatgctgagtatacttttctttcacaaccattgcaaacccaggtagccctggagttttctttttttctcatcatcattgttttgttttttttatggttcaagacttttgcaatacatgaattaaaaataagcagttctttaaagcatagcgctctaaaaactattcttagtttataccctcaaaagttgggtctttcatgaaacacagtggtttgaatatgaacaccagtagcattctcgttcgttgttagggtaagagagttttgtagaatgatctccaaaagaagcagtcctcaaaaggcatttaccagtgatatcttttaatattcatgtttttatttaatgatgtaagatagaattaataaactactaaggaaataagccaatgtggttattgtactcaatttcgtttttcttttagaaatgtgtattgacttattaaagccactgacagaaatgttaatcatgacttaagttctaatttaaaaaactattttcctctttcctaaatactatattctaaattggaatatggcaaaatcccaatatataattctatacctagtaaagattgtaaataactaaaacaaaatgataagagctgtgaactgaaattgtattgcttacagaaatcatgaaccgaattttcttctctttttaaagtgagcataaagacttaagtgtattgttaccagagatatatttagatagaatacatcattttggcaggtaatcttctagaacctttcatgtactgtttccatcaagggagggaaagaaatagaaaatataattttatctatattttccttaaaatatatcaatctgtgcacactctttcagttttttaattactcatgtaatatatgactacattttgcttgtgtgctttttgaaaaccatcttcagtcccaatatcctctgtagaagtaatagttttaactctcctagatcttcttttagagtgtttttatgagtgtttaatgtaggaatgtgtatatattatctacagccacaggaaatgtatagttacgatttttacatacgtgtatgtatattattgtacaacttgctatttctacttgggagttttttattttggtacattcacatttacctaatctcttgtgcactgtccaacagtactttgcctataatagacacttaaggaagttttccttctttttattcctttataattacaaacaatgctgaaaggaacatcatcctacatgagccctttttgtacatataaggctctctctgtggtatatgcttaggatttgaatttcaggccagagtataaccatttttaatttgaagagatacttccatttgggttccagaatggctgtatcaagttacagttcccctgagcaagatatgagcatctgcttccccatgtaattaatgacacttgctattggatttttgtaatttaattactctgaaaaaattattttggttttaaatcagaaatttctcactagtgaagatggacatatttttgtatgtttattttagaacatataaacatttgttaattttctttttcctctcatttttctattgaatgatttgtccttttatctcatggatttgttaggagttctcttgtattttctgtattttatgtctgttgccaatgttttctcctacttagccatttggctttaattttacatggtgtctgtttaaataaatgttttatatttgtatacaatcaaattgattaattttcatgacttatttcaggatataaagcaaattattttctaagacatttacagtgtatgttttcctatgtttacatgtgctcatttcacgtcatgtattttcctctacgacatgtttctgtgtgagtagttaacatgtagatctttagaattgatttttctgaagagtgaaacagcgctgcttccaatatctgttcaaaattcatttattgaaaagtccactcatatgtctgatttgaaatgctgtttcattatgtgttaaattctttcactgagctcttccatattcctagtaaatgatgcattactttggtatgttctcagatttgggtaaagccttcctcatgttctataaaaattggttaactgctggtgagcacatctcttgaagttttgatatgggttgcacaacatttataggactgatttggagagaccgacaataccgagtgcagtcctcccttggtatctagttccaggacccctgtggataccaaaatccaagcaatgccctgcagatcatgggacctatgcatatgaaaagtcggtccttgtatttgagggttttgcatccctcaaataccatatgttttatttgtgtttggttgaaaaaagtttgcatataagtgaaacttagcatttcaaacctgtgttgttcaaagatcatttgtatttctcttcaagaacaatgaatgtcttcattaaatcatcttttgtgggagagcttttggtttcatagattttcatatatatatatgatataataaacactttttgacattc

SEQ ID NO: 238575 - DNA, 2922 bp, Artificial Sequence
  derived and/or modified sequence
ctttatgtgttgcactgagggcagtctccggaaacgcgattcgcagcgggcgccggaagcggtgttgtgtctgcagctctggcagaggactgttccactagacacgctgaagggactgggtacgtgttttccttcaggaccagagctgagaggagctgggatcgcggcggcaatggaacgggcctcagaaaggcgcacggccagcgcgctttttgcggggttccgggccttgggacttttcagcaacgacattccacacgtggtgcggttcagcgcgctcaagcgccggttctatgtaacaacctgcgtgggcaagagtttccacacctatgacgttcagaaacttagtctggttgcagtaagtaattctgttccacaggatatctgctgtatggcagctgatggcagattagtctttgctgcttatggaaatgttttctctgcatttgcccgtaataaagagatagtacatacctttaagggtcataaggcagaaatccatttcttgcaaccctttggagaccacattatctctgttgatactgatggcattcttattatttggcacatatattcagaagaagaatacctgcagttgacttttgataaatcagtatttaaaatttctgcaattttgcatccaagtacctacttgaataaaatacttctgggcagtgaacaaggaagcctgcagttgtggaatgtaaaatccaataaacttctatatacatttccaggatggaaagttggagtgacagctcttcagcaggcaccagccgtggatgttgttgctattggtcttatgtcaggtcaagttatcattcacaacattaaatttaatgaaacattaatgaagtttcgtcaagactggggacccattacttcaatttcatttcgcacagatggtcatccagtaatggcagctggaagcccatgtggccatattggactctgggatctagaagacaaaaaattaatcaaccaaatgagaaatgcacactctacagcaattgccggactgacatttctccatagagagccacttcttgtcacaaatggcgctgacaatgctcttaggatatggatatttgatggtcctacaggtgaaggccgacttttgagattcagaatgggtcatagtgctcctcttaccaatatcagatattatggacagaatggacagcagattctaagtgcaagtcaagatggaactcttcagtcattttccacggtacatgaaaaattcaataagagcttgggacatggattaataaataaaaagagagttaaacgtaaaggacttcagaataccatgtcagtgagacttccacccatcacaaagtttgcagcagaggaagctcgtgaaagtgactgggatggtatcattgcttgccatcaaggtaagctatcttgctcaacctggaattatcagaaatctacaataggcgcttactttctcaagccaaaagagttgaagaaagatgacataactgcaacagcagtggatataacttcttgtggaaactttgctgtaattggcctctcatcaggaactgtagatgtatataacatgcagtctggcatacatcgaggaagttttggcaaggatcaagctcacaagggatctgttagaggtgtcgcagtggatggattaaaccagttgacagttacaactggtagtgaaggattactcaaattctggaactttaaaaacaaaattttaatccattctgtgagcctcagttcatctccaaatatcatgttgctacatagggacagtggcattctgggactcgccttggatgacttctccattagtgttctggacatagaaactaggaagattgtcagagagttttctggacaccaaggccaaataaatgacatggcttttagtcctgatggtcgttggttaataagtgctgcgatggattgctctattaggacttgggaccttccttctgggtgccttatagactgctttttgttggactcggctcctctcaatgtttctatgtctcctactggagactttctggcaacttcccatgtggaccaccttggaatttatctatggtccaatatttccctgtattcagttgtttcattacggccacttcctgcagattatgtcccttcaatagtcatgcttcctggtacttgtcaaacccaagatgtagaagtatcagaagaaacagtagaaccaagtgatgaattgatagaatatgattcgccagaacagttgaatgagcaattggtgactctttcacttcttcctgaatcacgatggaaaaaccttcttaaccttgatgttattaagaaaaagaataaaccaaaggaaccacccaaagtacccaaatcagcaccatttttcattccaacaattcctggccttgtacccagatatgctgcacctgaacaaaataatgatccccagcagtctaaagtggtaaatcttggagttttggctcaaaaatcagatttctgcttgaaacttgaagaaggactggtaaataataagtatgacactgctctcaaccttctgaaagaatcaggcccatcaggaattgaaacagagctgcgaagcttgtctcctgattgtggtgggtccatagaagttatgcagagcttcttgaaaatgattgggatgatgctggacagaaagcgtgattttgagttagcccaggcataccttgcattgtttctaaagttacaccttaaaatgcttccttcagagccagtactcctagaagaaataacaaatttgtcatcccaggtggaagaaaactggacccatttgcaatcactcttcaatcaaagcatgtgtattttaaattatctcaaaagtgctttgttgtaaaaataaatttgtgactaaacaaagactttcatattaaatgggttcaattgaactcatttctt

SEQ ID NO: 238576 - DNA, 555 bp, Artificial Sequence
  derived and/or modified sequence
atggcaagatctctcgtccatgatacagtgttctattgcctgagcgtctaccaggtgaaaatctcacccacccctcagctaggcgcggcaagcagtgctgaagggcacgtagggcagggcgcacccggtctgatgggcaatatgaacccagagggaggtgttaatcacgaaaacgggatgaaccgggatggaggaatgatcccagagggcggaggggggaatcaggagccacgacagcagccacagccacctcctgaggaacccgcccaggccgcaatggaggggccccagcctgagaatatgcagccaagaacccgcaggacaaagttcacactgttgcaagtcgaagagttggagagcgtttttcgacacacccaatatcccgacgtccccacacgaagggaattggccgaaaacctgggcgtaaccgaagacaaagtgcgcgtgtggttcaaaaacaagcgtgctcgctgccggcggcaccagcgggagttgatgctggcaaatgaactgagagccgatccggatgactgcgtctacatcgtcgttgactag

SEQ ID NO: 238577 - DNA, 555 bp, Artificial Sequence
  derived and/or modified sequence
atggcccggagcctggtgcatgacacagtgttctactgcctgtctgtgtaccaggtgaagatcagccccaccccccagctgggcgccgccagcagcgctgagggccacgtgggccagggcgcccctggcctgatgggcaacatgaaccctgagggcggcgtgaaccatgaaaatggcatgaacagagatggcggcatgatccctgagggcggcggcggcaaccaggagccccggcagcagccccagcccccacctgaggagcccgcccaggccgccatggagggcccccagcctgagaacatgcagcccaggaccaggaggaccaagttcaccctgctgcaggtggaggagctggagagcgtcttccgccacacccagtacccagatgtgcccacccggcgggagctggccgagaacctgggcgtgacagaggacaaggtgcgggtgtggttcaagaacaagagggcccgctgcagaagacaccagcgggagctgatgctggccaatgagctgcgggctgaccctgatgactgtgtgtacatcgtggtggactag

SEQ ID NO: 238578 - DNA, 555 bp, Artificial Sequence
  derived and/or modified sequence
atggcccggagcctggtgcacgacaccgtgttctactgcctgagcgtgtaccaggtcaaaattagccccaccccccagctcggggccgcctcctctgccgagggacacgtggggcagggagccccaggtctgatgggcaatatgaaccctgaggggggtgtgaaccacgagaatgggatgaatcgtgatgggggaatgataccagaaggaggcggagggaaccaggagcctagacagcagccgcagcccccgccagaggaaccagcgcaggccgccatggaggggccccagccagaaaatatgcaaccgcggacacggaggaccaaatttaccctactgcaggtggaggagctcgaaagcgtgtttcgccatactcagtatccagacgtgccaaccaggcgagagctggccgaaaacctgggcgtcacagaggacaaagtgcgagtctggtttaaaaataaacgtgcccggtgtcggagacatcagcgcgaattgatgctagccaacgagctccgagccgacccagatgattgtgtctacattgtggtcgactag

SEQ ID NO: 238579 - DNA, 555 bp, Artificial Sequence
  derived and/or modified sequence
atggctaggagtttggtccacgacacagtgttttactgcctgtccgtctaccaggtgaagattagtcccacccctcagcttggcgctgcttcgtcagctgaggggcacgtggggcaaggggcaccaggcctgatgggaaatatgaaccccgaagggggagttaaccacgagaacggcatgaacagggatggcggtatgataccggagggcggaggcggaaatcaagagccgcgacaacagcctcagccacctccagaggagcctgctcaggcagccatggaggggcctcaaccagagaatatgcagccccgaactcgccgtactaaatttaccctcctgcaggtggaagagctcgaatctgtgtttagacacacccagtaccccgacgtgcccactaggcgtgagcttgcggagaacctcggagttaccgaagataaggtgagagtctggttcaaaaacaagagggccagatgcagacgccaccagcgagaattgatgttagcaaatgaacttagggccgaccccgacgattgcgtttacatcgtggtggactag

SEQ ID NO: 238580 - DNA, 555 bp, Artificial Sequence
  derived and/or modified sequence
atggccagaagcctggtgcacgacaccgtgttctactgcctgagcgtgtaccaggtgaagatcagccccaccccccagctgggcgccgccagcagcgccgagggccacgtgggccagggcgcccccggcctgatgggcaacatgaaccccgagggcggcgtgaaccacgagaacggcatgaacagagacggcggcatgatccccgagggcggcggcggcaaccaggagcccagacagcagccccagcccccccccgaggagcccgcccaggccgccatggagggcccccagcccgagaacatgcagcccagaaccagaagaaccaagttcaccctgctgcaggtggaggagctggagagcgtgttcagacacacccagtaccccgacgtgcccaccagaagagagctggccgagaacctgggcgtgaccgaggacaaggtgagagtgtggttcaagaacaagagagccagatgcagaagacaccagagagagctgatgctggccaacgagctgagagccgaccccgacgactgcgtgtacatcgtggtggactag

SEQ ID NO: 238581 - protein, 537 aa, Artificial Sequence
  derived and/or modified sequence
MGGAGILLLLLAGAGVVVAWRPPKGKCPLRCSCSKDSALCEGSPDLPVSFSPTLLSLSLVRTGVTQLKAGSFLRIPSLHLLLFTSNSFSVIEDDAFAGLSHLQYLFIEDNEIGSISKNALRGLRSLTHLSLANNHLETLPRFLFRGLDTLTHVDLRGNPFQCDCRVLWLLQWMPTVNASVGTGACAGPASLSHMQLHHLDPKTFKCRAIELSWFQTVGESALSVEPFSYQGEPHIVLAQPFAGRCLILSWDYSLQRFRPEEELPAASVVSCKPLVLGPSLFVLAARLWGGSQLWARPSPGLRLAPTQTLAPRRLLRPNDAELLWLEGQPCFVVADASKAGSTTLLCRDGPGFYPHQSLHAWHRDTDAEALELDGRPHLLLASASQRPVLFHWTGGRFERRTDIPEAEDVYATRHFQAGGDVFLCLTRYIGDSMVMRWDGSMFRLLQQLPSRGAHVFQPLLIARDQLAILGSDFAFSQVLRLEPDKGLLEPLQELGPPALVAPRAFAHITMAGRRFLFAACFKGPTQIYQHHEIDLSA

SEQ ID NO: 238582 - protein, 494 aa, Artificial Sequence
  derived and/or modified sequence
MGGAGILLLLLAGAGVVVAWRPPKGKCPLRCSCSKDSALCEGSPDLPVSFSPTLLSLSLVRTGVTQLKAGSFLRIPSLHLLLFTSNSFSVIEDDAFAGLSHLQYLFIEDNEIGSISKNALRGLRSLTHLSLANNHLETLPRFLFRGLDTLTHVDLRGNPFQCDCRVLWLLQWMPTVNASVGTGACAGPASLSHMQLHHLDPKTFKCRAIELSWFQTVGESALSVEPFSYQGEPHIVLAQPFAGRCLILSWDYSLQRFRPEEELPGEPPPRPSACPAACLAGLTCLPTSPQRPPWCPASHWCWARASSCWLPACGGAHSCGPGPVPACAWPQRRPWPRGGCCGPMTPSSCGWKGNPASWWPMPPRRAAPRCCAATGPAFTRTRACTPGTGTRTLRPWSWTAGPTCCWPRLPSGPCSSTGPVAASRDAQTSPRPRMSMPHATSRLVGTCSCASHATLGTPWSCAGTAPCFVCCSNFPRAVPTSSSHCSSPGTSWPS

SEQ ID NO: 238583 - protein, 538 aa, Artificial Sequence
  derived and/or modified sequence
MGGAGILLLLLAGAGVVVAWRPPKGKCPLRCSCSKDSALCEGSPDLPVSFSPTLLSLSLVRTGVTQLKAGSFLRIPSLHLLLFTSNSFSVIEDDAFAGLSHLQYLFIEDNEIGSISKNALRGLRSLTHLSLANNHLETLPRFLFRGLDTLTHVDLRGNPFQCDCRVLWLLQWMPTVNASVGTGACAGPASLSHMQLHHLDPKTFKCRAIELSWFQTVGESALSVEPFSYQGEPHIVLAQPFAGRCLILSWDYSLQRFRPEEELPAASVVSCKPLVLGPSLFVLAARLWGGSQLWARPSPGLRLAPTQTLAPRRLLRPNDAELLWLEGQPCFVVADASKAGSTTLLCRDGPGFYPHQSLHAWHRDTDAEALELDGRPHLLLASASQRPVLFHWTGGRFERRTDIPEAEDVYATRHFQAGGDVFLCLTRYIGDSMVVMRWDGSMFRLLQQLPSRGAHVFQPLLIARDQLAILGSDFAFSQVLRLEPDKGLLEPLQELGPPALVAPRAFAHITMAGRRFLFAACFKGPTQIYQHHEIDLSA

SEQ ID NO: 238584 - DNA, 1614 bp, Artificial Sequence
  derived and/or modified sequence
atgggcggcgcaggcatcctgctgctcttgctcgctggcgctggcgtggtggttgcctggcgtccacctaaggggaaatgcccgttacgctgcagctgcagcaaggactcggcattgtgtgaggggtcacctgatctgccagtctcattctcccctactttactgtccctgtctctggtcagaacaggggtgacccaactgaaggcgggctctttcctgagaatcccatctctccatctattgttgttcacctctaactcatttagtgtgattgaggacgacgcattcgccggcttgtcccacctgcaatacctcttcatagaggataatgagattggatctatttcaaagaatgctctgcgtggtctccgtagcctcacccacctgtccctggccaacaaccacctggagaccctcccaaggtttctgttcaggggcctggatacgctcacacatgtggacttgcggggcaaccctttccagtgcgactgccgtgttttgtggctgctccagtggatgccaactgtgaatgcttccgttgggacaggtgcgtgtgcgggtcctgcatccctcagtcatatgcagctccaccacttggacccaaagacgttcaaatgtcgggctatcgaactgagttggtttcagactgtgggcgaatccgccctttctgtggaaccgtttagttaccaaggcgaaccccatatcgtgctggcgcagccgtttgctggaaggtgcttaatcctgtcatgggactattctcttcagagatttagacccgaagaagaacttccggccgctagtgttgtctcatgcaagcccttagtgctgggtcccagtttgttcgtgcttgcagcgcgcctctggggtgggtcacagctctgggcaaggccaagccccggattacggttagcccccacacagaccctagccccccgtcgtctgctaagacccaacgacgcagagctgctctggctggaaggacagccctgttttgtggttgctgacgcatctaaagccggtagtaccactttgttgtgccgggacggcccaggtttttatccacatcagagtttacacgcctggcaccgcgatactgatgcggaggcacttgagctggacggcaggcctcatttactgctggcttctgcatctcagcgaccagtcctgtttcactggaccggaggccggtttgagagaaggacagacattccagaggcagaggacgtctatgcgactcgccactttcaagctgggggagatgtcttcttatgtcttacaagatacatcggggactcgatggtgatgcggtgggacggctccatgttcagactattacagcagcttccatctcgtggcgcacatgtttttcagcctctcctcattgcgagagatcaactggccatacttggctccgatttcgcgtttagccaagtgctcagactggagcccgataaagggctgctggagcccctgcaggagctagggcccccagccctggtcgcaccacgagctttcgctcatattacaatggccgggcgaaggtttcttttcgcagcctgctttaaggggccaacccagatatatcagcaccatgagattgatctgtccgcttag

SEQ ID NO: 238585 - DNA, 1485 bp, Artificial Sequence
  derived and/or modified sequence
atgggaggagccggcatacttctcctgctgctggcaggtgctggagtcgtagttgcctggaggcctccaaagggtaagtgccccctgagatgcagttgcagcaaagatagcgccctctgtgagggctcacctgacctccccgtgtctttcagtcctacactactgagcttatccttggtgcgtacaggagtaacccagctcaaagcggggtcctttctgcgcattccctccctgcacctgttattgtttacctctaattccttctccgtgattgaggatgacgccttcgcaggcctcagtcatctgcagtacctgttcatagaggataatgagataggcagcatatcgaagaacgctttaaggggtctccgctccctgacccacctgtctttagcaaacaatcatctagaaacactgccgagatttctgtttaggggtctcgacaccctgacgcacgtggatctgaggggcaatccctttcagtgcgattgtcgagtgctatggctgctgcagtggatgccaaccgttaacgcatcagtcggcacgggcgcatgtgcagggccagcctcactatcacatatgcagctgcatcacttggatccgaaaacttttaagtgtagggccatcgagttatcctggttccagactgtgggggagagcgccctgtccgtggagccattttcctatcagggtgaaccccacatagtcctcgcccaaccattcgcaggcaggtgtcttatcctatcctgggactactcgctgcaaagattcaggcctgaggaggaactgcctggggaaccccccccccggccctcggcatgccctgcagcttgtctggccggactcacttgtctgcccacctcaccacaacgccctccttggtgtcccgctagtcactggtgctgggctagagctagtagctgctggctcccggcgtgtggcggggcccatagctgtgggccgggacctgtccccgcttgcgcctggccccaaaggcgcccttggccgaggggcggctgttgcggacctatgaccccttcctcctgtggatggaagggcaatccagcttcttggtggccaatgcctccccggcgcgctgcaccacgttgctgcgcggcaactggtcccgcgttcacccgaactcgggcatgcacgcctgggaccggaactaggactctcaggccttggtcatggacggcaggaccaacctgctgttggcctaggctgcccagtgggccttgttcctctactgggcctgtagctgcatcaagggacgcccagacatcaccaagaccccgtatgtccatgccacacgctacctctaggctggtgggcacatgtagctgtgcaagtcacgcgacccttggcactccctggagctgcgccggaacggccccctgcttcgtctgttgctcgaacttcccacgcgccgttcccaccagtagctcccattgtagtagtccaggtactagctggccgtcctag

SEQ ID NO: 238586 - DNA, 1617 bp, Artificial Sequence
  derived and/or modified sequence
atgggaggggcaggaatcctcctgcttctcctcgcaggggccggcgtcgtcgtcgcatggcgcccacccaagggcaagtgtcctcttagatgttcctgctctaaagattctgccctctgtgaagggtctccagacctccccgtgagctttagcccaaccctcttgagtctgtcccttgtcaggacgggagtgacacagctcaaagcgggctcattcctgcggatcccatcactccatctgctgttattcacgagcaactctttcagcgtcattgaggatgacgcctttgcaggactctcacatctgcaatacttatttatcgaagacaacgaaattggctctatctccaagaatgccctccggggtctgcgcagtttaacccacttaagcttggccaacaatcatctggaaactctgccacgtttcctgtttcgagggttggatactctcactcacgttgatctgcgaggcaaccccttccagtgtgactgccgggtgctctggctgctccagtggatgccaaccgtgaacgcctccgttggtaccggcgcatgtgctggtcccgcatctttgagccacatgcaactgcatcatctcgatcccaaaacatttaagtgccgggccatcgagctgagctggttccagactgtgggggagagtgccttatcggtagagcctttcagttatcagggtgaaccacatatcgtgctggctcagcccttcgcgggtagatgtctcatcctgagctgggattacagcctccaacgctttagacctgaggaggaactccccgccgctagcgttgttagctgtaaacctctcgtgctgggaccatcgctgtttgtccttgcagctaggttatggggtggcagtcaactgtgggctaggcccagtcctggattgcgcctggcgcccactcagactctggccccccgtcgcctactccgccccaacgacgccgaactgctctggcttgaaggacaaccctgttttgtagtagccgatgcctccaaggccggttcaacgacgctgctttgcagggacgggcctggcttttacccacaccaatcacttcacgcctggcatcgcgacacagatgcagaagcgcttgaattagatggccgcccccatcttttactcgctagcgccagtcaaagacctgtgctcttccactggacaggcggcaggttcgaaagaagaacagatatccccgaagcagaggacgtctatgctacacgacacttccaggccggaggcgatgtgttcctgtgcttgacgcgctatattggggattctatggtggtcatgaggtgggacggatctatgttccgattactgcaacagctgccctcgcggggagcacatgtgttccagcccctcctgatcgcccgggatcagttggccatactggggagtgattttgcattttctcaggtgttgaggctcgaaccggataaagggctcctggaacctctgcaggagttgggccccccagccttagtggctccaagggcattcgcccacatcacaatggctggcaggcgtttcttatttgccgcttgtttcaaaggtcctacccagatctaccagcaccatgagatagatctctcggcttag

SEQ ID NO: 238587 - DNA, 1614 bp, Artificial Sequence
  derived and/or modified sequence
atgggcggggccggcatcctgctgctgctgctggccggggccggcgtggtggtggcctggaggcctcccaagggcaagtgccccctgcgctgcagctgcagcaaggacagcgccctgtgtgagggcagcccagacctgcctgtgtccttcagccccaccctgctgagcctgagcctggtgaggactggagtgacccagctgaaggccggcagcttcctgcgcatccccagcctgcacctgctgctcttcaccagcaacagcttctctgtgattgaagatgatgcctttgctggcctgagccacctgcagtacctgttcatcgaggacaatgagatcggcagcatcagcaagaatgccctgcggggcctgcggagcctgacccacctgagcctggccaacaaccacctggagaccctgccccgcttcctgttccggggcctggacaccctgacccacgtggacctgcggggcaaccccttccagtgtgactgccgggtgctgtggctgctgcagtggatgcccaccgtgaatgcctctgtgggcaccggggcctgtgccggccctgccagcctgagccacatgcagctgcaccacctggaccccaagaccttcaagtgccgggccatcgagctgtcctggttccagacagtgggggagagcgccctgtctgtggagcccttctcctaccagggcgagccccacatcgtgctggcccagccctttgctggccgctgcctgatcctgtcctgggactacagcctgcagcgcttccggcctgaggaggagctgcctgctgcctctgtggtgtcctgcaagcccctggtgctgggccccagcctgtttgtgctggccgcccggctgtggggcggcagccagctgtgggcccggcccagccctggcctgcggctggcccccacccagaccctggccccccggcggctgctgcggcccaatgatgctgagctgctgtggctggagggccagccctgctttgtggtggctgatgccagcaaggccggcagcaccaccctgctgtgcagagatggccctggcttctacccccaccagagcctgcacgcctggcaccgggacacagatgctgaggccctggagctggatggccggccccacctgctgctggccagcgccagccagaggcctgtgctcttccactggacaggaggccgctttgaaagaagaacagacatccctgaggctgaagatgtgtatgccaccaggcacttccaggccggaggagatgtgttcctgtgcctgacccgctacatcggggacagcatggtgatgcgctgggatggctccatgttccggctgctgcagcagctgcccagcagaggagcccacgtgttccagcccctgctgattgcccgggaccagctggccatcctgggcagtgactttgccttcagccaggtgctgcggctggagccagacaagggcctgctggagcccctgcaggagctgggccccccagccctggtggccccccgggcctttgcccacatcaccatggccggccgccgcttcctgtttgctgcctgcttcaagggccccacccagatctaccagcaccatgaaattgacctgagcgcctag

SEQ ID NO: 238588 - DNA, 1485 bp, Artificial Sequence
  derived and/or modified sequence
atgggcggggccggcatcctgctgctgctgctggccggggccggcgtggtggtggcctggaggcctcccaagggcaagtgccccctgcgctgcagctgcagcaaggacagcgccctgtgtgagggcagcccagacctgcctgtgtccttcagccccaccctgctgagcctgagcctggtgaggactggagtgacccagctgaaggccggcagcttcctgcgcatccccagcctgcacctgctgctcttcaccagcaacagcttctctgtgattgaagatgatgcctttgctggcctgagccacctgcagtacctgttcatcgaggacaatgagatcggcagcatcagcaagaatgccctgcggggcctgcggagcctgacccacctgagcctggccaacaaccacctggagaccctgccccgcttcctgttccggggcctggacaccctgacccacgtggacctgcggggcaaccccttccagtgtgactgccgggtgctgtggctgctgcagtggatgcccaccgtgaatgcctctgtgggcaccggggcctgtgccggccctgccagcctgagccacatgcagctgcaccacctggaccccaagaccttcaagtgccgggccatcgagctgtcctggttccagacagtgggggagagcgccctgtctgtggagcccttctcctaccagggcgagccccacatcgtgctggcccagccctttgctggccgctgcctgatcctgtcctgggactacagcctgcagcgcttccggcctgaggaggagctgcccggggagcccccaccccggcccagcgcctgcccagctgcctgcctggccggcctgacctgcctgcccaccagcccccagaggcctccctggtgcccagccagccactggtgctgggcccgggccagcagctgctggctgcctgcctgtggcggggcccacagctgtggccctggccctgtgcctgcctgtgcctggccccagaggcggccctggccccggggcggctgctgcggccccatgacccccagcagctgtggctggaagggcaacccagcctcctggtggcccatgccaccccggcgggccgccccccgctgctgtgccgccaccggccctgccttcaccaggacccgggcctgcaccccaggcaccggcaccaggaccctgcggccctggagctggacagctggccccacctgctgctggccccggctgcccagcggcccctgcagcagcactggacctgtggccgccagcagagatgcccagaccagcccccggcccaggatgtccatgccccacgccaccagccggctggtgggcacctgcagctgtgccagccacgccaccctgggcaccccctggagctgtgccggcacagccccctgctttgtgtgctgcagcaacttccccagggctgtgcccaccagcagcagccactgcagcagccctggcacctcctggcccagctag

SEQ ID NO: 238589 - DNA, 1617 bp, Artificial Sequence
  derived and/or modified sequence
atgggcggggccggcatcctgctgctgctgctggccggggccggcgtggtggtggcctggaggcctcccaagggcaagtgccccctgcgctgcagctgcagcaaggacagcgccctgtgtgagggcagcccagacctgcctgtgtccttcagccccaccctgctgagcctgagcctggtgaggactggagtgacccagctgaaggccggcagcttcctgcgcatccccagcctgcacctgctgctcttcaccagcaacagcttctctgtgattgaagatgatgcctttgctggcctgagccacctgcagtacctgttcatcgaggacaatgagatcggcagcatcagcaagaatgccctgcggggcctgcggagcctgacccacctgagcctggccaacaaccacctggagaccctgccccgcttcctgttccggggcctggacaccctgacccacgtggacctgcggggcaaccccttccagtgtgactgccgggtgctgtggctgctgcagtggatgcccaccgtgaatgcctctgtgggcaccggggcctgtgccggccctgccagcctgagccacatgcagctgcaccacctggaccccaagaccttcaagtgccgggccatcgagctgtcctggttccagacagtgggggagagcgccctgtctgtggagcccttctcctaccagggcgagccccacatcgtgctggcccagccctttgctggccgctgcctgatcctgtcctgggactacagcctgcagcgcttccggcctgaggaggagctgcctgctgcctctgtggtgtcctgcaagcccctggtgctgggccccagcctgtttgtgctggccgcccggctgtggggcggcagccagctgtgggcccggcccagccctggcctgcggctggcccccacccagaccctggccccccggcggctgctgcggcccaatgatgctgagctgctgtggctggagggccagccctgctttgtggtggctgatgccagcaaggccggcagcaccaccctgctgtgcagagatggccctggcttctacccccaccagagcctgcacgcctggcaccgggacacagatgctgaggccctggagctggatggccggccccacctgctgctggccagcgccagccagaggcctgtgctcttccactggacaggaggccgctttgaaagaagaacagacatccctgaggctgaagatgtgtatgccaccaggcacttccaggccggaggagatgtgttcctgtgcctgacccgctacatcggggacagcatggtggtgatgcgctgggatggctccatgttccggctgctgcagcagctgcccagcagaggagcccacgtgttccagcccctgctgattgcccgggaccagctggccatcctgggcagtgactttgccttcagccaggtgctgcggctggagccagacaagggcctgctggagcccctgcaggagctgggccccccagccctggtggccccccgggcctttgcccacatcaccatggccggccgccgcttcctgtttgctgcctgcttcaagggccccacccagatctaccagcaccacgagattgacctgagcgcctag

SEQ ID NO: 238590 - DNA, 2814 bp, Artificial Sequence
  derived and/or modified sequence
gccgggtgtccagcgaacccctttcccaaaccttcggggagaagggaggtgggaggaggcaaagaaactacaggcagggagctggaagggggggtggggggggcaggagacaagaaatcaagacaccaggcagcaggacacacacacactcacatacactcacacacatagagaccaacagatagacagctacctaaagcctgaaagactgacagcaacacagaaaaaaagaaacaggcagaaagagagacaaagacagaaatagaaacagactaacacacagagtcaaaaatacagagacagaaagacagggagaaagagaaacagaaaattagacaccaaagacatacgaacagggaggaaggccgactgaaagaaagacggagaagaggagagagaagccagggccgagcgtgccagcaggcggatggagggcggcctggtggaggaggagacgtagtggcctgggctgagctgggtgggccgggagaagcgggtgcctcagagtgggggtgggggcatgggaggggcaggcattctgctgctgctgctggctggggcgggggtggtggtggcctggagacccccaaagggaaagtgtcccctgcgctgctcctgctctaaagacagcgccctgtgtgagggctccccggacctgcccgtcagcttctctccgaccctgctgtcactctcactcgtcaggacgggagtcacccagctgaaggccggcagcttcctgagaattccgtctctgcacctgctcctcttcacctccaactccttctccgtgattgaggacgatgcatttgcgggcctgtcccacctgcagtacctcttcatcgaggacaatgagattggctccatctctaagaatgccctcagaggacttcgctcgcttacacacctaagcctggccaataaccatctggagaccctccccagattcctgttccgaggcctggacacccttactcatgtggacctccgcgggaacccgttccagtgtgactgccgcgtcctctggctcctgcagtggatgcccaccgtgaatgccagcgtggggaccggcgcctgtgcgggccccgcctccctgagccacatgcagctccaccacctcgaccccaagactttcaagtgcagagccatagagctgtcctggttccagacggtgggggagtcggcactgagcgtagagcccttctcctaccaaggggagcctcacattgtgctggcacagcccttcgccggccgctgcctgattctctcctgggactacagcctgcagcgcttccggcccgaggaagagctgcccgcggcctccgtggtgtcctgcaagccactggtgctgggcccgagcctcttcgtgctggctgcccgcctgtgggggggctcacagctgtgggcccggcccagtcccggcctgcgcctggccccaacgcagaccctggccccgcggcggctgctgcggcccaatgacgccgagctcctgtggctggaagggcaaccctgcttcgtggtggccgatgcctccaaggcgggcagcaccacgctgctgtgccgcgacgggcccggcttttacccgcaccagagcctgcacgcctggcaccgggacacggacgctgaggccctggagctggacggccggccccacctgctgctggcctcggcttcccagcggcccgtgctcttccactggaccggtggccgcttcgagagacgcacagacatccccgaggccgaggatgtctatgccacacgccacttccaggctggtggggacgtgttcctgtgcctcacacgctacattggggactccatggtcatgcgctgggacggctccatgtttcgtctgctgcagcaacttccctcgcgcggtgcccacgtcttccagccactgctcatcgccagggaccagctggccatcctaggcagcgacttcgccttcagccaggtcctccgccttgagcctgacaaggggctcctggagccactgcaggagctggggcctccggccctggtggccccccgtgcctttgcccacatcactatggccggcagacgcttcctctttgctgcttgctttaagggccccacacagatctaccagcatcacgagatcgacctcagtgcctgagaccaccaacgggactctgggcatggctggggcccctggacggccccttggctggctcctggccctacttggggtgatggcccgcctgtgagctgctgaccgtgggccacgttcatcagccacacgtctaggccttaagcccacttcttaaaggatctgcacccatggggggacatagagggtcccagcctactggacctcccgagctgcccttcaggtctaaagcaacatctggacatctcggctggggcagattccccatcaaaggcaacctggggggtgcaggctggtgcactgcatggagtcgaggtggaggtcacgtgcagagctccatgaggtcccggagcccccctctcaacccgctcctaccccgctggtccctctgaaagcaccgaggggttgatggcattcctttcccattctaaactccacgcagccaatcgctttcctggaggagcgccaacctcgaagacaactcagcactgggcgggttcccctctgctgcttgtgcgcatgcgtgcggccgcccagcaagctgtgccttttgcgcctcttgcgcgtgcgccggggcacagggagggacagcgggaggtgtcgcggggagcctggtgcccttctagatgggcgacggaggcaaggacaagacgagtccgagctcaataaatgcgctgtgcaccctc

SEQ ID NO: 238591 - DNA, 2891 bp, Artificial Sequence
  derived and/or modified sequence
gccgggtgtccagcgaacccctttcccaaaccttcggggagaagggaggtgggaggaggcaaagaaactacaggcagggagctggaagggggggtggggggggcaggagacaagaaatcaagacaccaggcagcaggacacacacacactcacatacactcacacacatagagaccaacagatagacagctacctaaagcctgaaagactgacagcaacacagaaaaaaagaaacaggcagaaagagagacaaagacagaaatagaaacagactaacacacagagtcaaaaatacagagacagaaagacagggagaaagagaaacagaaaattagacaccaaagacatacgaacagggaggaaggccgactgaaagaaagacggagaagaggagagagaagccagggccgagcgtgccagcaggcggatggagggcggcctggtggaggaggagacgtagtggcctgggctgagctgggtgggccgggagaagcgggtgcctcagagtgggggtgggggcatgggaggggcaggcattctgctgctgctgctggctggggcgggggtggtggtggcctggagacccccaaagggaaagtgtcccctgcgctgctcctgctctaaagacagcgccctgtgtgagggctccccggacctgcccgtcagcttctctccgaccctgctgtcactctcactcgtcaggacgggagtcacccagctgaaggccggcagcttcctgagaattccgtctctgcacctgctcctcttcacctccaactccttctccgtgattgaggacgatgcatttgcgggcctgtcccacctgcagtacctcttcatcgaggacaatgagattggctccatctctaagaatgccctcagaggacttcgctcgcttacacacctaagcctggccaataaccatctggagaccctccccagattcctgttccgaggcctggacacccttactcatgtggacctccgcgggaacccgttccagtgtgactgccgcgtcctctggctcctgcagtggatgcccaccgtgaatgccagcgtggggaccggcgcctgtgcgggccccgcctccctgagccacatgcagctccaccacctcgaccccaagactttcaagtgcagagccatagagctgtcctggttccagacggtgggggagtcggcactgagcgtagagcccttctcctaccaaggggagcctcacattgtgctggcacagcccttcgccggccgctgcctgattctctcctgggactacagcctgcagcgcttccggcccgaggaagagctgcccggtgagccccctccccgtccttctgcctgtccagcagcctgcctggctggcctgacctgcctccccacctccccacagcggcctccgtggtgtcctgcaagccactggtgctgggcccgagcctcttcgtgctggctgcccgcctgtgggggggctcacagctgtgggcccggcccagtcccggcctgcgcctggccccaacgcagaccctggccccgcggcggctgctgcggcccaatgacgccgagctcctgtggctggaagggcaaccctgcttcgtggtggccgatgcctccaaggcgggcagcaccacgctgctgtgccgcgacgggcccggcttttacccgcaccagagcctgcacgcctggcaccgggacacggacgctgaggccctggagctggacggccggccccacctgctgctggcctcggcttcccagcggcccgtgctcttccactggaccggtggccgcttcgagagacgcacagacatccccgaggccgaggatgtctatgccacacgccacttccaggctggtggggacgtgttcctgtgcctcacacgctacattggggactccatggtcatgcgctgggacggctccatgtttcgtctgctgcagcaacttccctcgcgcggtgcccacgtcttccagccactgctcatcgccagggaccagctggccatcctaggcagcgacttcgccttcagccaggtcctccgccttgagcctgacaaggggctcctggagccactgcaggagctggggcctccggccctggtggccccccgtgcctttgcccacatcactatggccggcagacgcttcctctttgctgcttgctttaagggccccacacagatctaccagcatcacgagatcgacctcagtgcctgagaccaccaacgggactctgggcatggctggggcccctggacggccccttggctggctcctggccctacttggggtgatggcccgcctgtgagctgctgaccgtgggccacgttcatcagccacacgtctaggccttaagcccacttcttaaaggatctgcacccatggggggacatagagggtcccagcctactggacctcccgagctgcccttcaggtctaaagcaacatctggacatctcggctggggcagattccccatcaaaggcaacctggggggtgcaggctggtgcactgcatggagtcgaggtggaggtcacgtgcagagctccatgaggtcccggagcccccctctcaacccgctcctaccccgctggtccctctgaaagcaccgaggggttgatggcattcctttcccattctaaactccacgcagccaatcgctttcctggaggagcgccaacctcgaagacaactcagcactgggcgggttcccctctgctgcttgtgcgcatgcgtgcggccgcccagcaagctgtgccttttgcgcctcttgcgcgtgcgccggggcacagggagggacagcgggaggtgtcgcggggagcctggtgcccttctagatgggcgacggaggcaaggacaagacgagtccgagctcaataaatgcgctgtgcaccctc

SEQ ID NO: 238592 - DNA, 2891 bp, Artificial Sequence
  derived and/or modified sequence
agtcccttcccccaaggccgaccttctcatggcctctgaccccctcctccttcccatcctactctgccgggtgtgccgggtgtccagcgaacccctttcccaaaccttcggggagaagggaggtgggaggaggcaaagaaactacaggcagggagctggaagggggggtggggggggcaggagacaagaaatcaagacaccaggcagcaggacacacacacactcacatacactcacacacatagagaccaacagatagacagctacctaaagcctgaaagactgacagcaacacagaaaaaaagaaacaggcagaaagagagacaaagacagaaatagaaacagactaacacacagagtcaaaaatacagagacagaaagacagggagaaagagaaacagaaaattagacaccaaagacatacgaacagggaggaaggccgactgaaagaaagacggagaagaggagagagaagccagggccgagcgtgccagcaggcggatggagggcggcctggtggaggaggagacgtagtggcctgggctgagctgggtgggccgggagaagcgggtgcctcagagtgggggtgggggcatgggaggggcaggcattctgctgctgctgctggctggggcgggggtggtggtggcctggagacccccaaagggaaagtgtcccctgcgctgctcctgctctaaagacagcgccctgtgtgagggctccccggacctgcccgtcagcttctctccgaccctgctgtcactctcactcgtcaggacgggagtcacccagctgaaggccggcagcttcctgagaattccgtctctgcacctgctcctcttcacctccaactccttctccgtgattgaggacgatgcatttgcgggcctgtcccacctgcagtacctcttcatcgaggacaatgagattggctccatctctaagaatgccctcagaggacttcgctcgcttacacacctaagcctggccaataaccatctggagaccctccccagattcctgttccgaggcctggacacccttactcatgtggacctccgcgggaacccgttccagtgtgactgccgcgtcctctggctcctgcagtggatgcccaccgtgaatgccagcgtggggaccggcgcctgtgcgggccccgcctccctgagccacatgcagctccaccacctcgaccccaagactttcaagtgcagagccatagagctgtcctggttccagacggtgggggagtcggcactgagcgtagagcccttctcctaccaaggggagcctcacattgtgctggcacagcccttcgccggccgctgcctgattctctcctgggactacagcctgcagcgcttccggcccgaggaagagctgcccgcggcctccgtggtgtcctgcaagccactggtgctgggcccgagcctcttcgtgctggctgcccgcctgtgggggggctcacagctgtgggcccggcccagtcccggcctgcgcctggccccaacgcagaccctggccccgcggcggctgctgcggcccaatgacgccgagctcctgtggctggaagggcaaccctgcttcgtggtggccgatgcctccaaggcgggcagcaccacgctgctgtgccgcgacgggcccggcttttacccgcaccagagcctgcacgcctggcaccgggacacggacgctgaggccctggagctggacggccggccccacctgctgctggcctcggcttcccagcggcccgtgctcttccactggaccggtggccgcttcgagagacgcacagacatccccgaggccgaggatgtctatgccacacgccacttccaggctggtggggacgtgttcctgtgcctcacacgctacattggggactccatggtggtcatgcgctgggacggctccatgtttcgtctgctgcagcaacttccctcgcgcggtgcccacgtcttccagccactgctcatcgccagggaccagctggccatcctaggcagcgacttcgccttcagccaggtcctccgccttgagcctgacaaggggctcctggagccactgcaggagctggggcctccggccctggtggccccccgtgcctttgcccacatcactatggccggcagacgcttcctctttgctgcttgctttaagggccccacacagatctaccagcatcacgagatcgacctcagtgcctgagaccaccaacgggactctgggcatggctggggcccctggacggccccttggctggctcctggccctacttggggtgatggcccgcctgtgagctgctgaccgtgggccacgttcatcagccacacgtctaggccttaagcccacttcttaaaggatctgcacccatggggggacatagagggtcccagcctactggacctcccgagctgcccttcaggtctaaagcaacatctggacatctcggctggggcagattccccatcaaaggcaacctggggggtgcaggctggtgcactgcatggagtcgaggtggaggtcacgtgcagagctccatgaggtcccggagcccccctctcaacccgctcctaccccgctggtccctctgaaagcaccgaggggttgatggcattcctttcccattctaaactccacgcagccaatcgctttcctggaggagcgccaacctcgaagacaactcagcactgggcgggttcccctctgctgcttgtgcgcatgcgtgcggccgcccagcaagctgtgccttttgcgcctcttgcgcgtgcgccggggcacagggagggacagcgggaggtgtcgcggggagcctggtgcccttctagatgggcgacggaggcaaggacaagacgagtccgagctcaataaatgcgctgtgcaccctc

SEQ ID NO: 238593 - DNA, 1614 bp, Artificial Sequence
  derived and/or modified sequence
atgggcggcgccggcatcctgctgctgctgctggccggcgccggcgtggtcgtcgcttggaggcctcctaagggtaagtgtcccttaaggtgttcttgttcaaaagactcagccctttgcgaagggtctcccgacctacccgtgtcttttagcccgaccttactcagcttgagtttggttagaacgggcgtaacccaacttaaggccgggagctttcttcggattccttccctccacttgctgcttttcacgtctaacagtttctcagtcatcgaggatgacgcctttgctggactttcacacttgcagtaccttttcatcgaggataatgaaatcggcagcatctcgaaaaatgcgctgcgcggtctgaggagtctgacgcacctcagcttggctaacaaccacttagagacgctgccgcgtttcctcttccggggactggacactcttacccacgtggatttacgaggaaacccattccagtgcgactgccgagttctctggctccttcagtggatgcccaccgtcaacgcatcggtgggcacaggtgcctgcgctgggcctgcctctctcagtcacatgcagctgcaccatctggatcctaagaccttcaagtgccgcgctatcgaactctcttggtttcagactgtcggcgaatccgcacttagtgtcgaaccatttagctatcaaggcgaaccgcacatcgtcctggcccagccttttgcaggccggtgtctgattttatcatgggactacagcctgcaacgtttcagacccgaggaggagcttcctgctgcgagcgtggtttcatgcaagccactggtcctggggccatcccttttcgttctggccgccagactttggggagggtctcagctatgggcaagaccctctccaggtttgcggctggcacccactcagacactggccccaaggcggctattaaggccaaacgatgccgaactcctatggctcgaaggacaaccatgcttcgttgtggccgatgcttctaaagcagggtcaacaacgctgctctgcagagacgggcctggcttttatccccaccagtctctacacgcatggcatcgggacaccgatgcagaagccctggagcttgacggtcggccccatctccttctggccagcgcctctcagcggcctgtgctgtttcattggacaggcggcaggtttgagcgccggacggatatccccgaggctgaggacgtctatgcaacgagacatttccaggcaggtggagatgttttcctctgtctgaccagatacattggggattccatggttatgcgctgggacggaagcatgttcagattgttacagcagctgccctcacgaggggctcatgtctttcaacccctccttattgcccgggaccaacttgccatactggggtccgactttgcttttagccaggttttaagactggaaccagacaaaggcttgctggagcctttgcaggagctgggtcccccagccttggtcgcaccccgtgcctttgcccacattactatggccggcaggagattcctctttgcagcctgctttaaaggtcccacgcagatttatcaacatcatgagatcgacctgtctgcctag

SEQ ID NO: 238594 - DNA, 1485 bp, Artificial Sequence
  derived and/or modified sequence
atgggcggcgccggcatcctgctgctgctgctggccggcgccggcgtggtggtggcttggcgaccaccaaagggtaaatgcccccttcggtgcagctgctcaaaggactcagccctgtgcgagggctcccccgacctgcccgtgagcttcagcccaaccctcctgtcactctctcttgtgcgcaccggagtgacacaactcaaggcaggcagttttctccgaattccttctctgcacctccttctgttcacctcaaatagcttctcagtgatcgaagatgatgccttcgcaggcctgtcgcacttgcagtatcttttcatcgaagacaatgaaattggtagcatcagcaagaatgccctcaggggcctcaggtcactcacacacctctccttagctaacaaccatctggaaaccctaccacggtttctcttccgaggcctggacacactcacgcacgtcgacttgcgtgggaacccatttcagtgtgactgcagagtcctttggcttctccaatggatgcccactgtaaatgccagcgtaggaacaggagcctgcgctggcccagcttcattgtcacatatgcagcttcatcacttggacccaaagaccttcaagtgtcgagctatagagttgtcctggtttcagactgtcggggaaagcgctctgtcagttgagcctttttcttaccaaggagagccccacatcgtgcttgctcaacctttcgccggcaggtgtctgattctgagttgggactatagcctgcaaaggtttcgccctgaagaagaactgcctggcgagccgccaccaagaccatccgcctgtcctgcagcgtgcctcgccggactgacctgtttaccaacatccccgcaaaggccgccctggtgccccgcttctcattggtgttgggcccgggcgtcctcctgctggctgcctgcctgtggaggagctcattcttgtgggcctggtcctgtcccggcctgtgcttggccccagaggcgcccttggccacgggggggttgctgcggcccaatgactccatcatcttgtggttggaagggtaaccctgcttcttggtggcctatgccacctaggagagcagcacccagatgttgtgctgctaccggtcccgcttttactagaacgagggcctgcacaccggggacagggactcgaaccctacgcccctggtcatggaccgcgggccctacttgctgttggcccagactgccctccgggccatgtagttcaactgggccagtcgccgcctcccgggacgcgcagacctcccccagaccgagaatgagcatgccacatgccacatcacggcttgtaggaacttgctcgtgtgcttctcatgccacattgggaactccatggagttgcgctggaacagctccctgctttgtgtgttgttctaacttcccccgagctgtaccaactagtagtagccactgctcgtcccccgggacaagttggccctcttag

SEQ ID NO: 238595 - DNA, 1617 bp, Artificial Sequence
  derived and/or modified sequence
atgggcggcgccggcatcctgctgctgctgctggccggcgccggcgttgtggtggcctggaggccgcccaagggcaaatgtcccctacggtgctcttgctccaaagacagcgccctttgtgaaggttctcctgatctgccagttagtttcagcccaacccttctgtccttgagtctggtgcgcacaggagtcacccagctgaaagcaggcagcttcctacggatcccgtctctgcatctgctcctcttcacatcgaacagctttagtgtgatcgaagacgatgccttcgctgggctctcccaccttcagtacctcttcattgaggacaatgaaatcggttccatatcaaagaatgcactgcgaggactaaggagtctcacacatctgtccctggctaacaaccatcttgaaacccttccacgtttccttttccgcggactcgataccctgacgcacgtcgacttacgggggaaccccttccaatgcgactgccgcgtgttatggcttcttcagtggatgccaacagtgaatgcatcagtggggactggggcatgcgccgggcccgcaagcctgtctcacatgcagctgcatcatctggatccaaaaaccttcaagtgtcgggcaattgagctaagctggtttcagacagtgggcgagtcagctctaagtgtcgagccattcagctatcagggagagccgcatatcgtgttggctcagcccttcgcaggaaggtgcttaatcctctcatgggactactctctgcagaggtttagaccagaggaagagttgccagccgcctcagtcgtcagctgcaagcccttggtgcttgggccctctctgtttgtgctggctgctcgattgtggggtggctctcagctatgggcgaggccctcccccggcttgcggctggcacctacacaaactttagccccacgtcgtttgcttcgcccgaacgatgccgaactgctgtggctcgaggggcagccctgtttcgtggtggcagacgcaagcaaagctggctcaaccacgctactgtgccgtgacggccccgggttttacccccaccagtcactccacgcttggcatcgagacaccgatgccgaagcgctggagctggatggacggccccatcttctgttggcttccgcttctcagcggccagtgctgtttcattggactggcgggcggtttgaacgaaggaccgatatccctgaagcggaggacgtgtacgctacaaggcatttccaggccggtggcgacgttttcctatgccttacgcgatatataggagactcgatggtggttatgagatgggacggcagcatgttcagactgctccagcagctcccgtctaggggagcacacgtgtttcagccacttctgatcgcacgggatcagctggccattttggggtctgattttgccttttcccaagtactaagactggaaccagacaaagggcttctcgagccactgcaggaattgggtccacccgccctagttgcaccccgggccttcgcccatatcaccatggccgggcgcaggtttctattcgcggcctgtttcaagggccctacacagatctaccagcatcatgagatcgatcttagtgcctag

SEQ ID NO: 238596 - DNA, 1614 bp, Artificial Sequence
  derived and/or modified sequence
atggggggtgccggaatcctgctgctgctactagccggtgccggagtggtggtggcttggcggccaccgaagggaaaatgccctctgagatgcagttgtagcaaagattctgccctgtgcgagggctcccccgacttacccgtgagcttcagcccaaccctgctttcattaagcctagtgcggacgggtgtaacccagctcaaagccggttccttcctgcgcatacctagcctccacttgcttctttttactagcaacagcttttcagtcatcgaagatgacgctttcgccggactctcccatctgcagtatctcttcattgaagacaatgaaattggttcaatatccaaaaacgcccttcgaggtctacgctctctcacccacctgtctctcgcaaataaccatttggaaacactgccacgtttcctgttccgcggtctggacacacttacccacgtggatcttcgaggtaatccctttcagtgcgactgcagggttctgtggctgttacagtggatgccgacagtcaacgctagcgtggggactggcgcatgcgcaggaccagcatcgttgagccacatgcagcttcatcaccttgatccgaagacgttcaagtgtagagcaatcgaactgtcatggttccagactgtgggcgagagcgccctgtcggtggagcctttcagctaccagggcgagccgcacatcgttctcgcgcagccctttgctgggagatgtctcatccttagttgggactattcactccagcgctttcggcctgaagaagagttgccagcagcctccgtggtgtcttgcaaacccctcgtgctcggtccttccctgttcgtactggcagcccgtctgtggggagggagtcagctgtgggcccgtccttcccctggacttcggctggcacccacccagactctcgcacccagaaggctgctgaggccaaacgacgcggagttgctatggctggaggggcaaccatgtttcgttgtcgctgacgcaagtaaagcgggaagcaccacactgctgtgccgagatgggcctgggttttatcctcatcagagccttcacgcgtggcacagagacacagacgctgaggctctcgagttagacggcagaccccacttgttgctggcatcagcctcccagagacctgtactgtttcattggacagggggacggtttgagaggcgcacggacattcccgaggctgaagacgtttatgcaacgcgacacttccaagccggaggggacgtcttcctatgccttacccgctatatcggcgacagtatggtgatgcggtgggatggcagcatgtttcgactcctccagcagctgccttcaagaggagctcatgtctttcagccccttttgatcgcccgtgaccagctggccatcctagggtcagatttcgcattttctcaggttctacggctggagccagacaagggattactggagccgcttcaggaactgggtccaccggctctggtggcacctcgtgcgttcgctcacatcacaatggctggacggagatttctctttgcagcatgtttcaagggacctacacagatttatcagcatcacgaaattgacctcagtgcctag

SEQ ID NO: 238597 - DNA, 1485 bp, Artificial Sequence
  derived and/or modified sequence
atgggcggagccggtatcctcctgctgctgctggccggagccggtgtcgtcgtggcatggaggcctccaaaaggtaaatgtccactcagatgtagctgcagtaaagatagcgcactgtgcgagggatctccagacctgccggtcagcttctccccgactcttttgtccctcagtctcgtgagaactggcgtgacacagctgaaggcgggaagttttttgcgaatcccctcgctgcatctgctcctcttcacaagcaacagctttagtgtgattgaggatgatgccttcgcaggcctctcccacttacagtatctgttcattgaagacaatgagattggatccatttctaaaaatgccctgcgcggtctgcggtcactgacacacctgtctctcgccaataaccatttggagacactgccaagatttctcttcagaggcctggacacactaacccacgtagaccttagggggaaccctttccaatgtgattgccgcgttttgtggttactgcagtggatgccgactgtaaatgcctcggtgggcaccggcgcatgtgcgggaccggctagtcttagtcatatgcaactccaccatctggaccctaaaaccttcaaatgtcgtgctatcgagctctcttggttccagacagtgggagagtctgctctcagtgtcgaaccatttagttaccagggagagccacacattgtactagctcaacctttcgccggacgatgcctcattctctcttgggattacagccttcagcgctttaggccagaggaagagttacctggcgaacctccccctaggccgtcagcgtgtccagcagcctgtctcgctgggctgacctgccttcccacgagcccccagcgcccaccttggtgtcctgcctcccactggtgctgggcgagggctagctcctgctggctgccagcttgcggcggagctcatagttgcggcccaggacctgtgccagcgtgcgcttggcctcaaagaaggccttggccaagaggaggatgttgcggccctatgacaccctcctcgtgtggttggaagggtaacccagcatcctggtggccaatgccccctcgcagggcagctcccaggtgctgcgcagcaacaggtccggcttttactcgtactcgagcctgtaccccaggcacaggtaccaggaccctccgtccatggtcttggaccgctggccctacttgctgctggccccgattgccaagcggcccttgttcctcgacagggcctgtcgccgctagcagagacgctcagacatccccgaggccacgaatgagcatgccccacgctaccagtcgccttgtgggtacatgttcgtgcgcaagccacgccaccctgggaaccccatggtcttgcgcaggaaccgccccatgtttcgtgtgctgcagtaacttcccgagggccgtacctacctcatcatcgcactgtagtagccctggcaccagctggccaagctag

SEQ ID NO: 238598 - DNA, 1617 bp, Artificial Sequence
  derived and/or modified sequence
atggggggtgccggaatactgctcttactgcttgccggagcaggagttgttgtcgcttggaggccacccaagggcaaatgtcccctcagatgctcttgctctaaagacagcgcattgtgtgaaggttcccccgatctgcccgtgtcgttcagccccactttgctcagcttgagcctggtacgaactggggtgacccagttgaaggccggaagctttctgcgcatcccttcactccatctattactctttacatcgaattccttcagtgtaatcgaggacgatgcattcgccggattgtctcatctccagtatctcttcattgaggacaacgagatcggatcgattagcaagaatgccctgcgcggtcttcgctccctgacacatctgtctttggctaataaccacctcgaaaccttgcctcggtttctgtttcgcggattggataccctcacacacgtagatctgagagggaacccattccagtgcgactgccgcgtattgtggctactgcagtggatgcccaccgtcaatgcctcagttgggactggcgcttgcgcaggtcccgcttccctgagccacatgcagctgcaccatctggaccctaagacatttaagtgtcgggctatcgagctgtcttggttccaaacagttggggagagtgcactctcagtggagccattcagttaccagggggaaccacacatagtcctggcccagccctttgcaggccgatgcttgatcctctcctgggattactctctgcagcggtttcgtcctgaggaagagcttcctgcagcctctgtggtgtcctgtaagccgctcgtactgggtcccagcttgtttgtcctggctgcgaggttatggggagggagccagttatgggcgaggccatcacccggacttaggctcgctcccactcagacacttgctcctagacggcttctcaggcctaatgatgccgagcttctatggctggaggggcaaccatgctttgtggtagccgacgcgagcaaagcaggctccactacccttctgtgtagggacggacctggattttatccacaccagtccttacacgcatggcaccgtgacactgatgccgaggccttggagttggacggaagaccacatctgctcctggccagtgcttcacagaggccagtcctcttccactggacaggagggcgtttcgaacgtcgcaccgatattcccgaggcagaggatgtttatgccacacgccattttcaggccggaggagatgtttttttgtgcctgacgcgctatataggggatagtatggtggtgatgcgctgggatggctcaatgttcaggctgttgcagcagctcccgagccgaggagcacacgtgtttcagccactgctgattgcccgagaccagttagctatcctagggtcagattttgcttttagccaggtgctgcgcctggagcccgacaagggcctgctcgagccattgcaggagctcggcccaccagctcttgtggcgccacgggcatttgcgcacataaccatggctggacgacgcttcctcttcgcagcttgctttaaaggccctacccagatttaccagcatcacgaaatcgatctgagtgcttag

SEQ ID NO: 238599 - DNA, 1614 bp, Artificial Sequence
  derived and/or modified sequence
atgggcggcgccggcatcctgctgctgctgctggccggcgccggcgtggtggtggcctggagaccccccaagggcaagtgccccctgagatgcagctgcagcaaggacagcgccctgtgcgagggcagccccgacctgcccgtgagcttcagccccaccctgctgagcctgagcctggtgagaaccggcgtgacccagctgaaggccggcagcttcctgagaatccccagcctgcacctgctgctgttcaccagcaacagcttcagcgtgatcgaggacgacgccttcgccggcctgagccacctgcagtacctgttcatcgaggacaacgagatcggcagcatcagcaagaacgccctgagaggcctgagaagcctgacccacctgagcctggccaacaaccacctggagaccctgcccagattcctgttcagaggcctggacaccctgacccacgtggacctgagaggcaaccccttccagtgcgactgcagagtgctgtggctgctgcagtggatgcccaccgtgaacgccagcgtgggcaccggcgcctgcgccggccccgccagcctgagccacatgcagctgcaccacctggaccccaagaccttcaagtgcagagccatcgagctgagctggttccagaccgtgggcgagagcgccctgagcgtggagcccttcagctaccagggcgagccccacatcgtgctggcccagcccttcgccggcagatgcctgatcctgagctgggactacagcctgcagagattcagacccgaggaggagctgcccgccgccagcgtggtgagctgcaagcccctggtgctgggccccagcctgttcgtgctggccgccagactgtggggcggcagccagctgtgggccagacccagccccggcctgagactggcccccacccagaccctggcccccagaagactgctgagacccaacgacgccgagctgctgtggctggagggccagccctgcttcgtggtggccgacgccagcaaggccggcagcaccaccctgctgtgcagagacggccccggcttctacccccaccagagcctgcacgcctggcacagagacaccgacgccgaggccctggagctggacggcagaccccacctgctgctggccagcgccagccagagacccgtgctgttccactggaccggcggcagattcgagagaagaaccgacatccccgaggccgaggacgtgtacgccaccagacacttccaggccggcggcgacgtgttcctgtgcctgaccagatacatcggcgacagcatggtgatgagatgggacggcagcatgttcagactgctgcagcagctgcccagcagaggcgcccacgtgttccagcccctgctgatcgccagagaccagctggccatcctgggcagcgacttcgccttcagccaggtgctgagactggagcccgacaagggcctgctggagcccctgcaggagctgggcccccccgccctggtggcccccagagccttcgcccacatcaccatggccggcagaagattcctgttcgccgcctgcttcaagggccccacccagatctaccagcaccacgagatcgacctgagcgcctag

SEQ ID NO: 238600 - DNA, 1485 bp, Artificial Sequence
  derived and/or modified sequence
atgggcggcgccggcatcctgctgctgctgctggccggcgccggcgtggtggtggcctggagaccccccaagggcaagtgccccctgagatgcagctgcagcaaggacagcgccctgtgcgagggcagccccgacctgcccgtgagcttcagccccaccctgctgagcctgagcctggtgagaaccggcgtgacccagctgaaggccggcagcttcctgagaatccccagcctgcacctgctgctgttcaccagcaacagcttcagcgtgatcgaggacgacgccttcgccggcctgagccacctgcagtacctgttcatcgaggacaacgagatcggcagcatcagcaagaacgccctgagaggcctgagaagcctgacccacctgagcctggccaacaaccacctggagaccctgcccagattcctgttcagaggcctggacaccctgacccacgtggacctgagaggcaaccccttccagtgcgactgcagagtgctgtggctgctgcagtggatgcccaccgtgaacgccagcgtgggcaccggcgcctgcgccggccccgccagcctgagccacatgcagctgcaccacctggaccccaagaccttcaagtgcagagccatcgagctgagctggttccagaccgtgggcgagagcgccctgagcgtggagcccttcagctaccagggcgagccccacatcgtgctggcccagcccttcgccggcagatgcctgatcctgagctgggactacagcctgcagagattcagacccgaggaggagctgcccggcgagcccccccccagacccagcgcctgccccgccgcctgcctggccggcctgacctgcctgcccaccagcccccagagacccccctggtgccccgccagccactggtgctgggccagagccagcagctgctggctgcccgcctgcggcggcgcccacagctgcggccccggccccgtgcccgcctgcgcctggccccagagaagaccctggcccagaggcggctgctgcggccccatgacccccagcagctgcggctggaagggcaaccccgccagctggtggcccatgccccccagaagagccgcccccagatgctgcgccgccaccggccccgccttcaccagaaccagagcctgcacccccggcaccggcaccagaaccctgagaccctggagctggaccgccggccccacctgctgctggcccagactgcccagcggcccctgcagcagcaccggccccgtggccgccagcagagacgcccagaccagccccagacccagaatgagcatgccccacgccaccagcagactggtgggcacctgcagctgcgccagccacgccaccctgggcaccccctggagctgcgccggcaccgccccctgcttcgtgtgctgcagcaacttccccagagccgtgcccaccagcagcagccactgcagcagccccggcaccagctggcccagctag

SEQ ID NO: 238601 - DNA, 1617 bp, Artificial Sequence
  derived and/or modified sequence
atgggcggcgccggcatcctgctgctgctgctggccggcgccggcgtggtggtggcctggagaccccccaagggcaagtgccccctgagatgcagctgcagcaaggacagcgccctgtgcgagggcagccccgacctgcccgtgagcttcagccccaccctgctgagcctgagcctggtgagaaccggcgtgacccagctgaaggccggcagcttcctgagaatccccagcctgcacctgctgctgttcaccagcaacagcttcagcgtgatcgaggacgacgccttcgccggcctgagccacctgcagtacctgttcatcgaggacaacgagatcggcagcatcagcaagaacgccctgagaggcctgagaagcctgacccacctgagcctggccaacaaccacctggagaccctgcccagattcctgttcagaggcctggacaccctgacccacgtggacctgagaggcaaccccttccagtgcgactgcagagtgctgtggctgctgcagtggatgcccaccgtgaacgccagcgtgggcaccggcgcctgcgccggccccgccagcctgagccacatgcagctgcaccacctggaccccaagaccttcaagtgcagagccatcgagctgagctggttccagaccgtgggcgagagcgccctgagcgtggagcccttcagctaccagggcgagccccacatcgtgctggcccagcccttcgccggcagatgcctgatcctgagctgggactacagcctgcagagattcagacccgaggaggagctgcccgccgccagcgtggtgagctgcaagcccctggtgctgggccccagcctgttcgtgctggccgccagactgtggggcggcagccagctgtgggccagacccagccccggcctgagactggcccccacccagaccctggcccccagaagactgctgagacccaacgacgccgagctgctgtggctggagggccagccctgcttcgtggtggccgacgccagcaaggccggcagcaccaccctgctgtgcagagacggccccggcttctacccccaccagagcctgcacgcctggcacagagacaccgacgccgaggccctggagctggacggcagaccccacctgctgctggccagcgccagccagagacccgtgctgttccactggaccggcggcagattcgagagaagaaccgacatccccgaggccgaggacgtgtacgccaccagacacttccaggccggcggcgacgtgttcctgtgcctgaccagatacatcggcgacagcatggtggtgatgagatgggacggcagcatgttcagactgctgcagcagctgcccagcagaggcgcccacgtgttccagcccctgctgatcgccagagaccagctggccatcctgggcagcgacttcgccttcagccaggtgctgagactggagcccgacaagggcctgctggagcccctgcaggagctgggcccccccgccctggtggcccccagagccttcgcccacatcaccatggccggcagaagattcctgttcgccgcctgcttcaagggccccacccagatctaccagcaccacgagatcgacctgagcgcctag

SEQ ID NO: 238602 - DNA, 1416 bp, Artificial Sequence
  derived and/or modified sequence
atgagtgacgatatcgactggttgcgaagtcataggggggtctgcaaagtggacctgtacaaccccgaaggtcaacaggatcaggaccggaaggtgatttgttttgtcgacgtgtcgacactgaatgtggaagataaagattataaggatgccgccagctcaagcagcgaggggaacttgaatctgggctcactcgaagaaaaagagattattgtaattaaggacacggaaaaaaaagatcagagcaaaaccgaagggtccgtgtgtctgttcaagcaggctccttcggatcctgtttctgtattgaattggttgctgagtgacttacagaagtacgctctgggcttccagcatgcactgtctccctctacttcaacatgcaagcataaagtgggggatacagaaggcgaataccacagggctagtagcgagaattgctatagtgtgtacgcagaccaagtcaatatagattacctgatgaacagacctcagaatctgaggctggagatgaccgctgctaagaacaccaataataaccagaatacttgcgaagaggactgtcctggctccaccatgggttacatggcacagagtacacagtacgagaaatgtggtgggggccagagcgccaaagccctgagcgtgaaacagctggaatcacacagggcccctggcccttcaacctgccagaaagaaaaccaacacttggattctcagaaaatggacatgagcaatatcgtcctcatgcttatccagaagcttttgaacgaaaatccttttaagtgcgaagatccctgtgagggagagaataagtgttcagaaccgcgtgcctcaaaggccgcctcaatgtccaacaggtccgacaaagcagaagaacagtgtcaagaacaccaagaattagactgtacgtcgggcatgaaacaggccaacggacagttcatagacaaactggttgaatcagttatgaagctgtgccttataatggctaaatatagtaacgatggtgccgccttggctgagctggaagaacaagccgcgtctgccaataaacctaacttcagaggtacaaggtgcatccactcaggggcaatgccgcagaactaccaggattccctgggccatgaagttatcgtgaataaccagtgtagtaccaacagcctgcagaagcagctccaggccgtcctacagtggatcgccgcgtctcaattcaacgtgcctatgctgtacttcatgggagacaaggacggacagttagaaaaactcccgcaggtgagcgcaaaggcagccgaaaaggggtatagtgtggggggcctgctacaggaggtgatgaaattcgctaaggaaaggcagcctgacgaggccgttggaaaggtcgcaaggaagcaactgctggactggctactggccaatctttag

SEQ ID NO: 238603 - DNA, 765 bp, Artificial Sequence
  derived and/or modified sequence
atgtccgatgacattgactggttgcggagccaccgcggcgtatgcaaggtcgatttgtataaccccgagggccagcaggaccaggacagaaaggtgatttgcttcgtggacgtcagcacgctcaatgtcgaggacaaggattacaaggacgccgcatcttcttcctctgaaggaaatcttaatctgggctcactggaggagaaagaaattatagtgataaaggatacagaaaaaaaggaccagtctaagactgaaggcagcgtatgtctgttcaaacaagccccatctgatcctgtctccgttctgaattggctgctgtccgaccttcagaaatacgctctgggttttcaacacgcactatctccctccacctcgacctgcaaacacaaagtgggggatacagaaggcgagtaccatcgtgccagctcagaaaattgctactccgtttatgcggaccaggtgaatatcgactacctcatgaaccgtccccaaaatctgcgtttggaaatgactgcagcaaagaataccaataataaccagtccccgagtgctcccccggctaaacctccatccactcaacgcgctgtgatcagcccggacggggagtgctccatcgacgacctgtctttctatgtgaatcggctgtcctctcttgtcatacagatggctcataaggaaatcaaggagaaactggaggggaaatcaaaatgccttcaccattcaatttgcccatctccaggcaataaagagaggatctctccttag

SEQ ID NO: 238604 - DNA, 642 bp, Artificial Sequence
  derived and/or modified sequence
atgtccgatgatattgattggctgcgctctcaccggggagtttgcaaggtcgacctctataatccagaagggcaacaggaccaagaccgcaaggtgatctgttttgtggacgtctcaacgctgaacgtagaagacaaagactacaaagatgcggcttcatcgtcctctgagggaaacctgaatctgggaagtctggaagaaaaggaaatcattgtgattaaggacaccgaaaagaaagatcagagcaaaacagaaggctccgtgtgcctgtttaaacaggccccaagtgacccagtgtccgtgctcaattggctgctctccgatctccagaaatatgctctcggctttcaacatgcgttaagtcctagtacatctacatgtaagcacaaagtcggtgataccgagggcgagtaccatagggcctcatccgaaaattgctactccgtatatgctgatcaggtgaatattgattatctaatgaacagaccgcaaaatctgagactggagatgacggctgctaagaataccaataacaaccagaatacttgcgaggaggactgtcctggatcaacaatgggttacatggcacagtctacccagtacgagaaatgcgggggagggcaatccgccaaggccctgtag

SEQ ID NO: 238605 - DNA, 1416 bp, Artificial Sequence
  derived and/or modified sequence
atgtctgatgacatcgactggctgcggagccacagaggagtgtgcaaggtggacctgtacaaccctgagggccagcaggaccaggacaggaaggtgatctgctttgtggatgtgtccaccctgaatgtggaggacaaggactacaaggatgctgccagcagcagcagcgagggcaacctgaacctgggcagcctggaggagaaggagatcatcgtcatcaaggacacagagaagaaggaccagagcaagacagagggctctgtgtgcctcttcaagcaggcccccagcgaccctgtgtctgtgctgaactggctgctgagtgacctgcagaagtatgccctgggcttccagcacgccctgagccccagcaccagcacctgcaagcacaaggtgggggacacagaaggagagtaccaccgggccagcagcgagaactgctacagcgtgtatgctgaccaggtgaacatcgactacctgatgaaccggccccagaacctgcggctggagatgacagctgccaagaacaccaacaacaaccagaacacctgtgaggaggactgccccggcagcaccatgggctacatggcccagagcacccagtatgaaaaatgtggcggcggccagagcgccaaggccctgtctgtgaagcagctggagagccaccgggcccctggccccagcacctgccagaaggagaaccagcacctggacagccagaagatggacatgagcaacatcgtgctgatgctgatccagaagctgctgaatgaaaaccccttcaagtgtgaggacccctgtgaaggagaaaataaatgttctgagccccgggccagcaaggccgcctccatgagcaacagaagtgacaaggccgaggagcagtgccaggagcaccaggagctggactgcaccagcggcatgaagcaggccaacggccagttcatcgacaagctggtggagagcgtgatgaagctgtgcctgatcatggccaagtacagcaatgatggagctgccctggccgagctggaggagcaggccgccagcgccaacaagcccaacttccggggcacccgctgcatccacagcggggccatgccccagaactaccaggacagcctgggccacgaggtgattgtgaacaaccagtgcagcaccaacagcctgcagaagcagctgcaggccgtgctgcagtggattgctgccagccagttcaacgtgcccatgctgtacttcatgggagacaaggatggccagctggagaagctgccccaggtgtctgccaaggctgctgagaagggctacagcgtgggcggcctgctgcaggaggtgatgaagtttgccaaggagcggcagccagatgaggccgtgggcaaggtggccaggaagcagctgctggactggctgctggccaacctgtag

SEQ ID NO: 238606 - DNA, 765 bp, Artificial Sequence
  derived and/or modified sequence
atgtctgatgacatcgactggctgcggagccacagaggagtgtgcaaggtggacctgtacaaccctgagggccagcaggaccaggacaggaaggtgatctgctttgtggatgtgtccaccctgaatgtggaggacaaggactacaaggatgctgccagcagcagcagcgagggcaacctgaacctgggcagcctggaggagaaggagatcatcgtcatcaaggacacagagaagaaggaccagagcaagacagagggctctgtgtgcctcttcaagcaggcccccagcgaccctgtgtctgtgctgaactggctgctgagtgacctgcagaagtatgccctgggcttccagcacgccctgagccccagcaccagcacctgcaagcacaaggtgggggacacagaaggagagtaccaccgggccagcagcgagaactgctacagcgtgtatgctgaccaggtgaacatcgactacctgatgaaccggccccagaacctgcggctggagatgacagctgccaagaacaccaacaacaaccagagccccagcgcccccccagccaagccacccagcacccagagagctgtgatcagcccagatggagagtgcagcattgatgacctgtccttctacgtgaaccggctgagcagcctggtgatccagatggcccacaaggagatcaaggagaagctggagggcaagagcaagtgcctgcaccacagcatctgccccagccctggcaacaaggagcgcatcagcccctag

SEQ ID NO: 238607 - DNA, 642 bp, Artificial Sequence
  derived and/or modified sequence
atgtctgatgacatcgactggctgcggagccacagaggagtgtgcaaggtggacctgtacaaccctgagggccagcaggaccaggacaggaaggtgatctgctttgtggatgtgtccaccctgaatgtggaggacaaggactacaaggatgctgccagcagcagcagcgagggcaacctgaacctgggcagcctggaggagaaggagatcatcgtcatcaaggacacagagaagaaggaccagagcaagacagagggctctgtgtgcctcttcaagcaggcccccagcgaccctgtgtctgtgctgaactggctgctgagtgacctgcagaagtatgccctgggcttccagcacgccctgagccccagcaccagcacctgcaagcacaaggtgggggacacagaaggagagtaccaccgggccagcagcgagaactgctacagcgtgtatgctgaccaggtgaacatcgactacctgatgaaccggccccagaacctgcggctggagatgacagctgccaagaacaccaacaacaaccagaacacctgtgaggaggactgccccggcagcaccatgggctacatggcccagagcacccagtatgaaaaatgtggcggcggccagagcgccaaggccctgtag

SEQ ID NO: 238608 - DNA, 1416 bp, Artificial Sequence
  derived and/or modified sequence
atgagcgacgacatcgactggctgcggagccaccggggcgtgtgcaaagtggacctctacaatcctgaaggtcagcaagatcaagatagaaaggtgatctgttttgtggacgtgtccaccctgaatgtggaggataaggattataaggacgccgcttcaagcagcagtgagggcaacctgaaccttggttcattagaggagaaagagatcattgttattaaagacaccgaaaaaaaagaccagagtaagacggagggctctgtctgcttattcaagcaggccccctcagaccctgtgagtgtactgaactggctgttgtcagatctgcagaagtatgcactgggttttcagcacgcgctgtctcctagtacaagcacctgtaaacacaaagttggtgacactgaaggcgaataccaccgcgcaagctcagagaattgctatagcgtctacgctgatcaggtgaacattgattatctgatgaatcggccacaaaatctccgcctcgaaatgacagcggctaaaaacaccaacaacaaccagaacacatgcgaggaggactgtccaggatctacaatggggtacatggcacaatcaacccagtacgaaaaatgtggtggaggccagagcgccaaggcgttatcagtgaagcaactggaatcccaccgggctccgggaccttcaacttgccagaaagagaatcagcatctagactcccagaagatggacatgtcgaacatcgtgctcatgcttattcaaaagctcctcaacgagaatccttttaaatgtgaggatccgtgcgagggagaaaacaaatgctccgagccgagagctagtaaggccgccagcatgtcaaacaggtctgataaagccgaggagcagtgtcaagaacatcaggagctggattgcacctccggaatgaagcaggctaatggccagtttatagacaaacttgtggaatcagtaatgaagctgtgtctcattatggccaaatattctaatgatggcgcagcgctggcagaactagaagaacaggctgcaagcgccaacaagccaaactttcgggggacgcgctgtatccactcaggtgctatgccccagaactaccaagattctctgggacacgaggtgatcgttaataatcagtgctcaacaaactctctccagaaacaactccaagctgtgctgcagtggatcgccgcctctcagttcaacgtcccaatgctgtacttcatgggcgacaaggacggccaactggaaaagctgccccaagtgtccgccaaagccgctgaaaagggatactccgtgggagggctgctgcaagaggtgatgaagttcgcaaaagagagacagccagatgaagccgtaggtaaggtggctcgaaaacagttactggactggctcctggccaacttatag

SEQ ID NO: 238609 - DNA, 765 bp, Artificial Sequence
  derived and/or modified sequence
atgagcgacgacatcgactggctgcggagccaccggggcgtgtgcaaagtagacctctacaacccggagggccagcaggaccaggatcggaaggtcatatgctttgtggacgtctctacgctgaacgtggaagacaaggattacaaggacgcagctagcagttcatctgaaggaaatctaaatcttgggtccctggaggagaaagaaatcattgttattaaggacactgagaagaaagatcagtccaagactgaaggctcagtgtgtctgttcaaacaagctcctagcgaccccgtgagtgtcctcaactggttgctgtctgatcttcagaaatatgcactcggcttccagcatgctctatccccatccacctcaacctgcaagcacaaggtgggcgataccgaaggcgagtatcaccgggcatcaagcgaaaattgctattccgtgtatgcagaccaggtcaatatagactacctcatgaaccggccccagaatctccggctggagatgaccgcagccaagaatactaacaataaccagtctccttcagcgccacccgccaaacctcctagtactcagcgggccgtaatttcccctgacggggaatgttctatcgacgacctgtccttttacgtgaaccgactgagttccctcgtgatccaaatggcccacaaggaaattaaagaaaaactggaaggcaagagcaagtgccttcatcactcgatatgcccctctcccggtaacaaggagcggatcagcccttag

SEQ ID NO: 238610 - DNA, 642 bp, Artificial Sequence
  derived and/or modified sequence
atgagcgacgacatcgactggctgcggagccaccggggcgtgtgcaaagtggatctatacaacccagagggccagcaagatcaggatagaaaggtgatctgctttgtcgacgtatctactctcaacgtggaagataaggattataaggacgccgctagttcttcgtccgagggaaatctcaacctggggtccctcgaggagaaggaaatcatcgtcattaaagatacagaaaagaaagatcaatccaagaccgaaggtagtgtgtgtctcttcaagcaggctccgtccgacccagtgtctgttcttaactggctgttaagcgacctgcagaagtacgctctagggtttcagcatgccctctcccctagcacttcaacatgtaagcacaaagtgggggacacagaaggggaataccatcgtgctagctcggagaactgttactccgtctatgccgatcaggtaaacatagactacctgatgaatcgccctcagaatcttcgactcgaaatgactgccgccaagaacaccaacaacaaccaaaatacctgcgaggaagactgcccaggatctaccatggggtatatggcccaatccactcaatacgagaagtgcggaggaggccaatctgccaaggccttgtag

SEQ ID NO: 238611 - DNA, 1416 bp, Artificial Sequence
  derived and/or modified sequence
atgtcagatgacatcgactggttacgaagccatcgaggtgtatgcaaagtcgacctgtacaatcctgaaggccagcaggaccaggaccgcaaggtgatatgctttgtcgatgtttctacacttaatgtggaggacaaggattataaggatgccgcttcttcaagttccgaaggcaatctgaacctgggctcgctagaggagaaagagataatagttatcaaggatactgaaaagaaggatcagtctaagactgaaggttctgtttgcctcttcaaacaggctccaagcgatcccgtttctgtgttgaactggctgctctcagatcttcagaaatatgccttagggttccagcatgccctgtccccttccacaagcacgtgtaaacataaggtcggcgataccgagggggagtaccacagggcctctagtgaaaattgttattcagtctatgctgaccaggtgaacatcgattatcttatgaatcggcctcagaacctgcggctagagatgactgctgcgaagaacacaaataataaccagaatacctgtgaggaagactgccctggttcaacgatgggttacatggcccagtcaacccaatacgaaaaatgcggtggtggacagtcagccaaggccttgtctgtgaagcagctcgagagtcacagagcaccaggtccttcaacctgccagaaggagaaccagcacctagactctcagaagatggacatgtcgaatatcgtgctcatgctaatccagaaactgctgaatgagaatcctttcaaatgcgaggacccctgtgaaggtgagaataaatgtagcgagccgagggcctcaaaagcagctagtatgtctaacaggagcgataaggccgaagagcaatgccaggaacaccaggagctcgactgcaccagcggcatgaaacaggctaacgggcagttcatcgataaactcgtcgaatctgtgatgaaactttgcctcatcatggcaaaatattcaaacgatggagccgctctcgctgaactagaggagcaggctgcttccgcgaacaagcctaattttagaggtactagatgcattcacagcggtgctatgccccagaactatcaggacagcctgggacatgaagtcattgtgaataatcaatgtagcacaaattctctgcagaagcagctgcaagcagtcctgcagtggattgccgcatcacagtttaacgttccaatgttatactttatgggggataaggatggccaactagagaagctgcctcaagtgagtgccaaagcagctgaaaagggctattccgtgggagggctcctacaggaagtcatgaagtttgctaaggaacggcaacctgacgaggctgtcggcaaggtggccaggaagcagctcttggattggctgctggccaacttatag

SEQ ID NO: 238612 - DNA, 765 bp, Artificial Sequence
  derived and/or modified sequence
atgtcagatgacattgattggttgcgatcccaccgtggcgtgtgcaaggtagacctttataatcccgagggccaacaggatcaggacaggaaggtgatttgctttgtggacgtgagcaccctcaacgtggaggacaaggactacaaggatgccgcttcgagctccagcgaagggaatcttaacttgggaagtcttgaagaaaaggagatcatagttataaaagatacagaaaagaaggaccagagtaagactgaagggagtgtgtgcctgttcaaacaggccccaagcgacccggtgtccgttctgaattggcttttatctgacttgcagaaatacgctttgggatttcagcacgccctctcacccagtacaagtacttgcaagcacaaagtcggggacacagagggagagtatcaccgcgcaagcagtgaaaactgctacagtgtctacgccgatcaggtcaacattgattaccttatgaatcgcccacagaatctacgcctggagatgactgccgcaaaaaatacaaacaacaatcaatcgccttctgccccacccgctaagcctcccagtactcagagggctgtaatctcacctgatggtgagtgtagtatcgacgatctaagcttctatgtcaacagactttccagcctcgttattcagatggcccacaaggaaatcaaggagaaactggaaggtaaatccaagtgcctccaccactctatctgcccctcccctggtaataaggagcgtatctcgccctag

SEQ ID NO: 238613 - DNA, 642 bp, Artificial Sequence
  derived and/or modified sequence
atgtccgacgacatcgactggttgagatcccatagaggagtgtgtaaagtggacctctataatccggagggacaacaagatcaggaccgtaaggttatctgctttgtggatgtctcgaccctcaacgttgaagataaggattacaaagatgccgcttcgagcagttctgaaggaaacctgaacttaggatcactcgaagagaaagagatcattgtgatcaaagatacagaaaagaaggaccagagtaaaaccgagggttctgtctgtttatttaagcaagcaccaagcgacccagtgtcagttttaaattggctgctctccgaccttcagaaatacgcattaggctttcagcacgccctatcaccgagcacatcaacctgtaaacacaaagtgggcgatacggaaggcgagtaccatagggcatcatctgagaattgctatagcgtctatgccgaccaggtgaacatagattatttaatgaacagacctcagaacctgcgcctggagatgacagcggcaaagaacacaaacaataaccagaatacctgcgaggaagactgccccggatctacgatgggatacatggcacagagtacccaatatgagaagtgtggcggtggacagagtgccaaggctctttag

SEQ ID NO: 238614 - DNA, 1764 bp, Artificial Sequence
  derived and/or modified sequence
ccagctggcagtcaaggctgtaggagggcatggagagttgaagaaaaaagcagtatcttgaggcagactggaagagtcatcacagcatccaaatcaacaagaaaacatcattccagggtcctacatgatggcgtactctgatactacaatgatgtctgatgatattgactggttacgcagccacaggggtgtgtgcaaggtagatctctacaacccagaaggacagcaagatcaggaccggaaagtgatatgctttgtcgatgtgtccaccctgaatgtagaagataaagattacaaggatgctgctagttccagctcagaaggcaacttaaacctgggaagtctggaagaaaaagagattatcgtgatcaaggacactgagaagaaagaccagtctaagacagagggatctgtatgccttttcaaacaagctccctctgatcctgtaagtgtcctcaactggcttctcagtgatctccagaagtatgccttgggtttccaacatgcactgagcccctcaacctctacctgtaaacataaagtaggagacacagagggcgaatatcacagagcatcctctgagaactgctacagtgtctatgccgatcaagtgaacatagattatttgatgaacagacctcaaaacctacgtctagaaatgacagcagctaaaaacaccaacaataatcaaaatacatgtgaagaagactgtcctggttccaccatgggctatatggctcagagtactcaatatgaaaagtgtggaggtggccaaagtgccaaagcactttcagtgaaacaactagaatctcacagagcccctggaccatccacctgtcaaaaggagaaccaacacctggactcccagaaaatggatatgtcaaacatcgttctaatgctgattcagaaactgcttaatgagaaccccttcaaatgtgaggatccatgcgaaggtgagaacaagtgttctgagcccagggcaagcaaagcagcttccatgtccaacagatctgacaaagcggaagaacaatgccaggagcatcaagaacttgactgtaccagtgggatgaagcaagcgaacgggcaatttatagataaactagtagaatctgtgatgaagctctgccttatcatggctaagtatagcaacgatggggcagcccttgctgagttggaagaacaagcagcctcggcaaataagcccaatttcaggggcaccagatgcattcacagtggtgcaatgccacagaactatcaagactctcttggacatgaagtaattgtcaataatcagtgctctacaaatagcttgcagaagcagctccaggctgtcctgcagtggattgcagcctcccagtttaacgtgcccatgctctacttcatgggagataaggatggacaactggaaaagcttcctcaggtttcagctaaagcagcagagaaggggtacagtgtaggaggtcttcttcaagaggtcatgaagtttgccaaggaacggcaaccagatgaagctgtgggaaaggtggccaggaaacagttgctggactggctgctcgctaacctgtgagctgatccttgactcctcttcatcttagcccccctagcagcattccatcccagccagagcacccccaccatcaggccagtcaactgcacaatacacaactgtatttcccaatacacttgagcagttgcctgtgaatgtaagaggtgtcaacaaactgggaaataaaataaaaaaaaataataataaatgtgtcattg

SEQ ID NO: 238615 - DNA, 892 bp, Artificial Sequence
  derived and/or modified sequence
gctgacaggggtggcagccaactgcaggtgcccaagaacttggcacttctcagttccatctaaaggggcacatctcccttctgggtgtcacgttttcagccaaacatctaaaagaacttcatcatcaagatgtctgatgatattgactggttacgcagccacaggggtgtgtgcaaggtagatctctacaacccagaaggacagcaagatcaggaccggaaagtgatatgctttgtcgatgtgtccaccctgaatgtagaagataaagattacaaggatgctgctagttccagctcagaaggcaacttaaacctgggaagtctggaagaaaaagagattatcgtgatcaaggacactgagaagaaagaccagtctaagacagagggatctgtatgccttttcaaacaagctccctctgatcctgtaagtgtcctcaactggcttctcagtgatctccagaagtatgccttgggtttccaacatgcactgagcccctcaacctctacctgtaaacataaagtaggagacacagagggcgaatatcacagagcatcctctgagaactgctacagtgtctatgccgatcaagtgaacatagattatttgatgaacagacctcaaaacctacgtctagaaatgacagcagctaaaaacaccaacaataatcaaagtccttcagctcctccagccaaacctcctagcactcagagagcagtcatttcccctgatggagaatgttctatagatgacctttccttctacgtcaaccgactatcttctctggtaatccagatggcccataaggaaatcaaggagaagttggaaggtaaaagcaaatgccttcatcattcaatctgtccatcccctgggaacaaagagagaatcagtcccc

SEQ ID NO: 238616 - DNA, 783 bp, Artificial Sequence
  derived and/or modified sequence
agtctggtccaacagctgacaggggtggcagccaactgcaggtgcccaagaacttggcacttctcagttccatctaaaggggcacatctcccttctgggtgtcacgttttcagccaaacatctaaaagaacttcatcatcaagatgtctgatgatattgactggttacgcagccacaggggtgtgtgcaaggtagatctctacaacccagaaggacagcaagatcaggaccggaaagtgatatgctttgtcgatgtgtccaccctgaatgtagaagataaagattacaaggatgctgctagttccagctcagaaggcaacttaaacctgggaagtctggaagaaaaagagattatcgtgatcaaggacactgagaagaaagaccagtctaagacagagggatctgtatgccttttcaaacaagctccctctgatcctgtaagtgtcctcaactggcttctcagtgatctccagaagtatgccttgggtttccaacatgcactgagcccctcaacctctacctgtaaacataaagtaggagacacagagggcgaatatcacagagcatcctctgagaactgctacagtgtctatgccgatcaagtgaacatagattatttgatgaacagacctcaaaacctacgtctagaaatgacagcagctaaaaacaccaacaataatcaaaatacatgtgaagaagactgtcctggttccaccatgggctatatggctcagagtactcaatatgaaaagtgtggaggtggccaaagtgccaaagcacttt

SEQ ID NO: 238617 - DNA, 1416 bp, Artificial Sequence
  derived and/or modified sequence
atgagcgacgacatcgactggctgagaagccacagaggcgtgtgcaaggtggacctgtacaaccccgagggccagcaggaccaggacagaaaggtgatctgcttcgtggacgtgagcaccctgaacgtggaggacaaggactacaaggacgccgccagcagcagcagcgagggcaacctgaacctgggcagcctggaggagaaggagatcatcgtgatcaaggacaccgagaagaaggaccagagcaagaccgagggcagcgtgtgcctgttcaagcaggcccccagcgaccccgtgagcgtgctgaactggctgctgagcgacctgcagaagtacgccctgggcttccagcacgccctgagccccagcaccagcacctgcaagcacaaggtgggcgacaccgagggcgagtaccacagagccagcagcgagaactgctacagcgtgtacgccgaccaggtgaacatcgactacctgatgaacagaccccagaacctgagactggagatgaccgccgccaagaacaccaacaacaaccagaacacctgcgaggaggactgccccggcagcaccatgggctacatggcccagagcacccagtacgagaagtgcggcggcggccagagcgccaaggccctgagcgtgaagcagctggagagccacagagcccccggccccagcacctgccagaaggagaaccagcacctggacagccagaagatggacatgagcaacatcgtgctgatgctgatccagaagctgctgaacgagaaccccttcaagtgcgaggacccctgcgagggcgagaacaagtgcagcgagcccagagccagcaaggccgccagcatgagcaacagaagcgacaaggccgaggagcagtgccaggagcaccaggagctggactgcaccagcggcatgaagcaggccaacggccagttcatcgacaagctggtggagagcgtgatgaagctgtgcctgatcatggccaagtacagcaacgacggcgccgccctggccgagctggaggagcaggccgccagcgccaacaagcccaacttcagaggcaccagatgcatccacagcggcgccatgccccagaactaccaggacagcctgggccacgaggtgatcgtgaacaaccagtgcagcaccaacagcctgcagaagcagctgcaggccgtgctgcagtggatcgccgccagccagttcaacgtgcccatgctgtacttcatgggcgacaaggacggccagctggagaagctgccccaggtgagcgccaaggccgccgagaagggctacagcgtgggcggcctgctgcaggaggtgatgaagttcgccaaggagagacagcccgacgaggccgtgggcaaggtggccagaaagcagctgctggactggctgctggccaacctgtag

SEQ ID NO: 238618 - DNA, 765 bp, Artificial Sequence
  derived and/or modified sequence
atgagcgacgacatcgactggctgagaagccacagaggcgtgtgcaaggtggacctgtacaaccccgagggccagcaggaccaggacagaaaggtgatctgcttcgtggacgtgagcaccctgaacgtggaggacaaggactacaaggacgccgccagcagcagcagcgagggcaacctgaacctgggcagcctggaggagaaggagatcatcgtgatcaaggacaccgagaagaaggaccagagcaagaccgagggcagcgtgtgcctgttcaagcaggcccccagcgaccccgtgagcgtgctgaactggctgctgagcgacctgcagaagtacgccctgggcttccagcacgccctgagccccagcaccagcacctgcaagcacaaggtgggcgacaccgagggcgagtaccacagagccagcagcgagaactgctacagcgtgtacgccgaccaggtgaacatcgactacctgatgaacagaccccagaacctgagactggagatgaccgccgccaagaacaccaacaacaaccagagccccagcgccccccccgccaagccccccagcacccagagagccgtgatcagccccgacggcgagtgcagcatcgacgacctgagcttctacgtgaacagactgagcagcctggtgatccagatggcccacaaggagatcaaggagaagctggagggcaagagcaagtgcctgcaccacagcatctgccccagccccggcaacaaggagagaatcagcccctag

SEQ ID NO: 238619 - DNA, 642 bp, Artificial Sequence
  derived and/or modified sequence
atgagcgacgacatcgactggctgagaagccacagaggcgtgtgcaaggtggacctgtacaaccccgagggccagcaggaccaggacagaaaggtgatctgcttcgtggacgtgagcaccctgaacgtggaggacaaggactacaaggacgccgccagcagcagcagcgagggcaacctgaacctgggcagcctggaggagaaggagatcatcgtgatcaaggacaccgagaagaaggaccagagcaagaccgagggcagcgtgtgcctgttcaagcaggcccccagcgaccccgtgagcgtgctgaactggctgctgagcgacctgcagaagtacgccctgggcttccagcacgccctgagccccagcaccagcacctgcaagcacaaggtgggcgacaccgagggcgagtaccacagagccagcagcgagaactgctacagcgtgtacgccgaccaggtgaacatcgactacctgatgaacagaccccagaacctgagactggagatgaccgccgccaagaacaccaacaacaaccagaacacctgcgaggaggactgccccggcagcaccatgggctacatggcccagagcacccagtacgagaagtgcggcggcggccagagcgccaaggccctgtag

SEQ ID NO: 238620 - protein, 773 aa, Artificial Sequence
  derived and/or modified sequence
MFSLSSTVQPQVTVPLSHLINAFHTPKNTSVSLSGVSVSQNQHRDVVPEHEAPSSECMFSDFLTKLNIVSIGKGKIFEGYRSMFMEPAKRMKKSLDTTDNWHIRPEPFSLSIPPSLNLRDLGLSELKIGQIDQLVENLLPGFCKGKNISSHWHTSHVSAQSFFENKYGNLDIFSTLRSSCLYRHHSRALQSICSDLQYWPVFIQSRGFKTLKSRTRRLQSTSERLAETQNIAPSFVKGFLLRDRGSDVESLDKLMKTKNIPEAHQDAFKTGFAEGFLKAQALTQKTNDSLRRTRLILFVLLLFGIYGLLKNPFLSVRFRTTTGLDSAVDPVQMKNVTFEHVKGVEEAKQELQEVVEFLKNPQKFTILGGKLPKGILLVGPPGTGKTLLARAVAGEADVPFYYASGSEFDEMFVGVGASRIRNLFREAKANAPCVIFIDELDSVGGKRIESPMHPYSRQTINQLLAEMDGFKPNEGVIIIGATNFPEALDNALIRPGRFDMQVTVPRPDVKGRTEILKWYLNKIKFDQSVDPEIIARGTVGFSGAELENLVNQAALKAAVDGKEMVTMKELEFSKDKILMGPERRSVEIDNKNKTITAYHESGHAIIAYYTKDAMPINKATIMPRGPTLGHVSLLPENDRWNETRAQLLAQMDVSMGGRVAEELIFGTDHITTGASSDFDNATKIAKRMVTKFGMSEKLGVMTYSDTGKLSPETQSAIEQEIRILLRDSYERAKHILKTHAKEHKNLAEALLTYETLDAKEIQIVLEGKKLEVR

SEQ ID NO: 238621 - protein, 740 aa, Artificial Sequence
  derived and/or modified sequence
MFSLSSTVQPQVTVPLSHLINAFHTPKNTSVSLSGVSVSQNQHRDVVPEHEAPSSECMFSDFLTKLNIVSIGKGKIFEGYRSMFMEPAKRMKKSLDTTDNWHIRPEPFSLSIPPSLNLRDLGLSELKIGQIDQLVENLLPGFCKGKNISSHWHTSHVSAQSFFENKYGNLDIFSTLRSSCLYRHHSRALQSICSDLQYWPVFIQSRGFKTLKSRTRRLQSTSERLAETQNIAPSFVKGFLLRDRGSDVESLDKLMKTKNIPEAHQDAFKTGFAEGFLKAQALTQKTNDSLRRTRLILFVLLLFGIYGLLKNPFLSVRFRTTTGLDSAVDPVQMKNVTFEHVKGVEEAKQELQEVVEFLKNPQKFTILGGKLPKGILLVGPPGTGKTLLARAVAGEADVPFYYASGSEFDEMFVGVGASRIRNLFREAKANAPCVIFIDELDSVGGKRIESPMHPYSRQTINQLLAEMDGFKPNEGVIIIGATNFPEALDNALIRPGRFDMQVTVPRPDVKGRTEILKWYLNKIKFDQSVDPEIIARGTVGFSGAELENLVNQAALKAAVDGKEMVTMKELEFSKDKILMGPERRSVEIDNKNKTITAYHESGHAIIAYYTKDAMPINKATIMPRGPTLGHVSLLPENDRWNETRAQLLAQMDVSMGGRVAEELIFGTDHITTGASSDFDNATKIAKRMVTKFGMSEKLGVMTYSDTGKLSPETQSAIEQEIRILLRDSYERAKHILKTHS

SEQ ID NO: 238622 - DNA, 2322 bp, Artificial Sequence
  derived and/or modified sequence
atgttcagcctgagcagcaccgtgcagccccaggtgaccgtgcccctgagccacctgatcaacgccttccacacccccaagaacaccagcgtgagcctgagcggcgtgagcgtgagccagaaccagcacagagacgtggtgcccgagcacgaggcccccagcagcgagtgcatgttcagcgacttcctgaccaagctgaacatcgtgagcatcggcaagggcaagatcttcgagggctacagaagcatgttcatggagcccgccaagagaatgaagaagagcctggacaccaccgacaactggcacatcagacccgagcccttcagcctgagcatcccccccagcctgaacctgagagacctgggcctgagcgagctgaagatcggccagatcgaccagctggtggagaacctgctgcccggcttctgcaagggcaagaacatcagcagccactggcacaccagccacgtgagcgcccagagcttcttcgagaacaagtacggcaacctggacatcttcagcaccctgagaagcagctgcctgtacagacaccacagcagagccctgcagagcatctgcagcgacctgcagtactggcccgtgttcatccagagcagaggcttcaagaccctgaagagcagaaccagaagactgcagagcaccagcgagagactggccgagacccagaacatcgcccccagcttcgtgaagggcttcctgctgagagacagaggcagcgacgtggagagcctggacaagctgatgaagaccaagaacatccccgaggcccaccaggacgccttcaagaccggcttcgccgagggcttcctgaaggcccaggccctgacccagaagaccaacgacagcctgagaagaaccagactgatcctgttcgtgctgctgctgttcggcatctacggcctgctgaagaaccccttcctgagcgtgagattcagaaccaccaccggcctggacagcgccgtggaccccgtgcagatgaagaacgtgaccttcgagcacgtgaagggcgtggaggaggccaagcaggagctgcaggaggtggtggagttcctgaagaacccccagaagttcaccatcctgggcggcaagctgcccaagggcatcctgctggtgggcccccccggcaccggcaagaccctgctggccagagccgtggccggcgaggccgacgtgcccttctactacgccagcggcagcgagttcgacgagatgttcgtgggcgtgggcgccagcagaatcagaaacctgttcagagaggccaaggccaacgccccctgcgtgatcttcatcgacgagctggacagcgtgggcggcaagagaatcgagagccccatgcacccctacagcagacagaccatcaaccagctgctggccgagatggacggcttcaagcccaacgagggcgtgatcatcatcggcgccaccaacttccccgaggccctggacaacgccctgatcagacccggcagattcgacatgcaggtgaccgtgcccagacccgacgtgaagggcagaaccgagatcctgaagtggtacctgaacaagatcaagttcgaccagagcgtggaccccgagatcatcgccagaggcaccgtgggcttcagcggcgccgagctggagaacctggtgaaccaggccgccctgaaggccgccgtggacggcaaggagatggtgaccatgaaggagctggagttcagcaaggacaagatcctgatgggccccgagagaagaagcgtggagatcgacaacaagaacaagaccatcaccgcctaccacgagagcggccacgccatcatcgcctactacaccaaggacgccatgcccatcaacaaggccaccatcatgcccagaggccccaccctgggccacgtgagcctgctgcccgagaacgacagatggaacgagaccagagcccagctgctggcccagatggacgtgagcatgggcggcagagtggccgaggagctgatcttcggcaccgaccacatcaccaccggcgccagcagcgacttcgacaacgccaccaagatcgccaagagaatggtgaccaagttcggcatgagcgagaagctgggcgtgatgacctacagcgacaccggcaagctgagccccgagacccagagcgccatcgagcaggagatcagaatcctgctgagagacagctacgagagagccaagcacatcctgaagacccacgccaaggagcacaagaacctggccgaggccctgctgacctacgagaccctggacgccaaggagatccagatcgtgctggagggcaagaagctggaggtgagatag

SEQ ID NO: 238623 - DNA, 2223 bp, Artificial Sequence
  derived and/or modified sequence
atgttcagcctgagcagcaccgtgcagccccaggtgaccgtgcccctgagccacctgatcaacgccttccacacccccaagaacaccagcgtgagcctgagcggcgtgagcgtgagccagaaccagcacagagacgtggtgcccgagcacgaggcccccagcagcgagtgcatgttcagcgacttcctgaccaagctgaacatcgtgagcatcggcaagggcaagatcttcgagggctacagaagcatgttcatggagcccgccaagagaatgaagaagagcctggacaccaccgacaactggcacatcagacccgagcccttcagcctgagcatcccccccagcctgaacctgagagacctgggcctgagcgagctgaagatcggccagatcgaccagctggtggagaacctgctgcccggcttctgcaagggcaagaacatcagcagccactggcacaccagccacgtgagcgcccagagcttcttcgagaacaagtacggcaacctggacatcttcagcaccctgagaagcagctgcctgtacagacaccacagcagagccctgcagagcatctgcagcgacctgcagtactggcccgtgttcatccagagcagaggcttcaagaccctgaagagcagaaccagaagactgcagagcaccagcgagagactggccgagacccagaacatcgcccccagcttcgtgaagggcttcctgctgagagacagaggcagcgacgtggagagcctggacaagctgatgaagaccaagaacatccccgaggcccaccaggacgccttcaagaccggcttcgccgagggcttcctgaaggcccaggccctgacccagaagaccaacgacagcctgagaagaaccagactgatcctgttcgtgctgctgctgttcggcatctacggcctgctgaagaaccccttcctgagcgtgagattcagaaccaccaccggcctggacagcgccgtggaccccgtgcagatgaagaacgtgaccttcgagcacgtgaagggcgtggaggaggccaagcaggagctgcaggaggtggtggagttcctgaagaacccccagaagttcaccatcctgggcggcaagctgcccaagggcatcctgctggtgggcccccccggcaccggcaagaccctgctggccagagccgtggccggcgaggccgacgtgcccttctactacgccagcggcagcgagttcgacgagatgttcgtgggcgtgggcgccagcagaatcagaaacctgttcagagaggccaaggccaacgccccctgcgtgatcttcatcgacgagctggacagcgtgggcggcaagagaatcgagagccccatgcacccctacagcagacagaccatcaaccagctgctggccgagatggacggcttcaagcccaacgagggcgtgatcatcatcggcgccaccaacttccccgaggccctggacaacgccctgatcagacccggcagattcgacatgcaggtgaccgtgcccagacccgacgtgaagggcagaaccgagatcctgaagtggtacctgaacaagatcaagttcgaccagagcgtggaccccgagatcatcgccagaggcaccgtgggcttcagcggcgccgagctggagaacctggtgaaccaggccgccctgaaggccgccgtggacggcaaggagatggtgaccatgaaggagctggagttcagcaaggacaagatcctgatgggccccgagagaagaagcgtggagatcgacaacaagaacaagaccatcaccgcctaccacgagagcggccacgccatcatcgcctactacaccaaggacgccatgcccatcaacaaggccaccatcatgcccagaggccccaccctgggccacgtgagcctgctgcccgagaacgacagatggaacgagaccagagcccagctgctggcccagatggacgtgagcatgggcggcagagtggccgaggagctgatcttcggcaccgaccacatcaccaccggcgccagcagcgacttcgacaacgccaccaagatcgccaagagaatggtgaccaagttcggcatgagcgagaagctgggcgtgatgacctacagcgacaccggcaagctgagccccgagacccagagcgccatcgagcaggagatcagaatcctgctgagagacagctacgagagagccaagcacatcctgaagacccacagctag

SEQ ID NO: 238624 - DNA, 2322 bp, Artificial Sequence
  derived and/or modified sequence
atgttctctttgagttcaacagttcagccacaagtgaccgtgcccctttcccacctgataaacgccttccacactcccaagaacaccagtgtctcgttatcaggggtttcggtttcccaaaaccaacacagagacgtggtcccagaacacgaagctccatcttcggagtgtatgttttcagactttcttacgaaattaaacatcgtgagtatagggaaagggaagatctttgaaggatatcgtagtatgtttatggagcctgcaaagaggatgaaaaagtcattagacacgaccgataattggcacatcaggcctgagccattctcactgtccatccctccgtccctcaaccttagggacctcgggttgtctgaattgaagattggacagatcgatcagctagttgagaatctcctgcctggattctgtaagggcaagaatatctcttctcattggcataccagccacgtaagcgcccagtctttctttgaaaataaatacggtaacttggacatcttctcaactctcagatcctcttgcctgtaccgccatcattccagagccctgcagtcaatttgttccgatctgcagtactggcctgtattcatccagagcaggggattcaagaccctcaaaagccggacccggaggttgcagagcacttctgagaggctggctgaaacccagaacatcgccccctccttcgtgaaagggttcctgctgcgggatcgtgggagcgatgtggagagtctggacaagcttatgaagaccaaaaacatccctgaagcccatcaggacgccttcaagaccgggttcgcagagggctttctgaaggcccaggctctgacgcagaagacaaacgattccctgagaagaacaaggctgatcttgttcgtgctgttgctgttcggaatttacgggttgctgaagaatcccttcctgtcagttcggtttcgaaccactacaggtctagactctgctgttgatcctgtccagatgaagaatgtaacttttgagcacgtaaagggggtggaagaggccaaacaggaactgcaagaggtagtggagtttttaaaaaatccacagaagttcactatactcggtgggaaactgccgaagggaattcttctagtgggaccgccgggtaccggcaaaacattactggctcgcgcagtggctggtgaggcagacgttcctttttactatgcgagtgggagtgagtttgacgagatgttcgtgggtgtgggggctagcaggattaggaacctgttcagagaggctaaggcaaacgctccgtgcgtgatttttatcgatgaattagatagtgtgggcggcaaacgcatcgagagccccatgcacccttacagcagacagacgatcaatcagctgctcgcggagatggatggatttaagcccaatgaaggtgtaatcatcattggcgccaccaatttcccggaggccctagataacgcactcatccgccctggtcgcttcgatatgcaagtgacagtgcccagacccgatgttaaagggcgcaccgaaatcttgaaatggtatttgaataagattaagtttgatcagtccgtggatcctgaaatcattgcaagaggtacggtgggattttccggtgctgagctcgagaacttggttaatcaagccgccctcaaagcagctgtcgacggcaaagaaatggtaaccatgaaggaacttgagttcagtaaggacaagatacttatgggacccgaacgccgcagcgttgagatcgacaacaaaaacaaaactattaccgcctatcacgagtccggccacgcaatcatagcttactacactaaagatgctatgcccatcaacaaggcaaccattatgccaagggggcctacgttagggcatgtttccctcttacctgaaaatgaccgctggaacgagacccgggcccaattgctcgcccaaatggacgtgagtatgggtggccgggtggctgaggaactcatttttggaactgatcatatcacgaccggagcatccagcgacttcgacaatgcaactaagatagccaagagaatggtcacgaagtttggcatgtccgagaagctgggggttatgacttacagcgacaccgggaagctgagcccagagacacaatccgccatcgagcaagagattcgaatcctcctgcgcgatagctatgagagggcaaagcacattctgaaaacacacgccaaagaacacaaaaacctggctgaggctctactgacttacgaaacattagacgcaaaggagatccagattgtgctcgaggggaagaagctggaggttagatag

SEQ ID NO: 238625 - DNA, 2223 bp, Artificial Sequence
  derived and/or modified sequence
atgttctctctgtctagtaccgtgcaacctcaggtgacagttccactgagccacttgattaacgccttccacaccccaaagaacacctcagtgtctctgtccggtgttagcgtgtcccagaaccagcatagagacgtggtacccgagcacgaggcgcccagctccgagtgtatgttttcggattttctgactaagctgaatatcgtgtccatcgggaaaggtaagattttcgagggctaccggtcaatgtttatggaacccgccaaaagaatgaaaaaatccctcgataccaccgacaactggcacatccgacctgaaccattttcactgtccatcccaccttccttaaacttaagggacctggggctatcggagctgaaaatcggccagatcgatcagttagtcgagaacttgctcccgggattttgcaaaggaaagaatatctcatcccactggcacacatctcacgtctccgcccagagcttctttgagaacaagtacggtaatctggacatttttagcactctcaggtcaagctgtctttaccgtcaccattctcgagctctgcaaagcatctgttctgaccttcagtactggcccgtcttcatccaaagccgggggtttaaaacgttgaagagccggaccaggaggctgcagtctacctcagaacgtctcgccgagactcagaacatcgctccctccttcgtcaaaggctttcttctcagagaccgaggatctgacgtggaaagcctcgataagctcatgaaaacaaaaaatatccctgaagcccatcaggacgcattcaagactggattcgccgaaggatttttgaaggcccaggctctaacacagaagacaaatgactcactgaggcgcaccaggctcattttatttgtcctactcctatttggtatttatggcctgctaaagaatccatttttgagcgtgaggttcagaaccaccactggcctggactcagcagtggatcctgtccaaatgaaaaacgtgacctttgaacacgttaaaggcgttgaagaagccaaacaggagcttcaggaggtggtggagttcctcaagaacccccaaaaattcacaatccttgggggcaaattgcccaaaggcattctcctggttgggccacccggaactgggaagactcttctcgctagggccgtggcaggcgaggccgacgttcccttttactacgccagcggatccgagttcgatgaaatgttcgtcggcgtgggcgcatcccgaattaggaacctttttagagaggctaaggcaaatgccccttgcgtgatcttcattgacgagctagattccgtgggtggcaaaagaattgagtcccctatgcacccatactccagacagacgatcaatcagctattggccgaaatggacggattcaagcccaacgagggcgtgattataatcggcgcaactaacttccccgaggctctggacaatgccctgattagacctggcaggttcgatatgcaagtaaccgtcccccgccctgatgtcaaaggccggacagagatattaaaatggtatctgaacaagatcaaatttgatcaaagcgtagaccccgaaattatcgcccgcgggacagtcggattctccggggctgaactagaaaatctggttaatcaagctgccctgaaggccgctgtggacggtaaagagatggtaaccatgaaagaattggagttcagcaaagacaagatcctcatgggtccagagagaagatccgtagagattgataataagaataagaccatcacagcgtatcacgagagtggccacgccatcatcgcctactacacaaaagatgcgatgcccatcaataaagccactataatgccgagagggcccacacttggccacgtttctttattacctgagaacgataggtggaacgaaactagagctcagctgttggcacagatggacgtctccatggggggtcgtgtggcagaagaactaatttttggcactgatcatattacaacaggggccagttctgatttcgataatgccaccaagatcgctaaacgaatggtgaccaagttcgggatgagcgaaaaacttggcgtcatgacatacagtgataccggaaagctctctccagagacccaatccgctatcgagcaggagattcggatcctgctccgcgactcatacgagcgtgccaagcatatactcaagactcactcctag

SEQ ID NO: 238626 - DNA, 2322 bp, Artificial Sequence
  derived and/or modified sequence
atgttcagcctgagcagcacagtgcagccccaggtgacagtgcccctgagccacctgatcaatgccttccacacccccaagaacacctctgtgtccctgagcggcgtgtctgtgtcccagaaccagcacagagatgtggtgcctgagcacgaggcccccagcagcgagtgcatgttcagtgacttcctgaccaagctgaacatcgtgtccatcggcaagggcaagatctttgagggctaccgctccatgttcatggagcccgccaagaggatgaagaagagcctggacaccacagacaactggcacatccggcctgagcccttcagcctgagcatcccccccagcctgaacctgcgggacctgggcctgtctgagctgaagattggccagattgaccagctggtggagaacctgctgcccggcttctgcaagggcaagaacatcagcagccactggcacaccagccacgtgtctgcccagagcttctttgagaacaagtatggcaacctggacatcttcagcaccctgcggagcagctgcctgtaccgccaccacagccgggccctgcagagcatctgcagcgacctgcagtactggcctgtgttcatccagagccggggcttcaagaccctgaagagcaggacccggcggctgcagagcaccagcgagcggctggccgagacccagaacatcgcccccagctttgtgaagggcttcctgctgcgggaccggggcagtgatgtggagagcctggacaagctgatgaagaccaagaacatccctgaggcccaccaggatgccttcaagacaggctttgctgagggcttcctgaaggcccaggccctgacccagaagaccaatgacagcctgcggaggaccaggctcatcctgtttgtgctgctgctgtttggcatctacggcctgctgaagaaccccttcctgtctgtgcgcttccgcaccaccaccggcctggacagcgctgtggaccctgtgcagatgaagaatgtgacctttgagcacgtgaagggcgtggaggaggccaagcaggagctgcaggaggtggtggagttcctgaagaacccccagaagttcaccatcctgggcggcaagctgcccaagggcatcctgctggtgggccccccaggcaccgggaagaccctgctggcccgggctgtggccggggaggctgatgtgcccttctactatgccagcggcagcgagtttgatgagatgtttgtgggcgtgggcgccagccgcatccggaacctcttccgggaggccaaggccaatgccccctgtgtgatcttcattgatgagctggacagcgtgggcggcaagagaattgagagccccatgcacccctacagccggcagaccatcaaccagctgctggccgagatggatggcttcaagcccaatgaaggagtcatcatcattggagccaccaacttccctgaggccctggacaatgccctgatccggcccggccgctttgacatgcaggtgacagtgcccaggccagatgtgaagggccgcacagagatcctgaagtggtacctgaacaagatcaagtttgaccagagcgtggaccctgagatcatcgcccggggcaccgtgggcttcagcggggctgagctggagaacctggtgaaccaggccgccctgaaggctgctgtggatggcaaggagatggtgaccatgaaggagctggagttcagcaaggacaagatcctgatgggccctgagaggagatctgtggagattgacaacaagaacaagaccatcacagcctaccatgaaagtggccacgccatcatcgcctactacaccaaggatgccatgcccatcaacaaggccaccatcatgccccggggccccaccctgggccacgtgtccctgctgcctgaaaatgaccgctggaatgagacccgggcccagctgctggcccagatggatgtgtccatgggcggccgggtggccgaggagctgatctttggaacagaccacatcaccaccggggccagcagtgactttgacaatgccaccaagatcgccaagaggatggtgaccaagtttggcatgtctgagaagctgggcgtgatgacctacagcgacaccgggaagctgagccctgagacccagagcgccatcgagcaggagatccgcatcctgctgcgggacagctatgagcgggccaagcacatcctgaagacccacgccaaggagcacaagaacctggccgaggccctgctgacctatgagaccctggatgccaaggagatccagatcgtgctggagggcaagaagctggaggtgaggtag

SEQ ID NO: 238627 - DNA, 2223 bp, Artificial Sequence
  derived and/or modified sequence
atgttcagcctgagcagcacagtgcagccccaggtgacagtgcccctgagccacctgatcaatgccttccacacccccaagaacacctctgtgtccctgagcggcgtgtctgtgtcccagaaccagcacagagatgtggtgcctgagcacgaggcccccagcagcgagtgcatgttcagtgacttcctgaccaagctgaacatcgtgtccatcggcaagggcaagatctttgagggctaccgctccatgttcatggagcccgccaagaggatgaagaagagcctggacaccacagacaactggcacatccggcctgagcccttcagcctgagcatcccccccagcctgaacctgcgggacctgggcctgtctgagctgaagattggccagattgaccagctggtggagaacctgctgcccggcttctgcaagggcaagaacatcagcagccactggcacaccagccacgtgtctgcccagagcttctttgagaacaagtatggcaacctggacatcttcagcaccctgcggagcagctgcctgtaccgccaccacagccgggccctgcagagcatctgcagcgacctgcagtactggcctgtgttcatccagagccggggcttcaagaccctgaagagcaggacccggcggctgcagagcaccagcgagcggctggccgagacccagaacatcgcccccagctttgtgaagggcttcctgctgcgggaccggggcagtgatgtggagagcctggacaagctgatgaagaccaagaacatccctgaggcccaccaggatgccttcaagacaggctttgctgagggcttcctgaaggcccaggccctgacccagaagaccaatgacagcctgcggaggaccaggctcatcctgtttgtgctgctgctgtttggcatctacggcctgctgaagaaccccttcctgtctgtgcgcttccgcaccaccaccggcctggacagcgctgtggaccctgtgcagatgaagaatgtgacctttgagcacgtgaagggcgtggaggaggccaagcaggagctgcaggaggtggtggagttcctgaagaacccccagaagttcaccatcctgggcggcaagctgcccaagggcatcctgctggtgggccccccaggcaccgggaagaccctgctggcccgggctgtggccggggaggctgatgtgcccttctactatgccagcggcagcgagtttgatgagatgtttgtgggcgtgggcgccagccgcatccggaacctcttccgggaggccaaggccaatgccccctgtgtgatcttcattgatgagctggacagcgtgggcggcaagagaattgagagccccatgcacccctacagccggcagaccatcaaccagctgctggccgagatggatggcttcaagcccaatgaaggagtcatcatcattggagccaccaacttccctgaggccctggacaatgccctgatccggcccggccgctttgacatgcaggtgacagtgcccaggccagatgtgaagggccgcacagagatcctgaagtggtacctgaacaagatcaagtttgaccagagcgtggaccctgagatcatcgcccggggcaccgtgggcttcagcggggctgagctggagaacctggtgaaccaggccgccctgaaggctgctgtggatggcaaggagatggtgaccatgaaggagctggagttcagcaaggacaagatcctgatgggccctgagaggagatctgtggagattgacaacaagaacaagaccatcacagcctaccatgaaagtggccacgccatcatcgcctactacaccaaggatgccatgcccatcaacaaggccaccatcatgccccggggccccaccctgggccacgtgtccctgctgcctgaaaatgaccgctggaatgagacccgggcccagctgctggcccagatggatgtgtccatgggcggccgggtggccgaggagctgatctttggaacagaccacatcaccaccggggccagcagtgactttgacaatgccaccaagatcgccaagaggatggtgaccaagtttggcatgtctgagaagctgggcgtgatgacctacagcgacaccgggaagctgagccctgagacccagagcgccatcgagcaggagatccgcatcctgctgcgggacagctatgagcgggccaagcacatcctgaagacccacagctag

SEQ ID NO: 238628 - DNA, 2322 bp, Artificial Sequence
  derived and/or modified sequence
atgttcagcctgagcagcaccgtgcagccccaggtgaccgtgcccttgagtcacctgataaacgctttccacactcctaaaaatacgtccgtgtcgttgtccggagtctcagtgagtcagaaccagcaccgggatgtggtgccagagcatgaggcccctagcagcgagtgcatgttcagtgacttcctgacaaagctcaacattgtgagtatcggaaaaggaaagatctttgaaggctacagatctatgttcatggaacctgcaaagcgaatgaagaagtctcttgataccactgacaattggcatattagacccgagcccttctcattgagcatccctcctagtctaaaccttcgggacctgggcctctccgagctcaagatcggccagattgatcaacttgtcgaaaatcttctgcctggcttctgtaaaggcaagaatatctcatcccactggcacacaagtcatgtatctgcccagagcttctttgaaaacaagtacgggaacctcgatatcttctcaacactcagatctagctgcctataccggcaccactcccgagcactacaaagcatctgcagcgatttacagtattggcctgtttttatccagtccaggggatttaagacgttaaagtccaggactcgccgcctgcaatccactagcgaaaggttggccgagacacaaaatatcgcaccttcttttgtcaaggggtttctcctacgggatagaggctctgacgttgaatcccttgacaagctgatgaagaccaagaatattccagaggctcaccaagacgcttttaagactggattcgcggaaggattcctgaaggctcaagcacttacccagaaaacaaacgattcactgcgtcggactagactaatattgtttgtgttgctgctgttcggcatatacggcttactgaagaacccctttctgtctgtaagattcaggacaaccacagggctggacagcgccgtcgatcccgttcagatgaagaacgtgacgttcgagcacgtcaaaggtgtagaggaggccaaacaagagcttcaagaggtggttgagttcctgaaaaatcctcagaagttcactatcctgggcggcaagttaccaaaggggatactgttggtgggacctcctggaaccggaaagaccctactcgctcgcgcagttgccggcgaagcagacgtgcccttttattatgcatctggcagtgagtttgacgagatgttcgttggcgtcggagcgagccgtattaggaacctgttccgagaggccaaggcaaatgctccatgcgttatcttcattgatgaactcgatagtgtgggaggaaaaagaattgagagtcctatgcacccctattctaggcagactatcaaccaactgctcgctgagatggacggcttcaaaccgaacgagggcgtgatcattatcggcgctactaatttcccagaagctctcgataacgcccttattagacctgggagatttgacatgcaagtgacagtgccccgacccgacgtaaaagggcgaacggagattcttaagtggtacctgaataaaatcaagtttgaccaatccgtagatccagagattatcgccaggggaacggtgggatttagcggcgccgaactggaaaatttggtaaatcaagccgcacttaaggctgccgttgatggtaaggagatggtgacaatgaaggagttagaatttagcaaagataagattctaatgggtccggaaaggaggtcggttgagattgataacaagaataagaccatcacagcatatcatgagtccggccacgcaatcatcgcttattataccaaagacgccatgcccatcaacaaagccacgatcatgcctcgaggacccaccctaggccacgttagtcttttacccgaaaacgacaggtggaacgaaactagggcccagctgctagcacagatggatgtcagtatgggcggccgcgtggccgaggagcttattttcggaactgatcacattacaacaggcgcctccagcgacttcgacaacgctaccaaaattgctaagcggatggtcacaaagtttgggatgagcgaaaaactgggggtgatgacctactctgatacaggtaagctgagtcccgagacccagagtgccatcgagcaggagatccggattctgctcagagattcctacgagcgcgccaaacacatcctcaagacacacgctaaggagcacaagaacctcgccgaggcgctgttgacctacgagacattagacgccaaggaaattcagatcgttctcgaggggaagaagctggaagttagatag

SEQ ID NO: 238629 - DNA, 2223 bp, Artificial Sequence
  derived and/or modified sequence
atgttcagcctgagcagcaccgtgcagccccaggtgaccgtgcccctcagccacctgataaatgcttttcatacaccaaaaaatacaagtgtgtccctgagcggagtctccgtttcccagaatcaacatagagacgtcgtgccggagcacgaggctccctcttccgaatgtatgttttctgatttcctgactaagcttaacatcgtgagcataggcaaaggtaagatttttgaggggtatcgatcgatgtttatggaacctgctaagagaatgaagaaaagtctcgacaccacagacaattggcatatcaggcccgaaccgttttccctttcaattcccccttctttgaacctccgagaccttggcctgtccgaactgaagatcggacagatcgaccaactggtagagaatttgctccccggtttttgcaagggtaagaacattagtagccactggcatacttcccacgtgagcgctcagtctttcttcgaaaataagtatggcaatctggacatttttagtacattgcgctctagttgcctttatcggcaccactccagggccctgcagtcaatttgttcagacctgcagtactggccggtgtttattcagtcccgtgggtttaagacactgaaatcccgcacacggagattgcagtccaccagtgaacgcctcgctgaaactcaaaacatcgcccctagcttcgtgaagggatttcttctccgggaccgaggctctgatgtcgagtctctagacaaactcatgaaaactaaaaacatccctgaagcgcaccaggatgcatttaaaaccggcttcgccgaggggtttctgaaggcacaggctctcacccaaaagactaacgactcgcttcgacgaacgcggctgatcttattcgtattactgctgtttgggatttatggactgctgaaaaaccccttcttgtcagtgcgattcagaacaacaaccgggctggatagcgcagtggaccccgtgcagatgaaaaatgtgacctttgagcatgtaaagggggttgaggaagccaagcaggagctccaggaggtagttgagttcctaaaaaatccacaaaaattcaccattctggggggcaaactgcccaaagggatcctgctcgtggggccgccaggtactggcaaaacattactcgcccgggcggtggccggagaggctgacgtcccattttattatgcctcaggctccgaattcgatgaaatgtttgttggcgtgggtgctagtagaattagaaacttgtttagagaggcaaaggccaacgctccatgcgtgattttcattgatgagcttgattccgtcggtgggaagaggattgagagccctatgcacccatactcaaggcaaacaatcaaccagttacttgcggagatggatggtttcaaacctaacgaaggggtcatcatcattggcgcgactaattttcccgaggcccttgacaatgcgttgatccgccccggtagatttgacatgcaggttaccgtgccaagacctgacgtgaagggccggacggaaatactaaagtggtacttgaacaagatcaaattcgaccagagcgtcgaccctgaaattatagccagagggacagtgggattctccggggctgaacttgagaatctagtgaatcaagcagccttgaaagcagccgtggacggcaaagaaatggtgaccatgaaggagcttgaattttccaaggataagatcctcatgggacccgagcggaggtcagttgagatcgataacaagaacaagaccattacagcctatcacgagtcgggacacgcgatcattgcatactacacaaaggacgccatgccaattaataaagccactatcatgccccgaggaccaacactcggacacgtctcccttctaccagagaatgatagatggaatgaaacccgtgcccagttgctggcacagatggatgtgtcaatggggggacgggtggccgaagaactgattttcggcaccgaccacattacaactggagcttcctctgacttcgacaatgctacaaaaatagctaagaggatggtaaccaagtttggcatgtcagaaaagctaggagtcatgacttactcggacacggggaaactgagccccgaaacacagagtgcaatagagcaggaaatccgaatactgttacgtgatagctacgaaagggccaagcacatcttgaaaacccattcttag

SEQ ID NO: 238630 - DNA, 2322 bp, Artificial Sequence
  derived and/or modified sequence
atgttctcgctgtccagtaccgtgcagccccaggtgaccgtgcccttgtctcacttgattaacgccttccacacgcctaaaaacacctctgtctcactctcaggtgtcagcgtttctcagaaccaacacagggatgttgttccagagcacgaggcaccttcaagcgagtgcatgttctcggacttcctcacaaaactcaacatcgtatcaattggcaaagggaagatcttcgagggatacaggagcatgtttatggagcctgctaagcgtatgaaaaagtcactggataccactgataattggcacatcaggcctgaaccttttagcttaagcatcccaccaagcctcaatctgcgagatctgggactgtctgagttgaaaataggacagatcgaccagctggtggaaaatttactcccaggattttgtaaggggaagaatatcagttctcactggcacaccagccacgtgagcgcccagtcctttttcgaaaacaaatacggtaacctagacattttctctacactgagaagttcctgtctctatcggcatcattctagggcgctacagtcgatttgctccgacctgcaatactggcccgtttttatacaaagcaggggattcaagacgttgaaatctcggaccaggcgcctccagagcacatccgaaagactggccgaaacacagaatatcgcaccctcattcgttaaaggttttcttttacgtgatcggggatccgacgtagagtccctggataagcttatgaaaacgaaaaatatacctgaagcacatcaggacgctttcaaaacaggcttcgctgagggattccttaaagcccaggccttgacacagaagactaatgactcactgaggcgcacgaggctgatattgttcgttctcctgctcttcgggatttacggattgctaaagaacccctttttgtcggtgcggttcaggaccacaacgggtttggattctgcagttgacccggtacagatgaaaaatgtgacatttgaacacgtgaagggcgtcgaggaagccaaacaggaactgcaagaagtcgtcgagttccttaagaatccccagaagttcacaatcctgggcggaaagttgcctaaaggcattctgcttgtgggcccaccaggtactgggaaaactctactagcgcgagccgtagctggggaagcagatgtgccattctactatgcttcgggcagtgagttcgatgagatgttcgtgggcgtgggggctagcagaatcaggaacttgtttagagaagccaaagccaacgcgccttgtgtgatcttcatcgacgagctggattcggtgggaggaaaacgcatagaatctccgatgcacccctacagccggcagactattaatcagctcctggcagagatggatggattcaagccaaacgagggcgttattatcattggggctacgaattttcccgaagccctcgacaacgccctgatcagaccaggtaggtttgacatgcaagttactgttcccaggcccgacgttaagggccgaaccgagatcttaaagtggtatctaaataaaatcaagttcgaccaatccgtggatcccgagattatcgccagaggaactgtagggttttccggcgcagagctggagaacttggtgaaccaagctgctctcaaggccgctgtcgacggaaaagagatggtcactatgaaggagctggagttctcaaaagacaagatcttgatgggaccagagcgccgtagcgtcgaaattgacaataaaaacaagaccattacagcctaccacgagtccggtcacgccattatcgcctattatacaaaggatgccatgcctattaacaaagccaccattatgcctagaggccctaccctcggtcatgtgtctctcctcccagagaacgaccgttggaatgagactcgggctcagctgttagcccaaatggatgtgtcaatgggaggcagagtcgcagaggagctaatcttcggcacggaccatattactaccggggcttcttccgactttgacaacgctacaaaaatcgccaaacgaatggtaaccaaatttgggatgtcagaaaaacttggggtgatgacctattctgacactggcaagctctctccagagactcagagcgccatcgagcaggagatccgtatcctgttaagggacagttacgagcgcgctaaacatatcttgaagacacacgccaaagagcacaagaatcttgctgaagccctcttaacatacgagactctagatgctaaggaaattcagatcgtgctggagggcaaaaaactggaagttaggtag

SEQ ID NO: 238631 - DNA, 2223 bp, Artificial Sequence
  derived and/or modified sequence
atgttttctctttcatccacagtgcagccgcaagtgacagtgcccctgagccatctgattaacgcgttccacacccccaaaaacacaagtgtcagcttaagtggggtgagcgtatcacagaaccaacaccgtgatgtggtcccggaacatgaagcaccctcatctgaatgcatgttttcagatttcctgaccaaacttaacatcgtatccatcggcaaggggaaaattttcgagggatataggtccatgtttatggaacctgcgaagagaatgaaaaaaagcctcgacacaactgataactggcatataaggccagagccttttagcttgagtattcctcccagccttaacctgagggatttggggctgagtgaattgaaaatagggcagatcgaccaactggttgagaacctgctccctggtttctgtaaagggaagaacatttcgtcgcattggcatactagtcacgtgtcagcacagagcttttttgaaaataaatatggcaacctggatatcttctccaccctgcgcagttcgtgcctgtataggcaccactcaagagccctgcagagtatttgttctgacctacaatactggcctgtgttcattcagtctcggggtttcaagactttaaagtccaggacgcgacgcctgcaatctacgagcgagcggctcgcagaaacccagaacatcgccccaagtttcgttaagggctttctgctgcgagatagggggagcgacgtcgaaagcctagacaaactgatgaaaactaaaaatattcctgaggctcaccaggatgcttttaagacaggtttcgccgagggcttcctgaaagctcaggcactcacgcagaagaccaacgacagtcttagaaggacaaggttgattctctttgtcctcttgctcttcggcatttatgggctactgaaaaaccctttcttgagcgttcgcttccgtactacaactggactcgactctgcagtcgacccagtgcaaatgaaaaacgttacctttgaacatgtcaagggagtggaggaagcaaaacaggaattacaggaagttgtcgagttccttaagaatccccagaaattcacaattttggggggaaagcttcccaagggcatacttctggtcggcccaccaggtaccggcaagaccctgctagctcgtgctgtcgccggtgaagccgatgtcccattttattacgcctcggggtcggagttcgacgaaatgtttgtgggggtcggagctagtcgtattaggaatttgttcagggaagcgaaagctaacgcgccttgcgttatctttatcgatgagctggatagtgttgggggaaagcggatcgaatctccgatgcatccttacagccgtcaaactatcaatcaactattagctgagatggacggattcaaacctaacgagggcgtgataattatcggggctacaaacttcccagaagctcttgacaatgctctgatccgacctggcagatttgatatgcaggtgaccgtccctcgccctgatgtgaagggaagaacagagattctgaagtggtacttaaataagatcaaatttgaccagtctgtagaccctgaaatcatcgcacgtggtactgtgggcttttcaggtgccgaactggaaaaccttgttaaccaagctgccctgaaggccgctgttgacggaaaagagatggttacgatgaaagagctggaattctctaaggacaagatcctcatgggacccgaaagaagaagtgtcgagatagataataagaataaaaccatcactgcgtaccacgagtccgggcatgctataattgcctactatacgaaggatgccatgccaatcaacaaagccacaattatgccaagagggcctacactcggccacgtatcgctccttcctgagaatgaccgctggaatgagacccgagctcagctgttagcacagatggatgtaagcatgggcggtcgggtggcggaggagcttatatttggtacagatcacatcactactggcgcatcttcagactttgacaacgctactaagatcgctaagcggatggtgacaaaatttggcatgagcgagaagcttggagtcatgacatactctgacactggaaaattaagccctgaaacacagagtgctatcgagcaagaaatccgaatacttctccgggacagctatgagagggcaaagcacatcttgaaaacccattcctag

SEQ ID NO: 238632 - DNA, 3994 bp, Artificial Sequence
  derived and/or modified sequence
aggggaggccattttccgtttctgggaggagtgaggggcaacgggtcggagaaaaaggaaaaaagaagggctcagcgcctccccgccgggccgtggacagaggggcacagtttcggcaggcgggtgaggtcgctgagggcccgccggagatgttttccttgtcgagcacggtgcaaccccaggttacagttcctctgagtcatctcatcaatgccttccatacaccaaaaaacacttctgtttctctcagtggagtgtcagtttctcaaaaccagcatcgagatgtagttcctgagcatgaggctcccagcagtgagtgtatgttcagtgacttcctgacgaagcttaacattgtttcaattggcaaaggaaaaatattcgaagggtacagatccatgttcatggagccagcaaaaaggatgaagaagagcttggacacaaccgataactggcacatccgtccagaacccttctccctctcaatccctccttcacttaacttaagggaccttggattatctgaactaaaaattggacagattgatcagctggtagaaaatctacttcctggattttgtaaaggcaaaaacatttcttcccattggcatacatcccatgtctctgcacaatccttctttgaaaataaatatggtaacttagatatatttagtacattacgttcctcttgcttgtatcgacatcattcaagagctcttcaaagcatttgttcagatcttcagtactggccagttttcatacagtctcggggttttaaaactttgaaatcaaggacacgacgtctccagtctacctccgagagattagctgaaacacagaatatagcgccatcattcgtgaaggggtttcttttgcgggacagaggatcagatgttgagagtttggacaaactcatgaaaaccaaaaatatacctgaagctcaccaagatgcatttaaaactggttttgcggaaggttttctgaaagctcaagcactcacacaaaaaaccaatgattccctaaggcgaacccgtctgattctcttcgttctgctgctattcggcatttatggacttctaaaaaacccatttttatctgtccgcttccggacaacaacagggcttgattctgcagtagatcctgtccagatgaaaaatgtcacctttgaacatgttaaaggggtggaggaagctaaacaagaattacaggaagttgttgaattcttgaaaaatccacaaaaatttactattcttggaggtaaacttccaaaaggaattcttttagttggacccccagggactggaaagacacttcttgcccgagctgtggcgggagaagctgatgttcctttttattatgcttctggatccgaatttgatgagatgtttgtgggtgtgggagccagccgtatcagaaatctttttagggaagcaaaggcgaatgctccttgtgttatatttattgatgaattagattctgttggtgggaagagaattgaatctccaatgcatccatattcaaggcagaccataaatcaacttcttgctgaaatggatggttttaaacccaatgaaggagttatcataataggagccacaaacttcccagaggcattagataatgccttaatacgtcctggtcgttttgacatgcaagttacagttccaaggccagatgtaaaaggtcgaacagaaattttgaaatggtatctcaataaaataaagtttgatcaatccgttgatccagaaattatagctcgaggtactgttggcttttccggagcagagttggagaatcttgtgaaccaggctgcattaaaagcagctgttgatggaaaagaaatggttaccatgaaggagctggagttttccaaagacaaaattctaatggggcctgaaagaagaagtgtggaaattgataacaaaaacaaaaccatcacagcatatcatgaatctggtcatgccattattgcatattacacaaaagatgcaatgcctatcaacaaagctacaatcatgccacgggggccaacacttggacatgtgtccctgttacctgagaatgacagatggaatgaaactagagcccagctgcttgcacaaatggatgttagtatgggaggaagagtggcagaggagcttatatttggaaccgaccatattacaacaggtgcttccagtgattttgataatgccactaaaatagcaaagcggatggttaccaaatttggaatgagtgaaaagcttggagttatgacctacagtgatacagggaaactaagtccagaaacccaatctgccatcgaacaagaaataagaatccttctaagggactcatatgaacgagcaaaacatatcttgaaaactcatgcaaaggagcataagaatctcgcagaagctttattgacctatgagactttggatgccaaagagattcaaattgttcttgaggggaaaaagttggaagtgagatgataactctcttgatatggatgcttgctggttttattgcaagaatacaagtagcattgcagtagtctacttttacaacgctttcccctcattcttgatgtggtgtaattgaagggtgtgaaatgctttgtcaatcatttgtcacatttatccagtttgggttattctcattatgacacctattgcaaattagcatcccatggcaaatatattttgaaaaaataaagaactatcaggattgaaaacagctcttttgaggaatgtcaattagttattaagttgaaagtaattaatgattttatgtttggttactctactagatttgataaaaattgtgcctttagccttctatatacatcagtggaaacttaagatgcagtaattatgttccagattgaccatgaataaaatattttttaatctaaatgtagagaagttgggattaaaagcagtctcggaaacacagagccaggaatatagccttttggcatggtgccatggctcacatctgtaatcccagcacttttggaggctgaggcgggtggattgcttgaggccaggagttcgagaccagcctggccaacgtggtgaaacgctgtctctactaaaatacaaaaaaatagggctgggcgcggttgctcacgcctgtaatcccagcacttttcagaggccaaggcgggcaaatcacctgaggtcaagagtttgagaccagcctggccaacatggtgaaaccccatctctactaaacatgcaaaaattacctgggcatggtggcaggtgcttataatcccagctactctgggggccaaggcaggagaattgcttgagcctgggagatggaggttgcagtgagctgagatcatgccactgcactccagcctgggcaacagagcaagactctgcctcaaaaaaaaattaaaataaatttaaatacaaaaaaaaatagccaggtgtggggtgcatgcctggaatcccagctacttgagaggctgaggcacgagaattgcttgaacccaggaggtggaggttgcagtgagccaagatcacaggagccactgcactccagcctgggtgacagagtgagactctgtctcaaaaaaaaattaaataaattattataacctttcagaaatgctgtgtgcattttcatgttcttttttttagcattactgtcactctccctaatgaaatgtacttcagagaagcagtattttgttaaataaatacataacctcattctgaataatgtccctcattttgactataactgtgcttggtttcaaaagcaaaattaaacaaaaatctcagtcccctccgaagtgaactttgtgttaccctgcgtcagaaatgccaagttgtgtttacttttcattcagattttgtgaatatgaacatgctgttataggatctacagatgaatatttaactcaatagaaaaattattttagaacacattgtattggtattacaaccagattatattcttgacgttgacttcattaaaattatctacaatttcctaataa

SEQ ID NO: 238633 - DNA, 2517 bp, Artificial Sequence
  derived and/or modified sequence
ggaggccattttccgtttctgggaggagtgaggggcaacgggtcggagaaaaaggaaaaaagaagggctcagcgcctccccgccgggccgtggacagaggggcacagtttcggcaggcgggtgaggtcgctgagggcccgccggagatgttttccttgtcgagcacggtgcaaccccaggttacagttcctctgagtcatctcatcaatgccttccatacaccaaaaaacacttctgtttctctcagtggagtgtcagtttctcaaaaccagcatcgagatgtagttcctgagcatgaggctcccagcagtgagtgtatgttcagtgacttcctgacgaagcttaacattgtttcaattggcaaaggaaaaatattcgaagggtacagatccatgttcatggagccagcaaaaaggatgaagaagagcttggacacaaccgataactggcacatccgtccagaacccttctccctctcaatccctccttcacttaacttaagggaccttggattatctgaactaaaaattggacagattgatcagctggtagaaaatctacttcctggattttgtaaaggcaaaaacatttcttcccattggcatacatcccatgtctctgcacaatccttctttgaaaataaatatggtaacttagatatatttagtacattacgttcctcttgcttgtatcgacatcattcaagagctcttcaaagcatttgttcagatcttcagtactggccagttttcatacagtctcggggttttaaaactttgaaatcaaggacacgacgtctccagtctacctccgagagattagctgaaacacagaatatagcgccatcattcgtgaaggggtttcttttgcgggacagaggatcagatgttgagagtttggacaaactcatgaaaaccaaaaatatacctgaagctcaccaagatgcatttaaaactggttttgcggaaggttttctgaaagctcaagcactcacacaaaaaaccaatgattccctaaggcgaacccgtctgattctcttcgttctgctgctattcggcatttatggacttctaaaaaacccatttttatctgtccgcttccggacaacaacagggcttgattctgcagtagatcctgtccagatgaaaaatgtcacctttgaacatgttaaaggggtggaggaagctaaacaagaattacaggaagttgttgaattcttgaaaaatccacaaaaatttactattcttggaggtaaacttccaaaaggaattcttttagttggacccccagggactggaaagacacttcttgcccgagctgtggcgggagaagctgatgttcctttttattatgcttctggatccgaatttgatgagatgtttgtgggtgtgggagccagccgtatcagaaatctttttagggaagcaaaggcgaatgctccttgtgttatatttattgatgaattagattctgttggtgggaagagaattgaatctccaatgcatccatattcaaggcagaccataaatcaacttcttgctgaaatggatggttttaaacccaatgaaggagttatcataataggagccacaaacttcccagaggcattagataatgccttaatacgtcctggtcgttttgacatgcaagttacagttccaaggccagatgtaaaaggtcgaacagaaattttgaaatggtatctcaataaaataaagtttgatcaatccgttgatccagaaattatagctcgaggtactgttggcttttccggagcagagttggagaatcttgtgaaccaggctgcattaaaagcagctgttgatggaaaagaaatggttaccatgaaggagctggagttttccaaagacaaaattctaatggggcctgaaagaagaagtgtggaaattgataacaaaaacaaaaccatcacagcatatcatgaatctggtcatgccattattgcatattacacaaaagatgcaatgcctatcaacaaagctacaatcatgccacgggggccaacacttggacatgtgtccctgttacctgagaatgacagatggaatgaaactagagcccagctgcttgcacaaatggatgttagtatgggaggaagagtggcagaggagcttatatttggaaccgaccatattacaacaggtgcttccagtgattttgataatgccactaaaatagcaaagcggatggttaccaaatttggaatgagtgaaaagcttggagttatgacctacagtgatacagggaaactaagtccagaaacccaatctgccatcgaacaagaaataagaatccttctaagggactcatatgaacgagcaaaacatatcttgaaaactcattcttgatgtggtgtaattgaagggtgtgaaatgctttgtcaatcatttgtcacatttatccagtttgggttattctcattatgacacctattgcaaattagcatcccatggcaaatatattttgaaaaaataaagaactatcaggattgaaaac

SEQ ID NO: 238634 - DNA, 2459 bp, Artificial Sequence
  derived and/or modified sequence
ggaggccattttccgtttctgggaggagtgaggggcaacgggtcggagaaaaaggaaaaaagaagggctcagcgcctccccgccgggccgtggacagaggggcacagtttcggcaggcgggtgaggtcgctgagggcccgccggagatgttttccttgtcgagcacggtgcaaccccaggttacagttcctctgagtcatctcatcaatgccttccatacaccaaaaaacacttctgtttctctcagtggagtgtcagtttctcaaaaccagcatcgagatgtagttcctgagcatgaggctcccagcagtgagtgtatgttcagtgacttcctgacgaagcttaacattgtttcaattggcaaaggaaaaatattcgaagggtacagatccatgttcatggagccagcaaaaaggatgaagaagagcttggacacaaccgataactggcacatccgtccagaacccttctccctctcaatccctccttcacttaacttaagggaccttggattatctgaactaaaaattggacagattgatcagctggtagaaaatctacttcctggattttgtaaaggcaaaaacatttcttcccattggcatacatcccatgtctctgcacaatccttctttgaaaataaatatggtaacttagatatatttagtacattacgttcctcttgcttgtatcgacatcattcaagagctcttcaaagcatttgttcagatcttcagtactggccagttttcatacagtctcggggttttaaaactttgaaatcaaggacacgacgtctccagtctacctccgagagattagctgaaacacagaatatagcgccatcattcgtgaaggggtttcttttgcgggacagaggatcagatgttgagagtttggacaaactcatgaaaaccaaaaatatacctgaagctcaccaagatgcatttaaaactggttttgcggaaggttttctgaaagctcaagcactcacacaaaaaaccaatgattccctaaggcgaacccgtctgattctcttcgttctgctgctattcggcatttatggacttctaaaaaacccatttttatctgtccgcttccggacaacaacagggcttgattctgcagtagatcctgtccagatgaaaaatgtcacctttgaacatgttaaaggggtggaggaagctaaacaagaattacaggaagttgttgaattcttgaaaaatccacaaaaatttactattcttggaggtaaacttccaaaaggaattcttttagttggacccccagggactggaaagacacttcttgcccgagctgtggcgggagaagctgatgttcctttttattatgcttctggatccgaatttgatgagatgtttgtgggtgtgggagccagccgtatcagaaatctttttagggaagcaaaggcgaatgctccttgtgttatatttattgatgaattagattctgttggtgggaagagaattgaatctccaatgcatccatattcaaggcagaccataaatcaacttcttgctgaaatggatggttttaaacccaatgaaggagttatcataataggagccacaaacttcccagaggcattagataatgccttaatacgtcctggtcgttttgacatgcaagttacagttccaaggccagatgtaaaaggtcgaacagaaattttgaaatggtatctcaataaaataaagtttgatcaatccgttgatccagaaattatagctcgaggtactgttggcttttccggagcagagttggagaatcttgtgaaccaggctgcattaaaagcagctgttgatggaaaagaaatggttaccatgaaggagctggagttttccaaagacaaaattctaatggggcctgaaagaagaagtgtggaaattgataacaaaaacaaaaccatcacagcatatcatgaatctggtcatgccattattgcatattacacaaaagatgcaatgcctatcaacaaagctacaatcatgccacgggggccaacacttggacatgtgtccctgttacctgagaatgacagatggaatgaaactagagcccagctgcttgcacaaatggatgttagtatgggaggaagagtggcagaggagcttatatttggaaccgaccatattacaacaggtgcttccagtgattttgataatgccactaaaatagcaaagcggatggttaccaaatttggaatgagtgaaaagcttggagttatgacctacagtgatacagggaaactaagtccagaaacccaatctgccatcgaacaagaaataagaatccttctaagggactcatatgaacgagcaaaacatatcttgaaaactcatgcaaaggagcataagaatctcgcagaagctttattgacctatgagactatgccaaagagattcaaattgttcttgaggggaaaaagttggaagtga

SEQ ID NO: 238635 - protein, 406 aa, Artificial Sequence
  derived and/or modified sequence
MSGAPTAGAALMLCAATAVLLSAQGGPVQSKSPRFASWDEMNVLAHGLLQLGQGLREHAERTRSQLSALERRLSACGSACQGTEGSTDLPLAPESRVDPEVLHSLQTQLKAQNSRIQQLFHKVAQQQRHLEKQHLRIQHLQSQFGLLDHKHLDHEVAKPARRKRLPEMAQPVDPAHNVSRLHRLPRDCQELFQVGERQSGLFEIQPQGSPPFLVNCKMTSDGGWTVIQRRHDGSVDFNRPWEAYKAGFGDPHGEFWLGLEKVHSITGDRNSRLAVQLRDWDGNAELLQFSVHLGGEDTAYSLQLTAPVAGQLGATTVPPSGLSVPFSTWDQDHDLRRDKNCAKSLSGGWWFGTCSHSNLNGQYFRSIPQQRQKLKKGIFWKTWRGRYYPLQATTMLIQPMAAEAAS

SEQ ID NO: 238636 - protein, 239 aa, Artificial Sequence
  derived and/or modified sequence
MAQPVDPAHNVSRLHRLPRDCQELFQVGERQSGLFEIQPQGSPPFLVNCKMTSDGGWTVIQRRHDGSVDFNRPWEAYKAGFGDPHGEFWLGLEKVHSITGDRNSRLAVQLRDWDGNAELLQFSVHLGGEDTAYSLQLTAPVAGQLGATTVPPSGLSVPFSTWDQDHDLRRDKNCAKSLSGGWWFGTCSHSNLNGQYFRSIPQQRQKLKKGIFWKTWRGRYYPLQATTMLIQPMAAEAAS

SEQ ID NO: 238637 - DNA, 1221 bp, Artificial Sequence
  derived and/or modified sequence
atgagtggcgcacctaccgccggcgccgctctcatgctttgcgctgcgaccgccgtgctgctcagcgcacagggcggtcccgtacaaagcaagtccccacgatttgcctcctgggatgagatgaacgtactcgcacacggcctgctgcagcttggacagggcttgcgtgagcacgcagagcgcactcggagccagctgagcgctctggagcgccgactgagcgcctgtggatccgcgtgccaaggcacagaaggcagtactgacttgcccttggccccggaatctcgggtagatccggaagtgctacactcattgcagactcagctaaaggcccagaatagtcgcattcagcagctgtttcataaggtagcgcagcagcagagacacctggaaaagcaacacttacggattcaacatctccagtctcagttcggtcttcttgatcacaagcatcttgaccacgaggtagccaagcccgcaagacgcaagaggctcccggaaatggcccagcctgtggacccagcgcataatgttagccgtctccaccgactccctagggactgccaagaactgtttcaggtgggtgagagacaatccgggcttttcgagatacagccccagggctctcctccctttctggtaaattgtaagatgacaagcgatggagggtggaccgttatccagcggcgtcacgacggtagcgttgatttcaaccggccttgggaggcctacaaggccggctttggcgacccacatggcgaattctggctcggactcgagaaagtgcattctataactggggaccgtaactcccggcttgcagtccaattgcgggattgggacggcaacgccgaactgctccaattctcagtccatttgggaggagaagacacagcgtacagtctccagctgaccgctccagtagccggacagcttggcgcgaccaccgttccaccatcgggcctgagcgttccgttttccacatgggaccaggaccacgatctccgccgagacaaaaattgcgcaaaaagcttgagcgggggctggtggttcggaacttgttcccacagtaacctaaatgggcaatatttccgatctataccccagcagagacagaagctaaagaagggcatcttctggaagacttggagagggcgatactaccctttgcaggctacaacaatgctaatccagcccatggcagcagaggccgcatcctag

SEQ ID NO: 238638 - DNA, 720 bp, Artificial Sequence
  derived and/or modified sequence
atggcgcaacctgtggacccggctcataatgtgtcacgactacaccgcctgcctagggactgccaagagctgttccaggtgggcgagaggcaaagcggactgtttgagatacagccccagggctcccctcctttcctagttaactgcaaaatgacctccgatgggggttggaccgtgatccagcggagacacgacgggagtgtggatttcaatcggccctgggaagcctacaaagcgggctttggcgaccctcatggggagttttggctggggctggaaaaggtccattccatcaccggcgacaggaattctagacttgctgtgcagcttcgtgactgggatggtaatgcagagctgctgcagttttctgtgcacctgggcggagaagacactgcttattctttgcaactgacagctccggtcgcaggccaactcggcgccactaccgtgcctcccagcggcttgagtgtgcctttctctacctgggaccaggaccatgacctccggcgagataagaactgcgccaaaagcctttctgggggctggtggttcgggacttgtagtcattcgaacctgaatggccaatatttccgctcgatcccccaacagagacagaagttgaaaaaggggatcttttggaagacttggcggggacgctactatccgctccaggcaactaccatgctgattcagcccatggcagcagaagccgcctcgtag

SEQ ID NO: 238639 - DNA, 1221 bp, Artificial Sequence
  derived and/or modified sequence
atgtctggggcccccacagctggagctgccctgatgctgtgtgccgccacagctgtgctgctgagcgcccagggcggccctgtgcagagcaagagccccaggtttgcctcctgggatgagatgaatgtgctggcccacggcctgctgcagctgggccagggcctgcgggagcacgccgagaggaccaggagccagctgagcgccctggagcggcggctgagcgcctgtggcagcgcctgccagggcacagagggcagcacagacctgcccctggcccctgagagccgggtggaccctgaggtgctgcacagcctgcagacccagctgaaggcccagaacagccgcatccagcagctgttccacaaggtggcccagcagcagaggcacctggagaagcagcacctgcgcatccagcacctgcagagccagtttggcctgctggaccacaagcacctggaccacgaggtggccaagccagcccggaggaagaggctgcctgagatggcccagcctgtggaccctgcccacaacgtgtcccggctgcaccggctgccccgggactgccaggagctgttccaggtgggggagcggcagagcggcctgtttgagatccagccccagggcagcccccccttcctggtgaactgcaagatgaccagtgatggcggctggacagtcatccagaggagacatgatggctctgtggacttcaaccggccctgggaggcctacaaggccggctttggagacccccacggggagttctggctgggcctggagaaggtgcacagcatcaccggggacaggaacagccggctggccgtgcagctgcgggactgggatggaaatgctgagctgctgcagttctctgtgcacctgggcggggaggacacagcctacagcctgcagctgacagcccctgtggccggccagctgggcgccaccaccgtgccccccagcggcctgtctgtgcccttcagcacctgggaccaggaccatgacctgcggcgggacaagaactgtgccaagagcctgagcggcggctggtggtttggcacctgcagccacagcaacctgaatggccagtacttccgcagcatcccccagcagaggcagaagctgaagaagggcatcttctggaagacctggaggggccgctactaccccctgcaggccaccaccatgctgatccagcccatggctgctgaggccgccagctag

SEQ ID NO: 238640 - DNA, 720 bp, Artificial Sequence
  derived and/or modified sequence
atggcccagcctgtggaccctgcccacaacgtgtcccggctgcaccggctgccccgggactgccaggagctgttccaggtgggggagcggcagagcggcctgtttgagatccagccccagggcagcccccccttcctggtgaactgcaagatgaccagtgatggcggctggacagtcatccagaggagacatgatggctctgtggacttcaaccggccctgggaggcctacaaggccggctttggagacccccatggagagttctggctgggcctggagaaggtgcacagcatcactggagacaggaacagccggctggccgtgcagctgcgggactgggatggaaatgctgagctgctgcagttctctgtgcacctgggcggggaggacacagcctacagcctgcagctgacagcccctgtggccggccagctgggcgccaccaccgtgcccccatctggcctgtctgtgcccttcagcacctgggaccaggaccatgacctgcggcgggacaagaactgtgccaagagcctgagcggcggctggtggtttggcacctgcagccacagcaacctgaatggccagtacttccgcagcatcccccagcagaggcagaagctgaagaagggcatcttctggaagacctggaggggccgctactaccccctgcaggccaccaccatgctgatccagcccatggctgctgaggccgccagctag

SEQ ID NO: 238641 - DNA, 1221 bp, Artificial Sequence
  derived and/or modified sequence
atgagcggcgcccccaccgccggcgccgccctgatgctgtgcgccgccactgccgtgttgctctctgcgcaaggcggtcctgttcagagcaaatcccctaggtttgcgagctgggatgagatgaacgtgctcgcccatgggctgctgcaactgggccaggggttgcgtgagcacgctgagaggactcgttcacaactgtcagcactcgaaagaagactgtcagcctgcggcagcgcttgccagggaactgagggatccaccgatctgccactggcccccgaaagtcgggtggaccctgaagttctacacagcctccagacccagctcaaggcccaaaatagtcgcattcagcagttatttcataaggtggctcagcaacagcggcacttggagaaacagcatctaaggatccagcacttacagtctcagtttggactgttagaccataaacacttagatcacgaagtcgcaaagccagcaagaagaaaacgcttacccgagatggcccaacccgtggatcctgcccataacgtcagtagactgcaccgcctgcccagggattgccaggagctcttccaggtgggcgagcggcaaagtggcctgtttgaaattcagccacagggaagtcctccatttctagtgaattgcaagatgacgtccgacggaggatggacagtgatccaaaggcgacatgatgggagtgtggacttcaaccgtccttgggaggcctataaggctggctttggcgatccacacggcgagttttggctcggactcgaaaaagtgcattctatcaccggcgatcgcaacagcaggctggccgtgcagctacgagactgggacggcaatgcagaactgctccagttttccgtgcacctaggcggtgaagacaccgcctacagcttgcagctgacggcacccgtagccggtcagctgggggctactactgtgccaccgtctggcctttcggtcccattctccacctgggaccaagaccacgacttacggcgggataagaattgcgcgaaaagcctgtctggcggttggtggttcggtacctgctcccactccaatctgaacggacagtatttccggtctatacctcaacagagacaaaagctgaaaaaaggcattttctggaaaacatggagaggacggtactacccccttcaagccaccacaatgctcatccagcccatggccgccgaagctgcctcttag

SEQ ID NO: 238642 - DNA, 720 bp, Artificial Sequence
  derived and/or modified sequence
atggcccagcccgtggaccccgcccacaacgtgagccggctgcaccgtttacctcgggattgccaggagctgtttcaagtgggcgagcgtcagagtggcttgttcgagattcagcctcagggctcacctccctttctggtgaattgtaagatgacctcagatggggggtggacagtgatacaacggaggcacgacggaagtgtagatttcaatcggccttgggaggcctataaagctggcttcggggatccgcacggcgagttctggctcggactggaaaaagtgcattctattacgggggaccggaatagcaggctggctgtgcagttacgtgattgggacggcaacgccgaattgctgcagttctcggtacatctgggcggcgaggatactgcatactcacttcagctgaccgcccctgtcgccggccagctgggcgccaccacagttcccccaagtggtctatccgttccattcagcacgtgggaccaggatcatgacctgaggcgtgacaagaactgcgcgaagtcactgtcaggaggatggtggtttgggacctgtagccattcaaatctaaatggacagtactttaggtccatacctcagcagagacagaagttgaagaagggcatattttggaaaacatggcggggccgatactatcctttgcaggctacgaccatgctgatccagcctatggccgctgaagcagcgtcatag

SEQ ID NO: 238643 - DNA, 1221 bp, Artificial Sequence
  derived and/or modified sequence
atgagcggtgcgcctactgccggagcggcactaatgctatgtgctgccacagccgtcctgctcagtgctcagggtggtcccgtgcagtccaaaagtccgaggtttgcatcctgggacgagatgaacgtgttggcccatggactgctgcaactgggtcaggggctcagagagcacgcggagcgtacccggtctcagttgtcagcccttgaacgcaggctctccgcgtgtgggtctgcatgtcaggggaccgaaggatccacagatttgccgctggcaccggagtcccgagtggatcctgaggtcctccactctcttcagactcagctcaaggcacagaattcccggatccagcagctcttccacaaggtcgcccaacagcagcgtcatctcgaaaaacagcacctcagaatccaacaccttcagtcgcagtttggcctgctggatcataaacatctggatcatgaggtcgctaagccggcacgcaggaaaaggttgccagaaatggctcagccggtggatccagcccataacgtcagccgactgcatcggctgccacgggattgtcaggagctgtttcaggtgggtgaacgccagtccggcctgttcgaaatccagccacagggatcaccacccttccttgtgaactgcaagatgactagcgatggcggatggacggtcattcagagaaggcatgatggcagcgtcgatttcaaccgaccctgggaggcatataaagctggatttggcgatccgcatggggaattctggttggggttagagaaagtccatagtatcactggggacaggaactcaaggctggcggtccaactcagagattgggacggaaatgccgagctgctgcagtttagtgtccatctgggtggcgaggatactgcctattctctgcagctcacggcaccagtggcaggacagctcggagccacaaccgtgccacctagtggattgagcgtccctttctctacatgggatcaggatcatgatctcaggcgagacaagaattgcgccaagtctctgagcggcggatggtggttcggcacgtgttctcatagcaacctgaacgggcagtatttcagaagtatccctcaacagcgtcagaaactgaagaagggaatcttctggaagacctggcgcggaagatactatccactgcaggcaactacaatgcttatccagcctatggctgcggaggcagcaagctag

SEQ ID NO: 238644 - DNA, 720 bp, Artificial Sequence
  derived and/or modified sequence
atggctcagccagtggacccagcccacaacgtctctaggctgcacaggttaccacgtgactgtcaggagctctttcaggtgggtgagcgccagtccggtcttttcgaaattcaaccacaggggagccctcccttcctcgttaattgtaaaatgacatcagatggcggatggaccgtgatccagcgaaggcacgacggatcagtcgattttaatcgtccctgggaagcctacaaggccggtttcggcgatccgcatggtgagttttggctggggctggagaaggtccacagcattacaggagatagaaactcccgtctcgctgtgcagttacgggactgggatggcaacgcggagttattgcagttttctgtgcacctcggtggcgaggataccgcatattccttgcagctgaccgcaccagtcgctggccagctaggagcaacgacggtccctccttcgggcctcagtgtgcctttctcgacctgggatcaggaccacgatctccggcgtgataaaaattgcgccaaatccctttctggagggtggtggtttgggacatgctcacattcaaacttgaacggccagtatttccggagtattccccagcagagacagaagctaaagaagggtattttttggaaaacttggcgaggccgatactaccctctccaggctaccacaatgctaattcaacccatggcagccgaagccgcaagctag

SEQ ID NO: 238645 - DNA, 1903 bp, Artificial Sequence
  derived and/or modified sequence
ataaaaaccgtcctcgggcgcggcggggagaagccgagctgagcggatcctcacacgactgtgatccgattctttccagcggcttctgcaaccaagcgggtcttacccccggtcctccgcgtctccagtcctcgcacctggaaccccaacgtccccgagagtccccgaatccccgctcccaggctacctaagaggatgagcggtgctccgacggccggggcagccctgatgctctgcgccgccaccgccgtgctactgagcgctcagggcggacccgtgcagtccaagtcgccgcgctttgcgtcctgggacgagatgaatgtcctggcgcacggactcctgcagctcggccaggggctgcgcgaacacgcggagcgcacccgcagtcagctgagcgcgctggagcggcgcctgagcgcgtgcgggtccgcctgtcagggaaccgaggggtccaccgacctcccgttagcccctgagagccgggtggaccctgaggtccttcacagcctgcagacacaactcaaggctcagaacagcaggatccagcaactcttccacaaggtggcccagcagcagcggcacctggagaagcagcacctgcgaattcagcatctgcaaagccagtttggcctcctggaccacaagcacctagaccatgaggtggccaagcctgcccgaagaaagaggctgcccgagatggcccagccagttgacccggctcacaatgtcagccgcctgcaccggctgcccagggattgccaggagctgttccaggttggggagaggcagagtggactatttgaaatccagcctcaggggtctccgccatttttggtgaactgcaagatgacctcagatggaggctggacagtaattcagaggcgccacgatggctcagtggacttcaaccggccctgggaagcctacaaggcggggtttggggatccccacggcgagttctggctgggtctggagaaggtgcatagcatcacgggggaccgcaacagccgcctggccgtgcagctgcgggactgggatggcaacgccgagttgctgcagttctccgtgcacctgggtggcgaggacacggcctatagcctgcagctcactgcacccgtggccggccagctgggcgccaccaccgtcccacccagcggcctctccgtacccttctccacttgggaccaggatcacgacctccgcagggacaagaactgcgccaagagcctctctggaggctggtggtttggcacctgcagccattccaacctcaacggccagtacttccgctccatcccacagcagcggcagaagcttaagaagggaatcttctggaagacctggcggggccgctactacccgctgcaggccaccaccatgttgatccagcccatggcagcagaggcagcctcctagcgtcctggctgggcctggtcccaggcccacgaaagacggtgactcttggctctgcccgaggatgtggccgttccctgcctgggcaggggctccaaggaggggccatctggaaacttgtggacagagaagaagaccacgactggagaagccccctttctgagtgcaggggggctgcatgcgttgcctcctgagatcgaggctgcaggatatgctcagactctagaggcgtggaccaaggggcatggagcttcactccttgctggccagggagttggggactcagagggaccacttggggccagccagactggcctcaatggcggactcagtcacattgactgacggggaccagggcttgtgtgggtcgagagcgccctcatggtgctggtgctgttgtgtgtaggtcccctggggacacaagcaggcgccaatggtatctgggcggagctcacagagttcttggaataaaagcaacctcagaacactt

SEQ ID NO: 238646 - DNA, 1719 bp, Artificial Sequence
  derived and/or modified sequence
gaagccgagctgagcggatcctcacacgactgtgatccgattctttccagcggcttctgcaaccaagcgggtcttacccccggtcctccgcgtctccagtcctcgcacctggaaccccaacgtccccgagagtccccgaatccccgctcccaggctacctaagaggatgagcggtgctccgacggccggggcagccctgatgctctgcgccgccaccgccgtgctactgagcgctcagggcggacccgtgcagtccaagtcgccgcgctttgcgtcctgggacgagatgaatgtcctggcgcacggactcctgcagctcggccaggggctgcgcgaacacgcggagcgcacccgcagtcagctgagcgcgctggagcggcgcctgagcgcgtgcgggtccttcacagcctgcagacacaactcaaggctcagaacagcaggatccagcaactcttccacaaggtggcccagcagcagcggcacctggagaagcagcacctgcgaattcagcatctgcaaagccagtttggcctcctggaccacaagcacctagaccatgaggtggccaagcctgcccgaagaaagaggctgcccgagatggcccagccagttgacccggctcacaatgtcagccgcctgcaccggctgcccagggattgccaggagctgttccaggttggggagaggcagagtggactatttgaaatccagcctcaggggtctccgccatttttggtgaactgcaagatgacctcagatggaggctggacagtaattcagaggcgccacgatggctcagtggacttcaaccggccctgggaagcctacaaggcggggtttggggatccccacggcgagttctggctgggtctggagaaggtgcatagcatcacgggggaccgcaacagccgcctggccgtgcagctgcgggactgggatggcaacgccgagttgctgcagttctccgtgcacctgggtggcgaggacacggcctatagcctgcagctcactgcacccgtggccggccagctgggcgccaccaccgtcccacccagcggcctctccgtacccttctccacttgggaccaggatcacgacctccgcagggacaagaactgcgccaagagcctctctggaggctggtggtttggcacctgcagccattccaacctcaacggccagtacttccgctccatcccacagcagcggcagaagcttaagaagggaatcttctggaagacctggcggggccgctactacccgctgcaggccaccaccatgttgatccagcccatggcagcagaggcagcctcctagcgtcctggctgggcctggtcccaggcccacgaaagacggtgactcttggctctgcccgaggatgtggccgttccctgcctgggcaggggctccaaggaggggccatctggaaacttgtggacagagaagaagaccacgactggagaagccccctttctgagtgcaggggggctgcatgcgttgcctcctgagatcgaggctgcaggatatgctcagactctagaggcgtggaccaaggggcatggagcttcactccttgctggccagggagttggggactcagagggaccacttggggccagccagactggcctcaatggcggactcagtcacattgactgacggggaccagggcttgtgtgggtcgagagcgccctcatggtgctggtgctgttgtgtgta

SEQ ID NO: 238647 - DNA, 1221 bp, Artificial Sequence
  derived and/or modified sequence
atgagcggcgcccccaccgccggcgccgccctgatgctgtgcgccgccaccgccgtgctgctgagcgcccagggcggccccgtgcagagcaagagccccagattcgccagctgggacgagatgaacgtgctggcccacggcctgctgcagctgggccagggcctgagagagcacgccgagagaaccagaagccagctgagcgccctggagagaagactgagcgcctgcggcagcgcctgccagggcaccgagggcagcaccgacctgcccctggcccccgagagcagagtggaccccgaggtgctgcacagcctgcagacccagctgaaggcccagaacagcagaatccagcagctgttccacaaggtggcccagcagcagagacacctggagaagcagcacctgagaatccagcacctgcagagccagttcggcctgctggaccacaagcacctggaccacgaggtggccaagcccgccagaagaaagagactgcccgagatggcccagcccgtggaccccgcccacaacgtgagcagactgcacagactgcccagagactgccaggagctgttccaggtgggcgagagacagagcggcctgttcgagatccagccccagggcagcccccccttcctggtgaactgcaagatgaccagcgacggcggctggaccgtgatccagagaagacacgacggcagcgtggacttcaacagaccctgggaggcctacaaggccggcttcggcgacccccacggcgagttctggctgggcctggagaaggtgcacagcatcaccggcgacagaaacagcagactggccgtgcagctgagagactgggacggcaacgccgagctgctgcagttcagcgtgcacctgggcggcgaggacaccgcctacagcctgcagctgaccgcccccgtggccggccagctgggcgccaccaccgtgccccccagcggcctgagcgtgcccttcagcacctgggaccaggaccacgacctgagaagagacaagaactgcgccaagagcctgagcggcggctggtggttcggcacctgcagccacagcaacctgaacggccagtacttcagaagcatcccccagcagagacagaagctgaagaagggcatcttctggaagacctggagaggcagatactaccccctgcaggccaccaccatgctgatccagcccatggccgccgaggccgccagctag

SEQ ID NO: 238648 - DNA, 720 bp, Artificial Sequence
  derived and/or modified sequence
atggcccagcccgtggaccccgcccacaacgtgagcagactgcacagactgcccagagactgccaggagctgttccaggtgggcgagagacagagcggcctgttcgagatccagccccagggcagcccccccttcctggtgaactgcaagatgaccagcgacggcggctggaccgtgatccagagaagacacgacggcagcgtggacttcaacagaccctgggaggcctacaaggccggcttcggcgacccccacggcgagttctggctgggcctggagaaggtgcacagcatcaccggcgacagaaacagcagactggccgtgcagctgagagactgggacggcaacgccgagctgctgcagttcagcgtgcacctgggcggcgaggacaccgcctacagcctgcagctgaccgcccccgtggccggccagctgggcgccaccaccgtgccccccagcggcctgagcgtgcccttcagcacctgggaccaggaccacgacctgagaagagacaagaactgcgccaagagcctgagcggcggctggtggttcggcacctgcagccacagcaacctgaacggccagtacttcagaagcatcccccagcagagacagaagctgaagaagggcatcttctggaagacctggagaggcagatactaccccctgcaggccaccaccatgctgatccagcccatggccgccgaggccgccagctag

SEQ ID NO: 238649 - protein, 653 aa, Artificial Sequence
  derived and/or modified sequence
MADIKTGIFAKNVQKRLNRAQEKVLQKLGKADETKDEQFEEYVQNFKRQEAEGTRLQRELRGYLAAIKGMQEASMKLTESLHEVYEPDWYGREDVKMVGEKCDVLWEDFHQKLVDGSLLTLDTYLGQFPDIKNRIAKRSRKLVDYDSARHHLEALQSSKRKDESRISKAEEEFQKAQKVFEEFNVDLQEELPSLWSRRVGFYVNTFKNVSSLEAKFHKEIAVLCHKLYEVMTKLGDQHADKAFTIQGAPSDSGPLRIAKTPSPPEEPSPLPSPTASPNHTLAPASPAPARPRSPSQTRKGPPVPPLPKVTPTKELQQENIISFFEDNFVPEISVTTPSQNEVPEVKKEETLLDLDFDPFKPEVTPAGSAGVTHSPMSQTLPWDLWTTSTDLVQPASGGSFNGFTQPQDTSLFTMQTDQSMICNLIIPGADADAAVGTLVSAAEGAPGEEAEAEKATVPAGEGVSLEEAKIGTETTEGAESAQPEAEELEATVPQEKVIPSVVIEPASNHEEEGENEITIGAEPKETTEDAAPPGPTSETPELATEQKPIQDPQPTPSAPAMGAADQLASAREASQELPPGFLYKVETLHDFEAANSDELTLQRGDVVLVVPSDSEADQDAGWLVGVKESDWLQYRDLATYKGLFPENFTRRLD

SEQ ID NO: 238650 - protein, 653 aa, Artificial Sequence
  derived and/or modified sequence
MADIKTGIFAKNVQKRLNRAQEKVLQKLGKADETKDEQFEEYVQNFKRQEAEGTRLQRELRGYLAAIKGMQEASMKLTESLHEVYEPDWYGREDVKMVGEKCDVLWEDFHQKLVDGSLLTLDTYLGQFPDIKNRIAKRSRKLVDYDSARHHLEALQSSKRKDESRISKAEEEFQKAQKVFEEFNVDLQEELPSLWSRRVGFYVNTFKNVSSLEAKFHKEIAVLCHKLYEVMTKLGDQHADKAFTIQGAPSDSGPLRIAKTPSPPEEPSPLPSPTASPNHTLAPASPAPARPRSPSQTRKGPPVPPLPKVTPTKELQQENIISFFEDNFVPEISVTTPSQNEVPEVKKEETLLDLDFDPFKPEVTPAGSAGVTHSPMSQTLPWDLWTAGVEACQKASGGSFNGFTQPQDTSLFTMQTDQSMICNLIIPGADADAAVGTLVSAAEGAPGEEAEAEKATVPAGEGVSLEEAKIGTETTEGAESAQPEAEELEATVPQEKVIPSVVIEPASNHEEEGENEITIGAEPKETTEDAAPPGPTSETPELATEQKPIQDPQPTPSAPAMGAADQLASAREASQELPPGFLYKVETLHDFEAANSDELTLQRGDVVLVVPSDSEADQDAGWLVGVKESDWLQYRDLATYKGLFPENFTRRLD

SEQ ID NO: 238651 - DNA, 1962 bp, Artificial Sequence
  derived and/or modified sequence
atggcagatattaagactggcatttttgctaagaatgtgcagaagcggctcaatcgcgcccaggagaaggtcctgcagaaactcggaaaggcggacgagactaaagacgagcaatttgaggaatacgtccagaactttaaacggcaggaggcggaaggcacgagacttcagcgggaactgagaggctacttagcggctatcaagggcatgcaagaagcttccatgaagctgaccgaatccctgcatgaggtgtacgagcctgattggtacggccgagaggacgttaaaatggtgggggagaagtgcgacgtgctctgggaagactttcaccagaagcttgtcgacggaagtctgttgacccttgacacgtaccttggtcagtttccggacattaagaacagaattgctaaaaggtctagaaagctcgttgattacgattccgcacggcatcacctggaggccctgcagtcctccaaaagaaaggatgagtctaggatatcaaaagctgaggaggaattccagaaagcgcagaaggtctttgaagaatttaacgtcgacctgcaggaagagttaccgtcattgtggagcagaagagtaggcttttatgtgaacacattcaagaacgttagctctcttgaggccaagtttcacaaagaaattgcagttctgtgtcacaagttgtatgaagtgatgacaaaactgggggatcagcatgccgataaagccttcacaatccagggcgccccctctgatagtggcccattgcggatcgccaaaaccccatcccccccagaggaaccttccccacttccctcgccaactgcttcccctaatcacacgctggctccagcctctcctgccccagcgagacctaggtctcctagccagacacggaaaggtcccccagtaccacccctgccgaaagtaacccccactaaagagctgcaacaggaaaatattatatcctttttcgaggacaatttcgttcctgaaattagcgtcactacaccctctcaaaatgaggtgcctgaggtgaagaaagaggaaacgctgctcgatctggactttgacccatttaagcccgaagtaacgcccgccggcagcgcgggcgtgacacatagcccaatgtcacaaacattgccctgggatctgtggactacctccacggatttagtccaaccagcctccggggggagctttaatgggttcacgcagccacaggatacatcgctgtttacaatgcagaccgatcagtcaatgatctgcaatctaattatccctggagcagacgctgatgccgccgtcggcacgctcgtctcagcggctgagggggccccgggcgaagaagctgaggctgagaaagccaccgtccccgccggcgaaggcgtcagcctcgaagaggccaagataggaaccgaaacgacggaaggagccgaatcagcacagcctgaggccgaagagctggaagctacagtgccacaagagaaggtcatcccttctgtggtgattgagcccgccagtaaccatgaggaggaaggagaaaatgaaatcaccatcggcgccgaacctaaagagacaactgaggacgcagctccaccaggcccgaccagtgaaactcccgaactcgcaacggaacaaaaacccatccaggatcctcagcctactccctccgctccagcgatgggtgctgccgatcagctagccagtgcacgggaggcatctcaggagctgcctcctggttttttatacaaagtcgagactttgcacgattttgaggcagccaattctgacgagctgaccttacaacgcggcgatgtagtgctcgtggtgcccagtgactccgaggcagatcaagacgccggctggctcgtaggcgttaaagaatcagattggctgcaataccgcgatctggccacatacaaaggcctgttccctgaaaacttcactcgacgacttgactag

SEQ ID NO: 238652 - DNA, 1962 bp, Artificial Sequence
  derived and/or modified sequence
atggcagacatcaagaccggcatattcgctaagaacgtgcagaagagactcaaccgtgcacaggaaaaggtgctgcagaagctgggtaaggctgacgagaccaaagatgaacagtttgaggaatatgtgcaaaattttaaacggcaggaggctgagggcacccgtctccagagagagctccgcggctaccttgcggccatcaaagggatgcaggaagccagtatgaaattgaccgagtcattacacgaggtttatgaacccgactggtacggtcgcgaagacgttaaaatggtgggtgagaagtgcgatgtactgtgggaagattttcatcagaagctggtggacggatctttactcacattggacacatatcttggtcagttccccgacatcaagaaccgaatcgccaagagaagcaggaagctggttgactacgattcagccaggcaccacctcgaggcccttcagtctagcaagcggaaggatgagagccgaattagtaaggctgaagaggaattccaaaaggcccagaaggtttttgaggagttcaacgtcgacctgcaagaggaactgccatccctatggtcccggagagttggcttctacgtgaatacattcaaaaatgtgtccagcttggaagctaagttccataaggaaatagctgtcctgtgccataagctttacgaggttatgactaaactgggagatcaacacgccgacaaagcatttacgatacagggagcaccctctgactcgggcccccttagaattgccaaaactccttccccacccgaggagcctagtcccctgccatcaccaacggcaagccccaatcatacgttagctcccgcatctccagccccagcgcggccaaggagtccctctcagacacgcaaaggaccacctgttccacccctgccaaaggtaacccccaccaaggaactgcagcaggagaatattattagcttcttcgaggataatttcgtcccagaaatctcagtgacaaccccgagccagaacgaagtccctgaggtgaagaaggaggagactctgctggatttggactttgatcccttcaaaccagaggtcacaccggcaggttcagcaggagtcacgcactcgccaatgagccaaacacttccgtgggacctgtggaccgccggtgtggaggcctgtcagaaagcttcaggaggaagctttaatggattcacgcagcctcaggatacctccttgttcactatgcagaccgatcagagcatgatttgcaacttgattattccgggggctgacgctgacgccgcggtgggtaccctggtgtctgctgcagaaggggctccaggcgaggaggccgaggctgaaaaagctaccgtccctgctggagaaggggtcagcctcgaggaggcaaagatcgggacagaaacgaccgaaggagctgagagcgcccagccggaggcggaggagctggaggctacagtgccacaggagaaggtgatccccagcgtggttatcgagccagcgtccaatcatgaagaagagggcgagaatgaaattactattggtgctgaacccaaggagacaaccgaggatgccgcaccacccgggcccaccagtgaaacacccgaactggccaccgagcagaaacccatccaagatcctcaaccgactcccagcgcccccgcaatgggtgccgctgatcaactggcttccgctagggaggcaagtcaggaattgccaccgggatttctctataaggtggagacccttcacgatttcgaagccgccaacagcgacgaattaacactccagcgcggcgatgttgtgttagtggttcctagcgactccgaagcagatcaggacgccgggtggcttgttggagtgaaggagagcgactggctgcagtatagagatctcgcaacatataaagggctttttcctgagaacttcacccggcgacttgactag

SEQ ID NO: 238653 - DNA, 1962 bp, Artificial Sequence
  derived and/or modified sequence
atggctgacatcaagacaggcatctttgccaagaatgtgcagaagaggctgaacagagcccaggagaaggtgctgcagaagctgggcaaggcagatgagaccaaggatgagcagtttgaggagtatgtgcagaacttcaagaggcaggaggccgagggcacccggctgcagcgggagctgcggggctacctggccgccatcaagggcatgcaggaggcctccatgaagctgacagagagcctgcacgaggtgtatgagccagactggtacggcagagaagatgtgaagatggtgggggagaagtgtgatgtgctgtgggaggacttccaccagaagctggtggatggcagcctgctgaccctggacacctacctgggccagttcccagacatcaagaacagaattgccaagaggagcaggaagctggtggactatgattctgcccggcaccacctggaggccctgcagagcagcaagaggaaggatgagagccgcatcagcaaggccgaggaggagttccagaaggcccagaaggtgtttgaggagttcaacgtggacctgcaggaggagctgcccagcctgtggagcagaagagtgggcttctacgtgaacaccttcaagaatgtgagcagcctggaggccaagttccacaaggagattgctgtgctgtgccacaagctgtatgaggtgatgaccaagctgggggaccagcacgccgacaaggccttcaccatccagggcgcccccagcgacagcggccccctgagaattgccaagacccccagccccccagaggagcccagccccctgcccagccccacagccagccccaaccacaccctggccccagccagccctgccccagcccggcccaggagccccagccagaccaggaaaggacctcctgtgccccccctgcccaaggtgacccccaccaaggagctgcagcaggagaacatcatctccttctttgaggacaactttgtgcctgagatctctgtgaccacccccagccagaatgaggtgcctgaggtgaagaaggaggagaccctgctggacctggactttgaccccttcaagccagaggtgaccccagctggcagcgctggggtgacccacagccccatgagccagaccctgccctgggacctgtggaccaccagcacagacctggtgcagcctgccagcggcggcagcttcaacggcttcacccagccccaggacaccagcctcttcaccatgcagacagaccagagcatgatctgcaacctgatcatccctggagcagatgctgatgctgctgtgggcaccctggtgtctgctgctgagggcgcccctggagaggaggccgaggccgagaaggccaccgtgcctgctggggagggcgtgtccctggaggaggccaagattggaacagagaccacagaaggagctgagagcgcccagcctgaggccgaggagctggaggccaccgtgccccaggagaaggtgatccccagcgtggtgattgaaccagccagcaaccacgaggaggagggggagaatgagatcaccatcggggctgagcccaaggagaccacagaagatgctgcccctcctggccccaccagcgagaccccagagctggccacagagcagaagcccatccaggacccccagcccaccccatctgccccagccatgggcgctgctgaccagctggccagcgcccgggaggccagccaggagctgcccccaggcttcctgtacaaggtggagaccctgcatgactttgaagctgccaacagtgatgagctgaccctgcagagaggagatgtggtgctggtggtgcccagcgacagcgaggccgaccaggatgctggctggctggtgggcgtgaaggagagtgactggctgcagtacagagacctggccacctacaagggcctcttccctgagaacttcacccggcggctggactag

SEQ ID NO: 238654 - DNA, 1962 bp, Artificial Sequence
  derived and/or modified sequence
atggctgacatcaagacaggcatctttgccaagaatgtgcagaagaggctgaacagagcccaggagaaggtgctgcagaagctgggcaaggcagatgagaccaaggatgagcagtttgaggagtatgtgcagaacttcaagaggcaggaggccgagggcacccggctgcagcgggagctgcggggctacctggccgccatcaagggcatgcaggaggcctccatgaagctgacagagagcctgcacgaggtgtatgagccagactggtacggcagagaagatgtgaagatggtgggggagaagtgtgatgtgctgtgggaggacttccaccagaagctggtggatggcagcctgctgaccctggacacctacctgggccagttcccagacatcaagaacagaattgccaagaggagcaggaagctggtggactatgattctgcccggcaccacctggaggccctgcagagcagcaagaggaaggatgagagccgcatcagcaaggccgaggaggagttccagaaggcccagaaggtgtttgaggagttcaacgtggacctgcaggaggagctgcccagcctgtggagcagaagagtgggcttctacgtgaacaccttcaagaatgtgagcagcctggaggccaagttccacaaggagattgctgtgctgtgccacaagctgtatgaggtgatgaccaagctgggggaccagcacgccgacaaggccttcaccatccagggcgcccccagcgacagcggccccctgagaattgccaagacccccagccccccagaggagcccagccccctgcccagccccacagccagccccaaccacaccctggccccagccagccctgccccagcccggcccaggagccccagccagaccaggaaaggacctcctgtgccccccctgcccaaggtgacccccaccaaggagctgcagcaggagaacatcatctccttctttgaggacaactttgtgcctgagatctctgtgaccacccccagccagaatgaggtgcctgaggtgaagaaggaggagaccctgctggacctggactttgaccccttcaagccagaggtgaccccagctggcagcgctggggtgacccacagccccatgagccagaccctgccctgggacctgtggacagctggggtggaggcctgccagaaggccagcggcggcagcttcaacggcttcacccagccccaggacaccagcctcttcaccatgcagacagaccagagcatgatctgcaacctgatcatccctggagcagatgctgatgctgctgtgggcaccctggtgtctgctgctgagggcgcccctggagaggaggccgaggccgagaaggccaccgtgcctgctggggagggcgtgtccctggaggaggccaagattggaacagagaccacagaaggagctgagagcgcccagcctgaggccgaggagctggaggccaccgtgccccaggagaaggtgatccccagcgtggtgattgaaccagccagcaaccacgaggaggagggggagaatgagatcaccatcggggctgagcccaaggagaccacagaagatgctgcccctcctggccccaccagcgagaccccagagctggccacagagcagaagcccatccaggacccccagcccaccccatctgccccagccatgggcgctgctgaccagctggccagcgcccgggaggccagccaggagctgcccccaggcttcctgtacaaggtggagaccctgcatgactttgaagctgccaacagtgatgagctgaccctgcagagaggagatgtggtgctggtggtgcccagcgacagcgaggccgaccaggatgctggctggctggtgggcgtgaaggagagtgactggctgcagtacagagacctggccacctacaagggcctcttccctgagaacttcacccggcggctggactag

SEQ ID NO: 238655 - DNA, 1962 bp, Artificial Sequence
  derived and/or modified sequence
atggccgacatcaagaccggcatcttcgccaagaacgtgcagaagaggctcaaccgggcgcaagaaaaagtgttgcagaagctggggaaagctgacgagacgaaagacgaacaatttgaggaatatgtgcagaatttcaagaggcaagaagccgagggtactagactgcagagggaactccgaggctacctcgcagctattaaagggatgcaggaggcctctatgaagctcaccgagagcctccatgaggtgtacgagcccgactggtacggacgcgaagacgtgaagatggtaggcgagaagtgtgatgtgctctgggaagattttcatcaaaagcttgtggatggctcactcctcacgcttgacacttacctgggtcagttccctgatatcaaaaacagaatcgctaagcggtcccgcaaactagttgactacgacagcgccaggcaccatctggaggccctccaatcctctaaaaggaaggatgaatccagaatttcaaaagctgaagaggaatttcaaaaagctcagaaagttttcgaggagttcaacgttgatttacaagaagagctcccgtctctgtggagtcgaagagtgggcttttatgtaaatacctttaaaaatgtcagctccctcgaggccaaattccacaaggagatcgccgtgctctgtcataagctgtacgaggttatgacgaagctcggagatcagcatgcagataaggccttcacgatccagggggctccatccgatagtggccctttgcgaattgccaagacccctagcccgcccgaggagcccagccctctgcctagtccaacggcgagccctaaccatacgctagccccggcgtcaccagctcctgccaggccgaggtcaccctcccagacacgcaaggggccgccggtgccccccctacccaaggttacacccacaaaagaattgcagcaggagaatatcattagcttcttcgaagataatttcgtgcccgagatctcagtaacgactccttcccagaatgaagtgccagaggtaaagaaagaggagacactgctcgacctggacttcgatcccttcaaacctgaggtaaccccagctggaagtgcaggagtgacacatagtcccatgagtcagactctgccctgggacctttggacaacctcaacagacctcgtgcaacccgcttccggagggtctttcaacggattcacccaaccgcaggacacaagcctatttacaatgcagactgaccagtccatgatctgtaatttaataatccccggagccgacgcagacgctgctgtggggaccctcgtctccgcggctgagggcgcccccggggaggaagccgaggctgagaaggccaccgtgccagcaggcgaaggagtcagcctggaggaagccaagatagggacagaaacgaccgagggcgctgaaagtgcacagccagaagccgaagagctggaggccactgtcccccaggaaaaggtgattccctctgtggtgatcgaaccagcctctaaccatgaagaggagggcgagaacgaaataaccatcggcgcggagcctaaggaaaccactgaagacgccgctccacctggtcccacttccgaaacaccggaactcgctaccgagcaaaaacccattcaggacccccagcctacacctagcgctcctgcgatgggcgcggcagaccagctggcttctgcccgcgaggccagccaagagttaccacctggattcctgtataaggtggaaacactccacgatttcgaggccgcaaattccgatgagttgacactacagcggggcgatgtggtgttggttgttcccagcgattctgaggccgatcaggacgccggctggcttgttggagtgaaagagtccgattggctgcagtacagggatctggctacatacaagggcctgttcccagagaactttacgcggaggctcgattag

SEQ ID NO: 238656 - DNA, 1962 bp, Artificial Sequence
  derived and/or modified sequence
atggccgacatcaagaccggcatcttcgccaagaacgtgcagaagaggttgaaccgggcacaggagaaggtgctccagaaactcggtaaggcggacgagactaaggatgaacagttcgaagaatatgttcagaattttaaaagacaagaggctgaagggacacggctgcaaagggagcttcggggctatttggccgcaattaagggaatgcaagaagcctcgatgaaactaaccgagtctctccatgaagtatatgagcccgattggtacggtagggaagacgtcaaaatggtaggcgagaaatgtgacgtgctgtgggaggactttcatcaaaagctcgtcgacggaagtttgctgactctcgacacctatctgggtcagttccccgatatcaagaacagaatcgccaaaagatctaggaagttagtggattatgattctgctcggcaccacctcgaggccctccagtcctcgaagagaaaagacgagagtcgaatttccaaggccgaagaagaattccaaaaagcccagaaggtctttgaagaatttaatgtggacctgcaggaagagctgccaagtttgtggtccagaagagtcggtttttacgtaaatactttcaaaaacgtgtcctcactggaggcgaagttccataaagagatcgccgtgctgtgccacaagctctacgaggtcatgactaaactgggcgaccagcacgctgataaagcgtttactatccaaggggccccgtctgattccggacctctcaggatcgctaagactccctccccccctgaggagcctagccctcttccaagtcctacagcctctcctaatcacacattggctcctgcttcaccggccccggctcgcccccgctctccctctcagacacgcaaaggaccacccgtgccacccctcccgaaagtgactcctacgaaggagctccaacaggagaatatcattagtttctttgaggataatttcgtgcccgagatcagcgtgacaacaccgtcacagaatgaggttccggaagtcaagaaggaggaaacactgttggacttggattttgacccgttcaaaccagaggtcacgcccgccggtagcgcgggggtgacccacagtccaatgagtcagaccctgccttgggacttgtggacagcgggggtggaagcctgtcagaaagcatccggcggatccttcaacgggtttacacagcctcaggatacgtcccttttcactatgcagacagatcagtcaatgatttgcaacctcattatcccaggcgcagacgcggacgctgccgtgggcactctggtctccgccgctgagggggcccctggggaggaggcagaagctgaaaaggctaccgtccccgctggcgagggtgtgagcctcgaggaagcgaaaatcggcaccgagactactgagggggctgagagcgcacaaccagaggccgaggagctggaagccaccgtgcctcaggagaaggtgatacccagtgtcgtaattgagcccgcctctaatcatgaggaggagggggagaatgagattaccatcggagccgagcccaaggagactaccgaggacgcagcaccaccagggcccacaagcgaaacccccgagcttgctacagaacagaaaccaatccaggacccccagcctacccccagtgccccagccatgggcgccgccgaccaactggccagcgcccgcgaggctagccaggaactgccccctggtttcctctacaaagtggagacactgcacgattttgaagccgccaactcggacgagctgaccttgcagagaggtgatgtggtcctggttgtaccatccgactccgaggccgatcaagacgctggatggctcgtgggggttaaggagagcgattggttgcagtacagagacttggccacctacaaaggtctgtttccagaaaacttcacacgaagactggactag

SEQ ID NO: 238657 - DNA, 3145 bp, Artificial Sequence
  derived and/or modified sequence
cccgctcctccgcgccgccgccagccccgctgcgcgctctgctcttcgcagctccccggacccgcagccatggccgacatcaagacgggcatcttcgccaagaacgtccagaagcgactcaaccgcgcgcaggaaaaggtcctccaaaagctggggaaagctgatgagacaaaagacgaacagttcgaagaatatgtccagaacttcaaacggcaagaagcagagggtaccagacttcagcgagaactccgaggatatttagcagcaatcaaaggcatgcaggaggcctccatgaagctcacagagtcgctgcatgaagtctatgagcctgactggtatgggcgggaagatgtgaaaatggttggtgagaaatgtgatgtgctgtgggaagacttccatcaaaaactcgtggatgggtccttgctaacactggatacctacctggggcaatttcctgacataaagaatcgcatcgccaagcgcagcaggaagctagtggactatgacagtgcccgccaccatctggaagctctgcagagctccaagaggaaggatgagagtcgaatctctaaggcagaagaagaatttcagaaagcacagaaagtgtttgaagagtttaacgttgacttacaagaagagttaccatcattatggtcaagacgagttggattttatgttaatactttcaaaaacgtctccagccttgaagccaagtttcataaggaaattgcggtgctttgccacaaactgtatgaagtgatgacaaaactgggtgaccagcacgccgacaaggccttcaccatccaaggagcgcccagtgattcgggtcctctccgcattgcaaagacaccatcaccgcctgaggagccttcacccctcccgagcccgacagcaagtccaaatcatacattagcacctgcgtctcccgcaccagcacggcctcggtcaccttcacagacaaggaaagggcctcctgtcccacctctacctaaagtcaccccgacaaaggaactgcagcaggagaacatcatcagtttctttgaggacaactttgttccagaaatcagtgtgacaacaccttcccagaatgaagtccctgaggtgaagaaagaggagactttgctggatctggactttgatcctttcaagcccgaggtgacacctgcaggttctgctggagtgacccactcacccatgtctcagacattgccctgggacctatggacgacaagcactgatttggtacagccggcttctggtggttcatttaatggattcacacagccccaggatacttcattattcacaatgcagacagaccagagtatgatctgcaacttgatcatacctggagctgatgctgatgcagctgttggaaccttggtgtcagcagctgagggggccccaggagaggaagcagaggcggagaaggccactgtccctgccggggaaggagtaagtttagaggaggccaaaattggaactgaaaccactgagggtgcagagagtgcccaacctgaagcagaggagctcgaagcaacagtgcctcaggagaaggtcattccttcggtggtcatagagcctgcctccaaccatgaagaggaaggagaaaacgaaataactataggtgcagagcccaaggagaccaccgaggacgcggctcctccgggccccaccagcgagacaccggagctggctacggagcagaagcctatccaggaccctcagcccacgccttctgcaccagccatgggggctgctgaccagctagcatctgcaagggaggcctctcaggaattgcctcctggctttctctacaaggtggaaacactgcatgattttgaggcagcaaattctgatgaacttaccttacaaaggggtgatgtggtgctggtggtcccctcagattcagaagctgatcaggatgcaggctggctggtgggagtgaaggaatcagactggcttcagtacagagaccttgccacctacaaaggcctctttccagagaacttcacccgacgcttagattagggcaacaagtactgcaagaaggagctcagttacggggtttttaaaccttcatgaaaacctgaagagttcacttttgttattatgctcttaatgatttacagactgatgccagacaaaccttgggaagatgtatcaatggagcatgtgtgcaaaaaaatgtaagaggaaaaaaagtaaattaaggaaaaaatcctcactcattcccatgttgtcaataacaggtttgtttgtgctttgtccaagctgtggagactcttgtacttgatcccctcccaccaattctaaagtagctttctccagatcagactttaatttctctgcatcaggtgtatcgtattgagtggctgccctgcagaagatgtgatgaattatcctgtagtacaagattatcttattcccctgcccaggtgtgagcacgtgctctcgctccctttcaggtttactatgtttaaaactaaactgctgcaaaagttctcaatgttcttttccaacacatctatatatatatggacacacagtcacgcaagctagttcccatgactcctggatctatgtgtatgcagaaggctacatatacatagttgcttctttcctttccattgtagctctttgcctctcaattgtcattgatacatgcattgctcttattctgtctggcattacaattgcagttttgcctaatggcaaaaccagccatcccattggcaaaagagtcaacagtatctgtgtttgtactgtgcagttttcaggatgagatgacagatagcacgactacactgaggcaccctcagagaaggcagggcctgatttatctagctgtccagccgctgtggctggaggtaggctagttgggatgggcagctaagcagtcttctcttctgcctttatgagattgggtagaaagatggggcatattcatctacccccaaaagaacactataaaaacagctcctctatatttccacctctttctatttatgcaactcatcttcacagattgttctaaagtaaaatagatggtgtatgctgtatccacaaatcatctgtaacaattatgttttcagtgctgtgtcattccaaataaacctttggtaatcttcaacgattaccctaa

SEQ ID NO: 238658 - DNA, 3143 bp, Artificial Sequence
  derived and/or modified sequence
cccgctcctccgcgccgccgccagccccgctgcgcgctctgctcttcgcagctccccggacccgcagccatggccgacatcaagacgggcatcttcgccaagaacgtccagaagcgactcaaccgcgcgcaggaaaaggtcctccaaaagctggggaaagctgatgagacaaaagacgaacagttcgaagaatatgtccagaacttcaaacggcaagaagcagagggtaccagacttcagcgagaactccgaggatatttagcagcaatcaaaggcatgcaggaggcctccatgaagctcacagagtcgctgcatgaagtctatgagcctgactggtatgggcgggaagatgtgaaaatggttggtgagaaatgtgatgtgctgtgggaagacttccatcaaaaactcgtggatgggtccttgctaacactggatacctacctggggcaatttcctgacataaagaatcgcatcgccaagcgcagcaggaagctagtggactatgacagtgcccgccaccatctggaagctctgcagagctccaagaggaaggatgagagtcgaatctctaaggcagaagaagaatttcagaaagcacagaaagtgtttgaagagtttaacgttgacttacaagaagagttaccatcattatggtcaagacgagttggattttatgttaatactttcaaaaacgtctccagccttgaagccaagtttcataaggaaattgcggtgctttgccacaaactgtatgaagtgatgacaaaactgggtgaccagcacgccgacaaggccttcaccatccaaggagcgcccagtgattcgggtcctctccgcattgcaaagacaccatcaccgcctgaggagccttcacccctcccgagcccgacagcaagtccaaatcatacattagcacctgcgtctcccgcaccagcacggcctcggtcaccttcacagacaaggaaagggcctcctgtcccacctctacctaaagtcaccccgacaaaggaactgcagcaggagaacatcatcagtttctttgaggacaactttgttccagaaatcagtgtgacaacaccttcccagaatgaagtccctgaggtgaagaaagaggagactttgctggatctggactttgatcctttcaagcccgaggtgacacctgcaggttctgctggagtgacccactcacccatgtctcagacattgccctgggacctatggacggcaggtgtggaggcgtgtcaaaaggcttctggtggttcatttaatggattcacacagccccaggatacttcattattcacaatgcagacagaccagagtatgatctgcaacttgatcatacctggagctgatgctgatgcagctgttggaaccttggtgtcagcagctgagggggccccaggagaggaagcagaggcggagaaggccactgtccctgccggggaaggagtaagtttagaggaggccaaaattggaactgaaaccactgagggtgcagagagtgcccaacctgaagcagaggagctcgaagcaacagtgcctcaggagaaggtcattccttcggtggtcatagagcctgcctccaaccatgaagaggaaggagaaaacgaaataactataggtgcagagcccaaggagaccaccgaggacgcggctcctccgggccccaccagcgagacaccggagctggctacggagcagaagcctatccaggaccctcagcccacgccttctgcaccagccatgggggctgctgaccagctagcatctgcaagggaggcctctcaggaattgcctcctggctttctctacaaggtggaaacactgcatgattttgaggcagcaaattctgatgaacttaccttacaaaggggtgatgtggtgctggtggtcccctcagattcagaagctgatcaggatgcaggctggctggtgggagtgaaggaatcagactggcttcagtacagagaccttgccacctacaaaggcctctttccagagaacttcacccgacgcttagattagggcaacaagtactgcaagaaggagctcagttacggggtttttaaaccttcatgaaaacctgaagagttcacttttgttattatgctcttaatgatttacagactgatgccagacaaaccttgggaagatgtatcaatggagcatgtgtgcaaaaaaatgtaagaggaaaaaaagtaaattaaggaaaaaatcctcactcattcccatgttgtcaataacaggtttgtttgtgctttgtccaagctgtggagactcttgtacttgatcccctcccaccaattctaaagtagctttctccagatcagactttaatttctctgcatcaggtgtatcgtattgagtggctgccctgcagaagatgtgatgaattatcctgtagtacaagattatcttattcccctgcccaggtgtgagcacgtgctctcgctccctttcaggtttactatgtttaaaactaaactgctgcaaaagttctcaatgttcttttccaacacatctatatatatatggacacacagtcacgcaagctagttcccatgactcctggatctatgtgtatgcagaaggctacatatacatagttgcttctttcctttccattgtagctctttgcctctcaattgtcattgatacatgcattgctcttattctgtctggcattacaattgcagttttgcctaatggcaaaaccagccatcccattggcaaaagagtcaacagtatctgtgtttgtactgtgcagttttcaggatgagatgacagatagcacgactacactgaggcaccctcagagaaggcagggcctgatttatctagctgtccagccgctgtggctggaggtaggctagttgggatgggcagctaagcagtcttctcttctgcctttatgagattgggtagaaagatggggcatattcatctacccccaaaagaacactataaaaacagctcctctatatttccacctctttctatttatgcaactcatcttcacagattgttctaaagtaaaatagatggtgtatgctgtatccacaaatcatctgtaacaattatgttttcagtgctgtgtcattccaaataaacctttggtaatcttcaacgattaccct

SEQ ID NO: 238659 - DNA, 1962 bp, Artificial Sequence
  derived and/or modified sequence
atggcagatattaaaactgggatcttcgcgaaaaacgtacagaaacgactgaatagagctcaggaaaaggtgctccaaaagctcggtaaggccgacgagaccaaggatgaacagtttgaggagtacgtgcaaaactttaagcggcaggaagcagaaggtacccgactgcaaagagagctacgcggataccttgcagcaattaaaggaatgcaggaagcaagtatgaagttaactgaatcactgcacgaggtctacgaacccgattggtacggaagagaagacgtgaagatggtcggcgagaaatgcgatgtcctatgggaggactttcaccagaagcttgtggatggttcactcctaacactggatacttatctggggcaattcccagacattaaaaaccgcattgctaaaagaagtagaaaactggtggattatgacagcgcccgacatcacctcgaagccttgcagagcagtaaacgtaaggacgagtcaaggatcagtaaggccgaggaggaatttcagaaggctcagaaggtatttgaggaattcaacgtggacctccaggaggagttacccagtctttggagccggagagtaggattttatgtaaatacgttcaagaatgtatccagtctcgaggcaaaattccacaaggagatagccgtgttgtgtcataaactctatgaagtcatgacgaaactcggcgatcaacacgccgacaaggcgtttacaattcagggggctccttctgacagtgggcctctgcgcattgcaaagacaccaagcccgcctgaagagccatcacctctacccagccccacagctagtccaaaccatactctggccccagcttcgcccgctcccgcacgaccaagatcaccaagccaaacgagaaaaggtcctccggtgccacctttacccaaagtaactcccactaaagagctccagcaggagaacatcataagcttctttgaagataactttgttcctgaaatctccgtcactacgccctcacagaacgaggttcctgaggtaaagaaggaggagactttactcgacctagacttcgacccttttaagcctgaggtcacccctgcaggcagcgccggagtcacgcactctcctatgtctcagaccctgccttgggatctctggaccacttcaaccgatctggtacagccagcatctggagggagtttcaacgggttcacacagccccaggacactagcctgttcacaatgcagacagatcaatcaatgatctgcaacctaatcataccaggcgctgacgccgatgctgctgttgggacactcgtgtctgccgcagaaggagctcctggagaggaagccgaggcagagaaagctacagtacccgctggagagggggtgtctctcgaggaggctaagattgggaccgagaccacagagggagccgagagtgctcaaccagaagcagaggagctggaagcaactgttccacaggaaaaagtaatccccagtgtcgtcatcgagcctgcttcaaaccacgaagaagaaggagagaacgaaattacaattggagccgagccaaaagaaaccaccgaagacgcagctccacctggtccgaccagtgagacacctgagctggctacagaacaaaagcccatccaggatccccagcctaccccttctgcacctgcaatgggtgcagccgatcaactcgcaagtgcaagagaggcgtcacaagaacttccacctggtttcctttacaaagtggaaacactgcacgactttgaggctgccaatagcgacgaactgacgctgcagcgaggggacgtggttctcgttgtgcccagcgatagtgaggccgatcaagatgcaggatggctcgtcggcgtgaaagagtcagactggctccagtatagagacctggcaacatataagggattgttccctgagaattttacacggcgactggattag

SEQ ID NO: 238660 - DNA, 1962 bp, Artificial Sequence
  derived and/or modified sequence
atggccgacattaaaaccggcatctttgccaagaacgtgcaaaagaggttaaatcgggctcaagaaaaggtcctccagaagcttggaaaggcggacgaaaccaaagatgagcagtttgaggagtacgtgcagaacttcaaacgtcaggaggcagagggtacccgactccagagagagcttcggggttacctggccgctatcaagggtatgcaggaagcatccatgaagctgactgagagcttgcacgaagtctacgagcccgactggtacggcagagaagatgtgaaaatggtgggagaaaagtgcgatgtgttgtgggaggattttcaccagaagcttgtcgatggttcactgctgaccctagacacatacctcggacagttcccagatatcaagaataggattgccaagagatctagaaaactcgtagactatgattctgcgcgacatcacctcgaggcattacagtcgtcaaaacggaaagatgagtctaggatttccaaggcagaagaagagtttcagaaagcccaaaaggtgttcgaagagtttaacgtggatttgcaagaggaactgccgagcctctggagccggagagttggcttctacgtgaataccttcaagaatgtgtcctccttagaagccaagtttcataaggagatcgccgtgctctgccacaagctatatgaggttatgactaagcttggtgatcagcacgccgataaagctttcaccatacagggtgctcctagcgacagcggtccccttcgcattgctaaaactccatctccgccagaggaaccctccccgctccctagcccaaccgctagccctaaccacaccttggctccagcaagtcccgctccagctcgcccaagaagcccttcccagaccaggaaaggcccaccagtgcccccactcccaaaggtgacgccgaccaaagagctccaacaggagaacatcatctccttcttcgaagacaactttgtgccagagatcagtgtgaccacgccatcgcagaatgaagttcctgaagtgaaaaaagaagaaacgcttttggatctcgacttcgacccctttaagcctgaggtcacacccgctggatcagcaggtgtgacccatagtcctatgagccagaccttaccctgggatttgtggacagccggagtggaggcatgtcagaaagcttcagggggttcattcaatggattcacccaacctcaggatactagcctgttcacaatgcagactgatcagagtatgatatgcaacctaatcattcctggggcagacgcagacgctgcagtggggactttggtgtccgctgctgagggcgcaccaggcgaagaagccgaggccgagaaggcgacagtgccggcaggtgagggcgtgtctttggaggaggccaaaatcgggacagaaaccacagagggagcagaatcagcacagcccgaagcagaggaacttgaagccaccgtcccacaggaaaaagttatcccgtccgtggtgattgagccagccagcaaccacgaggaagagggtgagaatgagatcactatcggagccgaacctaaagagacaaccgaggacgcagctcctccagggcctacctccgaaacccctgagctggccacagaacagaaacccatccaggatccgcagcccaccccatctgcccctgcgatgggcgctgcagaccagttagcctcagccagagaagcttctcaagagctacccccagggttcctgtataaagtcgagacactgcatgattttgaggccgctaattccgacgaacttacactgcagaggggagatgtggtgctcgtggtaccgtctgactctgaagccgaccaggacgctggatggctggtgggcgtaaaggagagcgactggctgcaatatcgagatctggcaacgtacaagggtcttttccccgaaaattttacccgacgtttggattag

SEQ ID NO: 238661 - DNA, 1962 bp, Artificial Sequence
  derived and/or modified sequence
atggccgacatcaagaccggcatcttcgccaagaacgtgcagaagagactgaacagagcccaggagaaggtgctgcagaagctgggcaaggccgacgagaccaaggacgagcagttcgaggagtacgtgcagaacttcaagagacaggaggccgagggcaccagactgcagagagagctgagaggctacctggccgccatcaagggcatgcaggaggccagcatgaagctgaccgagagcctgcacgaggtgtacgagcccgactggtacggcagagaggacgtgaagatggtgggcgagaagtgcgacgtgctgtgggaggacttccaccagaagctggtggacggcagcctgctgaccctggacacctacctgggccagttccccgacatcaagaacagaatcgccaagagaagcagaaagctggtggactacgacagcgccagacaccacctggaggccctgcagagcagcaagagaaaggacgagagcagaatcagcaaggccgaggaggagttccagaaggcccagaaggtgttcgaggagttcaacgtggacctgcaggaggagctgcccagcctgtggagcagaagagtgggcttctacgtgaacaccttcaagaacgtgagcagcctggaggccaagttccacaaggagatcgccgtgctgtgccacaagctgtacgaggtgatgaccaagctgggcgaccagcacgccgacaaggccttcaccatccagggcgcccccagcgacagcggccccctgagaatcgccaagacccccagcccccccgaggagcccagccccctgcccagccccaccgccagccccaaccacaccctggcccccgccagccccgcccccgccagacccagaagccccagccagaccagaaagggcccccccgtgccccccctgcccaaggtgacccccaccaaggagctgcagcaggagaacatcatcagcttcttcgaggacaacttcgtgcccgagatcagcgtgaccacccccagccagaacgaggtgcccgaggtgaagaaggaggagaccctgctggacctggacttcgaccccttcaagcccgaggtgacccccgccggcagcgccggcgtgacccacagccccatgagccagaccctgccctgggacctgtggaccaccagcaccgacctggtgcagcccgccagcggcggcagcttcaacggcttcacccagccccaggacaccagcctgttcaccatgcagaccgaccagagcatgatctgcaacctgatcatccccggcgccgacgccgacgccgccgtgggcaccctggtgagcgccgccgagggcgcccccggcgaggaggccgaggccgagaaggccaccgtgcccgccggcgagggcgtgagcctggaggaggccaagatcggcaccgagaccaccgagggcgccgagagcgcccagcccgaggccgaggagctggaggccaccgtgccccaggagaaggtgatccccagcgtggtgatcgagcccgccagcaaccacgaggaggagggcgagaacgagatcaccatcggcgccgagcccaaggagaccaccgaggacgccgccccccccggccccaccagcgagacccccgagctggccaccgagcagaagcccatccaggacccccagcccacccccagcgcccccgccatgggcgccgccgaccagctggccagcgccagagaggccagccaggagctgccccccggcttcctgtacaaggtggagaccctgcacgacttcgaggccgccaacagcgacgagctgaccctgcagagaggcgacgtggtgctggtggtgcccagcgacagcgaggccgaccaggacgccggctggctggtgggcgtgaaggagagcgactggctgcagtacagagacctggccacctacaagggcctgttccccgagaacttcaccagaagactggactag

SEQ ID NO: 238662 - DNA, 1962 bp, Artificial Sequence
  derived and/or modified sequence
atggccgacatcaagaccggcatcttcgccaagaacgtgcagaagagactgaacagagcccaggagaaggtgctgcagaagctgggcaaggccgacgagaccaaggacgagcagttcgaggagtacgtgcagaacttcaagagacaggaggccgagggcaccagactgcagagagagctgagaggctacctggccgccatcaagggcatgcaggaggccagcatgaagctgaccgagagcctgcacgaggtgtacgagcccgactggtacggcagagaggacgtgaagatggtgggcgagaagtgcgacgtgctgtgggaggacttccaccagaagctggtggacggcagcctgctgaccctggacacctacctgggccagttccccgacatcaagaacagaatcgccaagagaagcagaaagctggtggactacgacagcgccagacaccacctggaggccctgcagagcagcaagagaaaggacgagagcagaatcagcaaggccgaggaggagttccagaaggcccagaaggtgttcgaggagttcaacgtggacctgcaggaggagctgcccagcctgtggagcagaagagtgggcttctacgtgaacaccttcaagaacgtgagcagcctggaggccaagttccacaaggagatcgccgtgctgtgccacaagctgtacgaggtgatgaccaagctgggcgaccagcacgccgacaaggccttcaccatccagggcgcccccagcgacagcggccccctgagaatcgccaagacccccagcccccccgaggagcccagccccctgcccagccccaccgccagccccaaccacaccctggcccccgccagccccgcccccgccagacccagaagccccagccagaccagaaagggcccccccgtgccccccctgcccaaggtgacccccaccaaggagctgcagcaggagaacatcatcagcttcttcgaggacaacttcgtgcccgagatcagcgtgaccacccccagccagaacgaggtgcccgaggtgaagaaggaggagaccctgctggacctggacttcgaccccttcaagcccgaggtgacccccgccggcagcgccggcgtgacccacagccccatgagccagaccctgccctgggacctgtggaccgccggcgtggaggcctgccagaaggccagcggcggcagcttcaacggcttcacccagccccaggacaccagcctgttcaccatgcagaccgaccagagcatgatctgcaacctgatcatccccggcgccgacgccgacgccgccgtgggcaccctggtgagcgccgccgagggcgcccccggcgaggaggccgaggccgagaaggccaccgtgcccgccggcgagggcgtgagcctggaggaggccaagatcggcaccgagaccaccgagggcgccgagagcgcccagcccgaggccgaggagctggaggccaccgtgccccaggagaaggtgatccccagcgtggtgatcgagcccgccagcaaccacgaggaggagggcgagaacgagatcaccatcggcgccgagcccaaggagaccaccgaggacgccgccccccccggccccaccagcgagacccccgagctggccaccgagcagaagcccatccaggacccccagcccacccccagcgcccccgccatgggcgccgccgaccagctggccagcgccagagaggccagccaggagctgccccccggcttcctgtacaaggtggagaccctgcacgacttcgaggccgccaacagcgacgagctgaccctgcagagaggcgacgtggtgctggtggtgcccagcgacagcgaggccgaccaggacgccggctggctggtgggcgtgaaggagagcgactggctgcagtacagagacctggccacctacaagggcctgttccccgagaacttcaccagaagactggactag

SEQ ID NO: 238663 - protein, 298 aa, Artificial Sequence
  derived and/or modified sequence
MGPKDSAKCLHRGPQPSHWAAGDGPTQERCGPRSLGSPVLGLDTCRAWDHVDGQILGQLRPLTEEEEEEGAGATLSRGPAFPGMGSEELRLASFYDWPLTAEVPPELLAAAGFFHTGHQDKVRCFFCYGGLQSWKRGDDPWTEHAKWFPSCQFLLRSKGRDFVHSVQETHSQLLGSWDPWEEPEDAAPVAPSVPASGYPELPTPRREVQSESAQEPGGVSPAEAQRAWWVLEPPGARDVEAQLRRLQEERTCKVCLDRAVSIVFVPCGHLVCAECAPGLQLCPICRAPVRSRVRTFLS

SEQ ID NO: 238664 - DNA, 897 bp, Artificial Sequence
  derived and/or modified sequence
atgggtcctaaagacagtgccaagtgtctgcacagggggcctcaaccaagtcattgggctgccggcgatgggccaactcaagaacgatgcggtccgaggagcctaggatcccctgtcttgggattagacacctgtcgtgcctgggaccatgtggatggtcaaatcctgggccagctgcgccccctcacggaggaggaagaagaggagggagctggcgcaaccctatccagaggacccgcatttccggggatgggcagcgaggagctgcgactggcctcgttttacgactggccgctgacagccgaagtccctccagagctgctggccgccgctggattttttcatacggggcaccaagacaaggtaagatgctttttctgttatggcggcctgcagtcgtggaaacggggcgatgacccttggacagaacacgccaaatggtttccctcctgccaattcctcctgcgctcaaagggtagagatttcgtccactccgtgcaggagacacactctcagctcttgggctcctgggatccatgggaagaacccgaagacgcagccccagttgcaccaagcgtccccgcatccgggtatccggagctgcccacccccaggagagaagtgcagtccgagtccgcacaggagcccggcggtgtcagtccagctgaggcccagcgtgcctggtgggtgctggagccaccaggtgcaagagatgtcgaagcgcaattgcgccgtttgcaagaagagcggacatgtaaggtgtgcctggaccgcgcagtctctatcgtcttcgtgccttgcgggcacctcgtgtgcgcagagtgcgcccctgggctccagctttgcccaatttgcagggctccagtgaggagccgcgtgagaacctttctatcttag

SEQ ID NO: 238665 - DNA, 897 bp, Artificial Sequence
  derived and/or modified sequence
atgggccccaaggacagcgccaagtgcctgcaccggggcccccagcccagccactgggccgctggagatggccccacccaggagcgctgtggccccaggagcctgggcagccctgtgctgggcctggacacctgccgggcctgggaccacgtggatggccagatcctgggccagctgcggcccctgacagaggaggaggaggaggagggcgctggggccaccctgagccggggccctgccttccctggcatgggcagcgaggagctgcggctggccagcttctatgactggcccctgacagctgaggtgcccccagagctgctggccgctgctggcttcttccacacaggccaccaggacaaggtgcgctgcttcttctgctacggcggcctgcagagctggaagagaggagatgacccctggacagagcacgccaagtggttccccagctgccagttcctgctgcggagcaagggccgggactttgtgcacagcgtgcaggagacccacagccagctgctgggctcctgggacccctgggaggagccagaagatgctgcccctgtggcccccagcgtgcctgccagcggctacccagagctgcccaccccaagaagagaggtgcagagcgagagcgcccaggagcccggcggcgtgtccccagctgaggcccagagggcctggtgggtgctggagcccccaggggccagagatgtggaggcccagctgcggcggctgcaggaggagaggacctgcaaggtgtgcctggacagagctgtgtccatcgtgtttgtgccctgtggccacctggtgtgtgccgagtgtgcccctggcctgcagctgtgccccatctgccgggcccctgtgcgcagccgggtgaggaccttcctgtcctag

SEQ ID NO: 238666 - DNA, 897 bp, Artificial Sequence
  derived and/or modified sequence
atgggccccaaggacagcgccaagtgcctgcaccggggcccccagccatcacactgggctgccggtgacggccctactcaagaacggtgtgggcctaggagcttgggttctcccgtgctgggactcgacacatgccgtgcctgggaccatgtggatgggcagattctgggtcagctgcgccccctgaccgaggaggaggaggaggaaggcgccggcgctactttgtctcggggccccgcctttcccggcatgggatctgaggagctacggctggcaagcttttacgattggccactcactgctgaggtccctcccgaactccttgctgctgctggctttttccacactggccatcaagacaaggtgcgatgtttcttctgttacgggggccttcaatcttggaaaagaggggatgacccctggacggaacatgctaaatggttccccagctgccagtttttgctgagaagcaagggaagggatttcgtccactctgtccaagagacccattctcaactgctgggctcttgggacccctgggaggagcccgaggatgctgcgccagtggcacccagtgtcccagcgtcaggctaccctgagctaccgaccccaaggcgggaggttcagtccgaaagtgcccaggaacccgggggtgtatccccagccgaggcgcagcgggcttggtgggtgctggagccccctggtgctagagacgttgaggctcaactgcgtagactgcaagaagagagaacatgcaaggtgtgcctggatagagcagtctccattgtcttcgtgccttgtgggcaccttgtttgtgctgagtgcgctcctgggttacagctctgcccaatctgccgggccccggtgcggtccagagtcagaacatttttgagctag

SEQ ID NO: 238667 - DNA, 897 bp, Artificial Sequence
  derived and/or modified sequence
atggggcctaaggacagtgctaagtgcctgcatcggggaccacagcctagccattgggcagccggtgacggtccaacacaagagcggtgcggccctcgcagcctgggctcaccagttctagggcttgatacctgtcgggcatgggatcacgtagacggacagatcttgggccagctgcgacctctcactgaagaggaagaggaagagggtgcaggggctaccctatctcggggacccgcattcccaggaatgggctcagaagagttgaggctggccagcttctacgattggccgctgaccgccgaagtccctcccgaactgttggccgctgcagggttctttcacaccggacaccaagacaaggtccgatgctttttctgctacggcggactacagtcctggaaacgaggcgacgacccctggacggaacatgcaaagtggtttccttcctgccagtttctcctgcggtcgaagggccgagactttgtgcactcagtccaggaaactcacagccagttactgggtagctgggacccgtgggaggagccagaggatgctgcacccgtcgcaccctctgtgcccgcttccggatatcctgagctccctacaccccgaagggaagtacagagcgagtccgcccaggagcctggaggcgtaagtcctgccgaggctcagagggcctggtgggttctggagccccctggagctcgggatgttgaggctcagctgcgcagactgcaggaggagagaacctgcaaggtgtgtctcgatcgggcagttagtatagtgttcgtgccgtgtggtcatttggtatgtgctgagtgtgcccctggactacaactgtgccctatttgcagggctcctgttcgttcccgcgtgcgcacattcctctcttag

SEQ ID NO: 238668 - DNA, 897 bp, Artificial Sequence
  derived and/or modified sequence
atgggccccaaggacagcgccaagtgcctgcacagaggcccccagcccagccactgggccgccggcgacggccccacccaggagagatgcggccccagaagcctgggcagccccgtgctgggcctggacacctgcagagcctgggaccacgtggacggccagatcctgggccagctgagacccctgaccgaggaggaggaggaggagggcgccggcgccaccctgagcagaggccccgccttccccggcatgggcagcgaggagctgagactggccagcttctacgactggcccctgaccgccgaggtgccccccgagctgctggccgccgccggcttcttccacaccggccaccaggacaaggtgagatgcttcttctgctacggcggcctgcagagctggaagagaggcgacgacccctggaccgagcacgccaagtggttccccagctgccagttcctgctgagaagcaagggcagagacttcgtgcacagcgtgcaggagacccacagccagctgctgggcagctgggacccctgggaggagcccgaggacgccgcccccgtggcccccagcgtgcccgccagcggctaccccgagctgcccacccccagaagagaggtgcagagcgagagcgcccaggagcccggcggcgtgagccccgccgaggcccagagagcctggtgggtgctggagccccccggcgccagagacgtggaggcccagctgagaagactgcaggaggagagaacctgcaaggtgtgcctggacagagccgtgagcatcgtgttcgtgccctgcggccacctggtgtgcgccgagtgcgcccccggcctgcagctgtgccccatctgcagagcccccgtgagaagcagagtgagaaccttcctgagctag

SEQ ID NO: 238669 - DNA, 1368 bp, Artificial Sequence
  derived and/or modified sequence
gaccccagaggccaccctggccacttccagaaagctgtgggccctgggatactcccctcccagggtgtctggtggcaggcctgtgcctatccctgctgtccccagggtgggccccgggggtcaggagctccagaagggccagctgggcatattctgagattggccatcagcccccatttctgctgcaaacctggtcagagccagtgttccctccatgggacctaaagacagtgccaagtgcctgcaccgtggaccacagccgagccactgggcagccggtgatggtcccacgcaggagcgctgtggaccccgctctctgggcagccctgtcctaggcctggacacctgcagagcctgggaccacgtggatgggcagatcctgggccagctgcggcccctgacagaggaggaagaggaggagggcgccggggccaccttgtccagggggcctgccttccccggcatgggctctgaggagttgcgtctggcctccttctatgactggccgctgactgctgaggtgccacccgagctgctggctgctgccggcttcttccacacaggccatcaggacaaggtgaggtgcttcttctgctatgggggcctgcagagctggaagcgcggggacgacccctggacggagcatgccaagtggttccccagctgtcagttcctgctccggtcaaaaggaagagactttgtccacagtgtgcaggagactcactcccagctgctgggctcctgggacccgtgggaagaaccggaagacgcagcccctgtggccccctccgtccctgcctctgggtaccctgagctgcccacacccaggagagaggtccagtctgaaagtgcccaggagccaggaggggtcagtccagccgaggcccagagggcgtggtgggttcttgagcccccaggagccagggatgtggaggcgcagctgcggcggctgcaggaggagaggacgtgcaaggtgtgcctggaccgcgccgtgtccatcgtctttgtgccgtgcggccacctggtctgtgctgagtgtgcccccggcctgcagctgtgccccatctgcagagcccccgtccgcagccgcgtgcgcaccttcctgtcctaggccaggtgccatggccggccaggtgggctgcagagtgggctccctgcccctctctgcctgttctggactgtgttctgggcctgctgaggatggcagagctggtgtccatccagcactgaccagccctgattccccgaccaccgcccagggtggagaaggaggcccttgcttggcgtgggggatggcttaactgtacctgtttggatgcttctgaatagaaataaagtgggttttccctggaggtacccagcagcctg

SEQ ID NO: 238670 - protein, 624 aa, Artificial Sequence
  derived and/or modified sequence
MQKSSTCSFMYGELTDKKTIEKVRQTFDNYESNCFEVLLYKKNRTPVWFYMQIAPIRNEHEKVVLFLCTFKDITLFKQPIEDDSTKGWTKFARLTRALTNSRSVLQQLTPMNKTEVVHKHSRLAEVLQLGSDILPQYKQEAPKTPPHIILHYCAFKTTWDWVILILTFYTAIMVPYNVSFKTKQNNIAWLVLDSVVDVIFLVDIVLNFHTTFVGPGGEVISDPKLIRMNYLKTWFVIDLLSCLPYDIINAFENVDEGISSLFSSLKVVRLLRLGRVARKLDHYLEYGAAVLVLLVCVFGLVAHWLACIWYSIGDYEVIDEVTNTIQIDSWLYQLALSIGTPYRYNTSAGIWEGGPSKDSLYVSSLYFTMTSLTTIGFGNIAPTTDVEKMFSVAMMMVGSLLYATIFGNVTTIFQQMYANTNRYHEMLNNVRDFLKLYQVPKGLSERVMDYIVSTWSMSKGIDTEKVLSICPKDMRADICVHLNRKVFNEHPAFRLASDGCLRALAVEFQTIHCAPGDLIYHAGESVDALCFVVSGSLEVIQDDEVVAILGKGDVFGDIFWKETTLAHACANVRALTYCDLHIIKREALLKVLDFYTAFANSFSRNLTLTCNLRKRGWFSMANAL

SEQ ID NO: 238671 - protein, 611 aa, Artificial Sequence
  derived and/or modified sequence
MPGGKRGLVAPQNTFLENIVRRSSESSFLLGNAQIVDWPVVYSNDGFCKLSGYHRADVMQKSSTCSFMYGELTDKKTIEKVRQTFDNYESNCFEVLLYKKNRTPVWFYMQIAPIRNEHEKVVLFLCTFKDITLFKQPIEDDSTKGWTKFARLTRALTNSRSVLQQLTPMNKTEVVHKHSRLAEVLQLGSDILPQYKQEAPKTPPHIILHYCAFKTTWDWVILILTFYTAIMVPYNVSFKTKQNNIAWLVLDSVVDVIFLVDIVLNFHTTFVGPGGEVISDPKLIRMNYLKTWFVIDLLSCLPYDIINAFENVDEGISSLFSSLKVVRLLRLGRVARKLDHYLEYGAAVLVLLVCVFGLVAHWLACIWYSIGDYEVIDEVTNTIQIDSWLYQLALSIGTPYRYNTSAGIWEGGPSKDSLYVSSLYFTMTSLTTIGFGNIAPTTDVEKMFSVAMMMVGSLLYATIFGNVTTIFQQMYANTNRYHEMLNNVRDFLKLYQVPKGLSERVMDYIVSTWSMSKGIDTEKVLSICPKDMRADICVHLNRKVFNEHPAFRLASDGCLRALAVEFQTIHCAPGDLIYHAGESVDALCFVVSGSLEVIQDDEVVAILDHLS

SEQ ID NO: 238672 - protein, 988 aa, Artificial Sequence
  derived and/or modified sequence
MPGGKRGLVAPQNTFLENIVRRSSESSFLLGNAQIVDWPVVYSNDGFCKLSGYHRADVMQKSSTCSFMYGELTDKKTIEKVRQTFDNYESNCFEVLLYKKNRTPVWFYMQIAPIRNEHEKVVLFLCTFKDITLFKQPIEDDSTKGWTKFARLTRALTNSRSVLQQLTPMNKTEVVHKHSRLAEVLQLGSDILPQYKQEAPKTPPHIILHYCAFKTTWDWVILILTFYTAIMVPYNVSFKTKQNNIAWLVLDSVVDVIFLVDIVLNFHTTFVGPGGEVISDPKLIRMNYLKTWFVIDLLSCLPYDIINAFENVDEGISSLFSSLKVVRLLRLGRVARKLDHYLEYGAAVLVLLVCVFGLVAHWLACIWYSIGDYEVIDEVTNTIQIDSWLYQLALSIGTPYRYNTSAGIWEGGPSKDSLYVSSLYFTMTSLTTIGFGNIAPTTDVEKMFSVAMMMVGSLLYATIFGNVTTIFQQMYANTNRYHEMLNNVRDFLKLYQVPKGLSERVMDYIVSTWSMSKGIDTEKVLSICPKDMRADICVHLNRKVFNEHPAFRLASDGCLRALAVEFQTIHCAPGDLIYHAGESVDALCFVVSGSLEVIQDDEVVAILGKGDVFGDIFWKETTLAHACANVRALTYCDLHIIKREALLKVLDFYTAFANSFSRNLTLTCNLRKRIIFRKISDVKKEEEERLRQKNEVTLSIPVDHPVRKLFQKFKQQKELRNQGSTQGDPERNQLQVESRSLQNGASITGTSVVTVSQITPIQTSLAYVKTSESLKQNNRDAMELKPNGGADQKCLKVNSPIRMKNGNGKGWLRLKNNMGAHEEKKEDWNNVTKAESMGLLSEDPKSSDSENSVTKNPLRKTDSCDSGITKSDLRLDKAGEARSPLEHSPIQADAKHPFYPIPEQALQTTLQEVKHELKEDIQLLSCRMTALEKQVAEILKILSEKSVPQASSPKSQMPLQVPPQIPCQDIFSVSRPESPESDKDEIHF

SEQ ID NO: 238673 - protein, 422 aa, Artificial Sequence
  derived and/or modified sequence
MQKSSTCSFMYGELTDKKTIEKVRQTFDNYESNCFEVLLYKKNRTPVWFYMQIAPIRNEHEKVVLFLCTFKDITLFKQPIEDDSTKGWTKFARLTRALTNSRSVLQQLTPMNKTEVVHKHSRLAEVLQLGSDILPQYKQEAPKTPPHIILHYCAFKTTWDWVILILTFYTAIMVPYNVSFKTKQNNIAWLVLDSVVDVIFLVDIVLNFHTTFVGPGGEVISDPKLIRMNYLKTWFVIDLLSCLPYDIINAFENVDEGISSLFSSLKVVRLLRLGRVARKLDHYLEYGAAVLVLLVCVFGLVAHWLACIWYSIGDYEVIDEVTNTIQIDSWLYQLALSIGTPYRYNTSAGIWEGGPSKDSLYVSSLYFTMTSLTTIGFGNIAPTTDVEKMFSVAMMMVGCKYFNFFIENYCYWQFSWLQSQIG

SEQ ID NO: 238674 - DNA, 1875 bp, Artificial Sequence
  derived and/or modified sequence
atgcagaagagcagcacctgcagcttcatgtacggcgagctgaccgacaagaagaccatcgagaaggtgagacagaccttcgacaactacgagagcaactgcttcgaggtgctgctgtacaagaagaacagaacccccgtgtggttctacatgcagatcgcccccatcagaaacgagcacgagaaggtggtgctgttcctgtgcaccttcaaggacatcaccctgttcaagcagcccatcgaggacgacagcaccaagggctggaccaagttcgccagactgaccagagccctgaccaacagcagaagcgtgctgcagcagctgacccccatgaacaagaccgaggtggtgcacaagcacagcagactggccgaggtgctgcagctgggcagcgacatcctgccccagtacaagcaggaggcccccaagacccccccccacatcatcctgcactactgcgccttcaagaccacctgggactgggtgatcctgatcctgaccttctacaccgccatcatggtgccctacaacgtgagcttcaagaccaagcagaacaacatcgcctggctggtgctggacagcgtggtggacgtgatcttcctggtggacatcgtgctgaacttccacaccaccttcgtgggccccggcggcgaggtgatcagcgaccccaagctgatcagaatgaactacctgaagacctggttcgtgatcgacctgctgagctgcctgccctacgacatcatcaacgccttcgagaacgtggacgagggcatcagcagcctgttcagcagcctgaaggtggtgagactgctgagactgggcagagtggccagaaagctggaccactacctggagtacggcgccgccgtgctggtgctgctggtgtgcgtgttcggcctggtggcccactggctggcctgcatctggtacagcatcggcgactacgaggtgatcgacgaggtgaccaacaccatccagatcgacagctggctgtaccagctggccctgagcatcggcaccccctacagatacaacaccagcgccggcatctgggagggcggccccagcaaggacagcctgtacgtgagcagcctgtacttcaccatgaccagcctgaccaccatcggcttcggcaacatcgcccccaccaccgacgtggagaagatgttcagcgtggccatgatgatggtgggcagcctgctgtacgccaccatcttcggcaacgtgaccaccatcttccagcagatgtacgccaacaccaacagataccacgagatgctgaacaacgtgagagacttcctgaagctgtaccaggtgcccaagggcctgagcgagagagtgatggactacatcgtgagcacctggagcatgagcaagggcatcgacaccgagaaggtgctgagcatctgccccaaggacatgagagccgacatctgcgtgcacctgaacagaaaggtgttcaacgagcaccccgccttcagactggccagcgacggctgcctgagagccctggccgtggagttccagaccatccactgcgcccccggcgacctgatctaccacgccggcgagagcgtggacgccctgtgcttcgtggtgagcggcagcctggaggtgatccaggacgacgaggtggtggccatcctgggcaagggcgacgtgttcggcgacatcttctggaaggagaccaccctggcccacgcctgcgccaacgtgagagccctgacctactgcgacctgcacatcatcaagagagaggccctgctgaaggtgctggacttctacaccgccttcgccaacagcttcagcagaaacctgaccctgacctgcaacctgagaaagagaggctggttcagcatggccaacgccctgtag

SEQ ID NO: 238675 - DNA, 1875 bp, Artificial Sequence
  derived and/or modified sequence
atgcagaagtcatccacctgttcatttatgtatggtgagctgaccgataagaaaactattgaaaaagtgcgtcaaacctttgacaactatgaatctaactgctttgaggttctcctgtataaaaagaatcgaactcccgtgtggttctatatgcagatcgcccctattcgaaatgagcatgagaaggtcgtgctcttcctttgtacatttaaagacatcactctgttcaagcagcctatcgaggatgactctacgaaaggctggacaaagttcgcccggctcactagagcccttacaaacagcaggagtgtcctgcagcaactcactccaatgaataagactgaggttgtgcacaaacactcgcgtctcgcggaggttctgcaactgggctctgacattctgcctcagtacaaacaagaggctcccaaaaccccccctcacatcatcctgcactactgcgcatttaagaccacctgggactgggtcattctcatactgactttctacaccgcaatcatggtcccatataacgtcagcttcaaaaccaagcagaataacattgcttggttagtcttggattctgttgtcgatgtaatcttccttgtggacattgtcttaaatttccataccactttcgttgggccgggaggtgaagtcatctccgatcctaaactcatcagaatgaactacctgaaaacttggtttgtgatagatctgctgtcttgcctcccatatgatattatcaacgcgttcgagaatgtcgacgaagggattagtagtctgttcagcagtctgaaggtggtccgtctgctgaggctggggcgagttgcaaggaaactggaccattatttggagtatggtgcggcagtgctggtgctgcttgtgtgtgtctttgggctggtggcacactggctggcgtgcatttggtactcaatcggagattatgaagtcatcgacgaagtcacaaatacaatccagatcgattcttggctataccagttggctttgtctattggaacaccatataggtacaacacaagtgctggcatatgggaggggggaccctcgaaagacagtctttacgtctcctccctgtatttcactatgacttccctgacaacaatagggttcggtaacatagcccccactactgacgtagaaaagatgttctccgtggcaatgatgatggtcggcagtctcttatacgccaccatcttcggtaacgtcacaacaattttccaacagatgtacgccaacactaacagatatcatgagatgcttaacaacgtgagggacttcctcaagttgtaccaagtgccgaaaggtctgtccgaacgcgtgatggactacatcgtgagcacctggtctatgagcaagggtattgacacagaaaaggtcctgtcaatatgtccaaaagacatgagagcagacatttgcgtgcacctgaatcgtaaggtattcaacgagcatccggccttccgactggctagcgacggttgtctccgcgctctagccgttgaattccagaccatacactgcgccccgggcgacctcatttatcacgcaggggaaagcgtagatgcactttgcttcgtggtctccgggtccctggaggttatccaggacgatgaagtggttgccatcctgggtaagggagatgtattcggagacattttttggaaagagacaaccctggcccatgcatgtgctaatgtgcgtgccttaacatactgtgacctgcacatcatcaaaagggaggccctgttgaaagtgcttgatttttacaccgctttcgctaacagctttagccgcaaccttaccctgacgtgtaatctaagaaagagggggtggttttcaatggctaatgccctgtag

SEQ ID NO: 238676 - DNA, 1875 bp, Artificial Sequence
  derived and/or modified sequence
atgcagaagagcagcacctgcagcttcatgtatggagagctgacagacaagaagaccatcgagaaggtgcggcagacctttgacaactatgagagcaactgctttgaggtgctgctgtacaagaagaacagaacacctgtgtggttctacatgcagatcgcccccatcagaaatgagcacgagaaggtggtgctcttcctgtgcaccttcaaggacatcaccctcttcaagcagcccattgaagatgacagcaccaagggctggaccaagtttgcccggctgacccgggccctgaccaacagccgctctgtgctgcagcagctgacccccatgaacaagacagaggtggtgcacaagcacagccggctggccgaggtgctgcagctgggcagtgacatcctgccccagtacaagcaggaggcccccaagaccccaccccacatcatcctgcactactgtgccttcaagaccacctgggactgggtgatcctgatcctgaccttctacacagccatcatggtgccctacaacgtgtccttcaagaccaagcagaacaacatcgcctggctggtgctggacagcgtggtggatgtgatcttcctggtggacatcgtgctgaacttccacaccacctttgtgggccctggaggagaggtgatcagtgaccccaagctgatccgcatgaactacctgaagacctggtttgtgattgacctgctgagctgcctgccctatgacatcatcaatgcctttgaaaatgtggatgagggcatcagcagcctcttcagcagcctgaaggtggtgcggctgctgcggctgggccgggtggccaggaagctggaccactacctggagtatggagctgctgtgctggtgctgctggtgtgtgtgtttggcctggtggcccactggctggcctgcatctggtacagcatcggggactatgaggtgattgatgaggtgaccaacaccatccagattgacagctggctgtaccagctggccctgagcatcggcaccccctaccgctacaacaccagcgctggcatctgggagggcggccccagcaaggacagcctgtatgtgagcagcctgtacttcaccatgaccagcctgaccaccatcggctttggaaacatcgcccccaccacagatgtggagaagatgttttctgtggccatgatgatggtgggcagcctgctgtatgccaccatctttggaaatgtgaccaccatcttccagcagatgtatgccaacaccaaccgctaccacgagatgctgaacaacgtgcgggacttcctgaagctgtaccaggtgcccaagggcctgtctgagcgggtgatggactacatcgtgtccacctggagcatgagcaaaggaattgacacagagaaggtgctgagcatctgccccaaggacatgagagctgacatctgtgtgcacctgaacaggaaggtgttcaatgagcacccagccttccggctggccagtgatggctgcctgcgggccctggccgtggagttccagaccatccactgtgcccctggggacctgatctaccacgccggggagagcgtggatgccctgtgctttgtggtgtctggcagcctggaggtgatccaggatgatgaggtggtggccatcctgggcaaaggagatgtgtttggagacatcttctggaaggagaccaccctggcccacgcctgtgccaacgtgcgggccctgacctactgtgacctgcacatcatcaagcgggaggccctgctgaaggtgctggacttctacacagcctttgccaacagcttcagcaggaacctgaccctgacctgcaacctgaggaagaggggctggttctccatggccaatgccctgtag

SEQ ID NO: 238677 - DNA, 1875 bp, Artificial Sequence
  derived and/or modified sequence
atgcagaagagcagcacctgcagcttcatgtacggcgagctgaccgataagaaaaccatagaaaaagtacgacagaccttcgataattatgagtctaattgtttcgaagtgcttctgtacaaaaagaatagaacacctgtgtggttctacatgcagatagcccctattcggaatgagcacgagaaagtggtgctgtttctttgtacattcaaagatataactctatttaaacagcctatcgaagatgattccactaagggttggactaaattcgccaggttgacacgtgccctcactaacagccgcagcgtgctccagcagcttactcccatgaataagaccgaggttgtgcacaaacacagcaggctcgcagaggttctgcaattaggatcagatatcctgccccagtataagcaagaggctccgaaaactcccccccatatcatcctccactactgcgcttttaagaccacatgggattgggttatactaatcctgacattttatactgccataatggtgccttacaatgtgtccttcaagacaaaacaaaacaatattgcttggcttgtcctcgatagtgtcgtggacgtgatatttttggttgacattgtcctgaatttccacaccacatttgtcggcccaggaggcgaggtcatctcagatcctaaactgatccgtatgaactacttaaagacatggttcgtgatcgatctcctgtcttgtctaccatacgatatcattaatgcatttgagaacgttgatgagggcatcagttccctgttcagcagcttgaaggtggtgcggctattgcgcttaggaagggtggcgaggaaactcgaccattatttggaatacggcgccgccgtcctagtgttacttgtatgcgtgttcggattagtggctcactggctggcctgtatatggtactcaatcggcgattacgaggtgatcgacgaggttaccaacacaatccagatcgacagttggctgtaccaacttgccttaagcataggcactccctacagatataataccagcgccggtatatgggagggcgggccgtctaaagatagtctgtacgtttccagcctctatttcacgatgacaagcctcactaccattggattcggaaatattgcccctactaccgacgttgagaagatgtttagcgtagccatgatgatggttggatcgctcctgtacgcgaccatatttggcaatgtgacaacaatttttcagcagatgtacgctaacacgaacaggtaccacgagatgctcaacaacgtcagggacttccttaagttgtatcaggtgcccaaaggtctcagtgaacgagtgatggattacatagtgtccacatggtcaatgtctaaaggtattgacaccgagaaagtgttaagcatttgcccgaaagacatgcgggccgatatttgtgtgcacttgaacagaaaggtgtttaacgaacatccagcttttaggctggcttctgacggctgcctgagggccctcgcggttgagtttcagacaatccactgcgctcctggcgatttaatctaccacgccggagaatcagttgatgccctgtgtttcgtagtgagcggctccctcgaggtgatccaggacgacgaggtcgtggccattctcggcaagggggacgtgttcggcgatatcttttggaaggaaaccacacttgcgcatgcatgcgcaaatgttcgggcgcttacttactgcgaccttcacataataaagagggaagcactgctaaaagtgttggacttctatactgcatttgcgaatagtttctcacgtaatttgaccctcacatgtaatctgcggaagcgcgggtggttctccatggccaatgcgctgtag

SEQ ID NO: 238678 - DNA, 1875 bp, Artificial Sequence
  derived and/or modified sequence
atgcagaagagctcaacatgtagtttcatgtacggtgagctgactgataaaaagacaattgagaaggtcagacagacattcgataactacgagtctaactgcttcgaggttcttctctataagaagaatcgtactcccgtatggttttatatgcaaatcgccccaattcgaaatgagcacgaaaaagtggtgctcttcctctgtacttttaaagatattactttgttcaagcagcctatcgaagacgatagcacaaaaggttggacaaagttcgccaggcttaccagagccctgacgaactcaagatccgtactgcaacagctcacgccaatgaataaaactgaggtcgtccacaagcattctagactggccgaagtcttgcaactgggctccgatatcctgcctcagtataagcaggaagccccaaaaactccccctcacatcatcttgcattattgcgcattcaagactacttgggactgggtgattctgattttgaccttctacacggctattatggtgccctacaacgtctccttcaagactaagcagaacaatatcgcctggctggttctcgattctgtggtggacgttatctttctcgtcgacattgtgcttaactttcacacaacattcgtggggcctgggggagaagtgatctcggacccgaagttgatccgcatgaactacttgaagacatggttcgtaatcgatctgctgagctgtctgccctacgacatcatcaatgctttcgagaacgtagacgaaggcatcagtagcctgtttagcagtctgaaagtcgtgcgactgctgaggctgggccgagttgcaaggaaactggatcactacctggagtacggtgccgcagtgttggtactgctagtgtgcgtgttcggtctggtcgcccactggcttgcttgtatttggtactccatcggtgattatgaggtgattgacgaggtgactaatacaatccagattgactcgtggctgtatcagctggctttgagcattggcactccttaccgttataatacctccgctggcatctgggagggcggaccgagcaaggatagtctgtacgtcagttccctttattttactatgacctctttgactactatcgggttcgggaacattgcacctactacagatgttgagaagatgttttccgtggccatgatgatggtgggatctctactgtatgcaaccatatttggcaacgtgaccacaatcttccagcaaatgtatgccaacaccaaccgataccatgaaatgcttaataatgtgagggactttctgaagttataccaggtacctaaaggcctgagcgagagagtgatggactatatagtttccacttggtccatgagcaaagggatcgacaccgaaaaagttctctcaatctgccccaaggacatgcgggcagatatttgcgtccacctgaaccgcaaagttttcaacgaacacccagctttccgcctcgcttctgacggatgcctgcgagcgttagcggtggagttccagacaattcactgcgccccaggagacctgatctatcatgccggtgaatccgtggatgcactgtgtttcgtcgtgagtggttcattggaagttatccaggacgatgaggtggttgcaattctcggaaaaggggatgtgtttggagacatcttctggaaagagacgaccctggcgcacgcatgcgctaacgtaagagccctgacgtactgcgatctccatatcattaagagagaagctttactcaaggtactcgatttctacacagcgtttgcaaattcgttcagtcggaatcttactctgacttgtaatttgcgtaaacggggatggtttagtatggccaatgctctatag

SEQ ID NO: 238679 - DNA, 2490 bp, Artificial Sequence
  derived and/or modified sequence
tgagcaaatgaaagacaccaacaaaatccaacacataaagattcacacttgaaacagattaatcaggaatcaagtttcttactgggaaatgcccagattgtggattggcctgtagtttatagtaatgacggtttttgtaaactctctggatatcatcgagctgacgtcatgcagaaaagcagcacttgcagttttatgtatggggaattgactgacaagaagaccattgagaaagtcaggcaaacttttgacaactacgaatcaaactgctttgaagttcttctgtacaagaaaaacagaacccctgtttggttttatatgcaaattgcaccaataagaaatgaacatgaaaaggtggtcttgttcctgtgtactttcaaggatattacgttgttcaaacagccaatagaggatgattcaacaaaaggttggacgaaatttgcccgattgacacgggctttgacaaatagccgaagtgttttgcagcagctcacgccaatgaataaaacagaggtggtccataaacattcaagactagctgaagttcttcagctgggatcagatatccttcctcagtataaacaagaagcgccaaagacgccaccacacattattttacattattgtgcttttaaaactacttgggattgggtgattttaattcttaccttctacaccgccattatggttccttataatgtttccttcaaaacaaagcagaacaacatagcctggctggtactggatagtgtggtggacgttatttttctggttgacatcgttttaaattttcacacgactttcgtggggcccggtggagaggtcatttctgaccctaagctcataaggatgaactatctgaaaacttggtttgtgatcgatctgctgtcttgtttaccttatgacatcatcaatgcctttgaaaatgtggatgagggaatcagcagtctcttcagttctttaaaagtggtgcgtctcttacgactgggccgtgtggctaggaaactggaccattacctagaatatggagcagcagtcctcgtgctcctggtgtgtgtgtttggactggtggcccactggctggcctgcatatggtatagcatcggagactacgaggtcattgatgaagtcactaacaccatccaaatagacagttggctctaccagctggctttgagcattgggactccatatcgctacaataccagtgctgggatatgggaaggaggacccagcaaggattcattgtacgtgtcctctctctactttaccatgacaagccttacaaccataggatttggaaacatagctcctaccacagatgtggagaagatgttttcggtggctatgatgatggttggctctcttctttatgcaactatttttggaaatgttacaacaattttccagcaaatgtatgccaacaccaaccgataccatgagatgctgaataatgtacgggacttcctaaaactctatcaggtcccaaaaggccttagtgagcgagtcatggattatattgtctcaacatggtccatgtcaaaaggcattgatacagaaaaggtcctctccatctgtcccaaggacatgagagctgatatctgtgttcatctaaaccggaaggtttttaatgaacatcctgcttttcgattggccagcgatgggtgtctgcgcgccttggcggtagagttccaaaccattcactgtgctcccggggacctcatttaccatgctggagaaagtgtggatgccctctgctttgtggtgtcaggatccttggaagtcatccaggatgatgaggtggtggctattttagggaagggtgatgtatttggagacatcttctggaaggaaaccacccttgcccatgcatgtgcgaacgtccgggcactgacgtactgtgacctacacatcatcaagcgggaagccttgctcaaagtcctggacttttatacagcttttgcaaactccttctcaaggaatctcactcttacttgcaatctgaggaaacggggatggttctccatggcaaacgctctgtgaagggtgacctgctgggtgtgaaactgctgcacgacttcctacttcacccattcatctatccgagttttcacggagtccaggagaaagtataaaagttaccttgaggagcaggagagtggaatggttaagactgtttggaatctgaccccttggatttgcatcctggacacacagttgtgtgacctaagggaaaccacttaaactctttatgcctcaatttgcttctctgtgataaaagaataatatgacctgtgtcctacagtagagaataataggtcctagctcgtaaaatgttctcattccatgacacttaaatgagaaaatacgtgtgtggaagtgaccactttgctatatacagatattttattatcattttacaatgccattattttgttccatagtcaaaagtaaaataaaacaaatgtcaatttgtcttattctaatcct

SEQ ID NO: 238680 - DNA, 2967 bp, Artificial Sequence
  derived and/or modified sequence
atgccaggcgggaagcggggtctggtcgcgccccagaacaccttcttggagaacattgtcagacgtagctctgagtcatcttttttacttgggaatgcccaaattgtggattggccagtggtgtacagcaatgatggattctgtaaattgtcagggtaccatagagcagacgttatgcagaaaagcagcacttgttccttcatgtacggcgagcttactgataagaaaaccatcgagaaagtcaggcagacatttgataattacgagtctaactgtttcgaggtcctcctctacaaaaagaaccgcacaccagtttggttttatatgcagatcgcacctattcgtaacgaacacgaaaaggtggtcctattcctttgtaccttcaaggatatcacactgtttaaacaaccgatcgaggacgatagcactaagggatggactaaattcgcgcggctaacgagagctctcacaaattccagaagtgttctgcagcagctcacccctatgaacaaaacggaagttgttcataagcactcccgactggctgaagtcctgcaacttggctccgatattctgccgcaatacaaacaggaggcccctaaaacacccccccacattattctgcattattgtgcgttcaagactacgtgggattgggtcatcctgatccttactttttataccgctatcatggtgccctataacgtgtcatttaagaccaagcagaacaatattgcttggttggtcctggatagcgtggtggacgtcattttcctagttgacattgtcctgaatttccacacaaccttcgtcggaccaggtggcgaggttatcagcgatcccaaactgatccgaatgaattatctcaagacgtggttcgtcatcgacctcctgtcatgtctgccgtacgatatcattaacgcttttgaaaacgtcgacgaaggcatttctagtctattctccagcctgaaagtggtaaggctgttgcggttagggcgtgtggctcgcaaactggaccactatctggaatatggggctgcagttctagtcctgttggtgtgtgtcttcggactggtggctcattggctcgcgtgcatttggtactcaattggggactacgaggtgatcgatgaagttacgaacaccatccagatcgatagttggctgtatcagctagcactttccattggaactccgtacagatacaacacaagtgcgggcatctgggaaggggggccttctaaggatagcttgtatgtaagctcactatattttacgatgacctcactcactaccataggtttcggcaacattgccccgacaacagatgtggagaaaatgttcagtgtggcaatgatgatggtcggatctctcctgtacgccaccattttcggcaacgtaaccacaatttttcaacagatgtatgctaacacgaataggtaccacgagatgttgaataacgtgcgcgacttcctgaagctatatcaggtaccgaaggggctgagtgaacgagtgatggattacattgtcagtacctggagtatgagcaagggcatcgacacagagaaagtcttgagtatctgccctaaagacatgagagctgacatctgtgtacacctgaacagaaaggtatttaatgagcatccagctttccgtcttgctagcgatggatgcctgagggcactggccgtggagttccagacaatccactgcgcacctggagacctgatttatcatgctggcgaaagcgtagacgctctgtgcttcgtggtgtcaggctcactggaagtgatccaggatgatgaagttgtggcaatccttggaaaaggtgatgtctttggcgatatcttttggaaggaaacaacactggcccacgcttgcgctaatgtccgtgccctgacatactgtgacctccatattatcaaaagggaggccctcctcaaggtgctggacttctatacagccttcgccaactcattctctcgcaatttgaccttgacttgtaacctgcgcaagcggataatctttagaaagatcagtgatgtgaagaaggaggaagaagagcggctgagacagaagaatgaggtgactctttctatccccgtggaccaccctgtcaggaagctcttccagaagtttaagcagcagaaggagttgaggaaccaaggatcaacccagggagaccccgagaggaaccaactccaagtagaatctagaagtctccagaacggtgccagcattaccggtacaagtgtcgtgaccgttagtcagattacccccattcagaccagtctggcttatgtgaagacatcagagtcgttgaagcaaaacaaccgagatgcaatggagctgaagcccaatgggggtgccgaccagaaatgcctgaaagtgaactcccctatccggatgaaaaacggcaacgggaaaggatggctaaggcttaaaaacaacatgggggctcacgaagagaagaaagaagattggaacaacgtgacaaaggccgaaagcatgggattgcttagcgaggaccccaagtcaagcgattccgaaaattctgtcactaaaaacccacttcggaagacagacagctgtgacagcggcattacaaagtctgacttacggttagataaagcaggcgaggctcgttctcccctggaacactctcccatccaggcggatgccaaacaccctttttatccaattcctgaacaggcactccagacaacacttcaggaagttaagcacgaactcaaggaagatattcagctcctgtcctgcagaatgaccgctctggagaagcaggtcgccgagatactaaaaatcctgtctgaaaaaagtgtaccccaggcctcaagccccaagtcgcagatgccattacaggtgccacctcagataccatgccaggacatttttagtgttagccgtccggagtccccagaatctgacaaagacgaaatccacttttag

SEQ ID NO: 238681 - DNA, 2967 bp, Artificial Sequence
  derived and/or modified sequence
atgcctgggggcaagaggggcctggtggccccccagaacaccttcctggagaacatcgtgagaagaagcagcgagagcagcttcctgctgggcaatgcccagatcgtggactggcctgtggtgtacagcaatgatggcttctgcaagctgagcggctaccacagagcagatgtgatgcagaagagcagcacctgcagcttcatgtatggagagctgacagacaagaagaccatcgagaaggtgcggcagacctttgacaactatgagagcaactgctttgaggtgctgctgtacaagaagaacagaacacctgtgtggttctacatgcagatcgcccccatcagaaatgagcacgagaaggtggtgctcttcctgtgcaccttcaaggacatcaccctcttcaagcagcccattgaagatgacagcaccaagggctggaccaagtttgcccggctgacccgggccctgaccaacagccgctctgtgctgcagcagctgacccccatgaacaagacagaggtggtgcacaagcacagccggctggccgaggtgctgcagctgggcagtgacatcctgccccagtacaagcaggaggcccccaagaccccaccccacatcatcctgcactactgtgccttcaagaccacctgggactgggtgatcctgatcctgaccttctacacagccatcatggtgccctacaacgtgtccttcaagaccaagcagaacaacatcgcctggctggtgctggacagcgtggtggatgtgatcttcctggtggacatcgtgctgaacttccacaccacctttgtgggccctggaggagaggtgatcagtgaccccaagctgatccgcatgaactacctgaagacctggtttgtgattgacctgctgagctgcctgccctatgacatcatcaatgcctttgaaaatgtggatgagggcatcagcagcctcttcagcagcctgaaggtggtgcggctgctgcggctgggccgggtggccaggaagctggaccactacctggagtatggagctgctgtgctggtgctgctggtgtgtgtgtttggcctggtggcccactggctggcctgcatctggtacagcatcggggactatgaggtgattgatgaggtgaccaacaccatccagattgacagctggctgtaccagctggccctgagcatcggcaccccctaccgctacaacaccagcgctggcatctgggagggcggccccagcaaggacagcctgtatgtgagcagcctgtacttcaccatgaccagcctgaccaccatcggctttggaaacatcgcccccaccacagatgtggagaagatgttttctgtggccatgatgatggtgggcagcctgctgtatgccaccatctttggaaatgtgaccaccatcttccagcagatgtatgccaacaccaaccgctaccacgagatgctgaacaacgtgcgggacttcctgaagctgtaccaggtgcccaagggcctgtctgagcgggtgatggactacatcgtgtccacctggagcatgagcaaaggaattgacacagagaaggtgctgagcatctgccccaaggacatgagagctgacatctgtgtgcacctgaacaggaaggtgttcaatgagcacccagccttccggctggccagtgatggctgcctgcgggccctggccgtggagttccagaccatccactgtgcccctggggacctgatctaccacgccggggagagcgtggatgccctgtgctttgtggtgtctggcagcctggaggtgatccaggatgatgaggtggtggccatcctgggcaaaggagatgtgtttggagacatcttctggaaggagaccaccctggcccacgcctgtgccaacgtgcgggccctgacctactgtgacctgcacatcatcaagcgggaggccctgctgaaggtgctggacttctacacagcctttgccaacagcttcagcaggaacctgaccctgacctgcaacctgaggaagaggatcatcttcaggaagatcagtgatgtgaagaaggaggaggaggagcggctgcggcagaagaatgaggtgaccctgagcatccctgtggaccaccctgtgaggaagctgttccagaagttcaagcagcagaaggagctgaggaaccagggcagcacccagggcgaccctgagaggaaccagctgcaggtggagagccgcagcctgcagaatggagccagcatcaccggcacctctgtggtgacagtgtcccagatcacccccatccagaccagcctggcctacgtgaagaccagcgagagcctgaagcagaacaacagagatgccatggagctgaagcccaatggaggagctgaccagaagtgcctgaaggtgaacagccccatccgcatgaagaatggaaatggcaagggctggctgcggctgaagaacaacatgggcgcccacgaggagaagaaggaggactggaacaacgtgaccaaggccgagagcatgggcctgctgtctgaggaccccaagagcagtgacagcgagaacagcgtgaccaagaaccccctgaggaagacagacagctgtgacagcggcatcaccaagagtgacctgcggctggacaaggccggggaggcccggagccccctggagcacagccccatccaggctgatgccaagcaccccttctaccccatccctgagcaggccctgcagaccaccctgcaggaggtgaagcatgagctgaaggaggacatccagctgctgagctgcaggatgacagccctggagaagcaggtggccgagatcctgaagatcctgtctgagaagtctgtgccccaggccagcagccccaagagccagatgcccctgcaggtgcccccccagatcccctgccaggacatcttctctgtgtccaggcctgagagccctgagagtgacaaggatgagatccacttctag

SEQ ID NO: 238682 - DNA, 2967 bp, Artificial Sequence
  derived and/or modified sequence
atgcccggcggcaagcggggcctggtggccccccagaacaccttcctcgagaacattgtgcgtcgttccagcgaaagtagttttctactcgggaatgcacagatcgtagactggccagtcgtgtactcaaacgacggattttgcaagctttctggttatcatcgggctgatgtcatgcagaagtcaagtacatgctcattcatgtacggcgaactgactgataaaaagactatagagaaggtgagacagaccttcgacaactatgagtctaactgcttcgaggtacttctgtataagaagaatagaacccccgtgtggttttacatgcagatcgctcccatccggaacgagcacgaaaaagttgttctcttcctgtgcacatttaaggatatcacgcttttcaaacagcccatcgaagacgactcaacgaagggctggactaagtttgctaggctgacaagggccctcactaattctcgctctgtcctgcagcagttaactcccatgaataagaccgaagtagttcataaacacagccgcctggccgaggtgttacaattagggtcagatattctgccacagtataagcaagaggcccccaagactccgcctcacattatcttgcactactgtgccttcaagacaacttgggactgggtaattcttattttaactttctataccgccattatggtaccatataacgtctcgtttaagaccaaacaaaataacatcgcctggctggtgctggacagtgttgtcgatgtgattttccttgtggatatcgtactgaatttccatactacttttgtcggcccaggcggagaggtgatcagcgaccctaaactgattaggatgaactacctgaaaacctggttcgtcatagatttattgtcctgccttccttacgacatcattaatgcctttgagaatgtcgacgagggaatctcctcattgttcagctcactgaaagtcgtgcgactgttgcggctaggcagagtcgctcggaagttggatcattatctggaatatggggccgccgttttggttctgttagtgtgcgtctttggcctcgttgcccactggttggcttgcatctggtattccatcggcgattatgaggtgatcgacgaagtaaccaataccattcagatcgacagctggctgtatcagctggccctgtcaatcgggaccccttaccgctacaatactagcgccggcatatgggagggcggaccaagcaaagatagcctctacgtctcaagtctctatttcacaatgacctcattgactactattggattcgggaacattgcacctaccacggatgtggagaagatgtttagcgtggctatgatgatggtgggaagcctgctctacgccaccatcttcggtaacgtgacgacaatctttcagcagatgtacgcgaacacaaaccgataccatgagatgcttaacaatgttagagattttctgaagctgtatcaagtgcccaaggggcttagtgagcgagttatggactacatcgtatccacctggtccatgtcaaagggcattgatacagaaaaggtcctgagcatttgtccaaaagatatgagagccgatatctgcgttcatctgaacaggaaagttttcaatgagcatcccgcgtttaggctggcctccgatggctgcctgcgcgctctcgctgtcgagtttcagaccattcactgtgccccgggcgatctgatctatcacgccggggaatctgtcgacgccctttgctttgtggtcagtggatccctagaggtcattcaagacgatgaggtggtcgcaatccttggaaaaggtgacgtgttcggggacatcttttggaaggaaactacactggctcatgcctgcgctaacgtgagggctcttacctattgtgacctgcacattataaagagagaggcactgctgaaagtgctggacttctataccgcctttgccaacagtttcagccgcaacctgacgctgacctgcaatcttcgaaagaggatcatcttcagaaagatttctgacgtaaagaaagaggaggaagaaagactgaggcagaagaatgaagtgaccctgtccataccggtggatcacccagtccgaaagctattccaaaaattcaaacagcagaaggaattgcgtaaccaagggagcacccagggtgacccagaacggaaccagctccaagtggaatcgcgctctctccagaacggcgctagtataaccggtaccagtgtcgtgacagtgtcacagattacgcccatacagaccagcttggcatatgtgaaaacatcggaaagcctgaagcaaaacaacagggatgccatggagttgaagcctaatggcggtgccgaccaaaagtgtctgaaggtaaattcaccaattcgaatgaagaatggtaacggcaaagggtggctgcggctaaagaataatatgggcgcccacgaggagaagaaagaggactggaataatgtgaccaaagccgagagcatgggactgctgagcgaagacccgaagtcctcagactcagagaatagtgtgacaaaaaatccgttgcgcaaaaccgacagctgtgattctgggattacaaaatccgacttgcggctcgataaagcaggagaggcgaggtccccacttgaacattccccgattcaggctgatgcgaagcacccgttttatcccatacccgaacaagctttgcaaacaacattgcaggaggtcaagcatgagttgaaagaggatatccagctgctttcctgccggatgacagcattagagaagcaggtagccgaaatcctaaaaatactcagtgaaaagagtgtgcctcaagcctccagccctaaatctcagatgcctctgcaagttcccccccagatcccttgtcaggacattttttcagtgtcccggcccgaatctcccgaaagcgataaagacgagatccacttctag

SEQ ID NO: 238683 - DNA, 4175 bp, Artificial Sequence
  derived and/or modified sequence
gttcccgagccccgtgtgcggcaccgccacagtctgggcagcggcggccgggggagcgctactaccatgaactgcctggtcctcctccccagagctgctcatccgggtcgggctggagacacagtcaggggaccccgtcgccgccgccgcgccccctcttctttcggctcaatcttctcttccaccttttcctcctcttcctccaccttctttgcctgcatccccccctcccccgccgcggatcctggccgctgctctccagacccaggatgccggggggcaagagagggctggtggcaccgcagaacacatttttggagaacatcgtcaggcgctccagtgaatcaagtttcttactgggaaatgcccagattgtggattggcctgtagtttatagtaatgacggtttttgtaaactctctggatatcatcgagctgacgtcatgcagaaaagcagcacttgcagttttatgtatggggaattgactgacaagaagaccattgagaaagtcaggcaaacttttgacaactacgaatcaaactgctttgaagttcttctgtacaagaaaaacagaacccctgtttggttttatatgcaaattgcaccaataagaaatgaacatgaaaaggtggtcttgttcctgtgtactttcaaggatattacgttgttcaaacagccaatagaggatgattcaacaaaaggttggacgaaatttgcccgattgacacgggctttgacaaatagccgaagtgttttgcagcagctcacgccaatgaataaaacagaggtggtccataaacattcaagactagctgaagttcttcagctgggatcagatatccttcctcagtataaacaagaagcgccaaagacgccaccacacattattttacattattgtgcttttaaaactacttgggattgggtgattttaattcttaccttctacaccgccattatggttccttataatgtttccttcaaaacaaagcagaacaacatagcctggctggtactggatagtgtggtggacgttatttttctggttgacatcgttttaaattttcacacgactttcgtggggcccggtggagaggtcatttctgaccctaagctcataaggatgaactatctgaaaacttggtttgtgatcgatctgctgtcttgtttaccttatgacatcatcaatgcctttgaaaatgtggatgagggaatcagcagtctcttcagttctttaaaagtggtgcgtctcttacgactgggccgtgtggctaggaaactggaccattacctagaatatggagcagcagtcctcgtgctcctggtgtgtgtgtttggactggtggcccactggctggcctgcatatggtatagcatcggagactacgaggtcattgatgaagtcactaacaccatccaaatagacagttggctctaccagctggctttgagcattgggactccatatcgctacaataccagtgctgggatatgggaaggaggacccagcaaggattcattgtacgtgtcctctctctactttaccatgacaagccttacaaccataggatttggaaacatagctcctaccacagatgtggagaagatgttttcggtggctatgatgatggttggctctcttctttatgcaactatttttggaaatgttacaacaattttccagcaaatgtatgccaacaccaaccgataccatgagatgctgaataatgtacgggacttcctaaaactctatcaggtcccaaaaggccttagtgagcgagtcatggattatattgtctcaacatggtccatgtcaaaaggcattgatacagaaaaggtcctctccatctgtcccaaggacatgagagctgatatctgtgttcatctaaaccggaaggtttttaatgaacatcctgcttttcgattggccagcgatgggtgtctgcgcgccttggcggtagagttccaaaccattcactgtgctcccggggacctcatttaccatgctggagaaagtgtggatgccctctgctttgtggtgtcaggatccttggaagtcatccaggatgatgaggtggtggctattttagggaagggtgatgtatttggagacatcttctggaaggaaaccacccttgcccatgcatgtgcgaacgtccgggcactgacgtactgtgacctacacatcatcaagcgggaagccttgctcaaagtcctggacttttatacagcttttgcaaactccttctcaaggaatctcactcttacttgcaatctgaggaaacggatcatctttcgtaagatcagtgatgtgaagaaagaggaggaggagcgcctccggcagaagaatgaggtgaccctcagcattcccgtggaccacccagtcagaaagctcttccagaagttcaagcagcagaaggagctgcggaatcagggctcaacacagggtgaccctgagaggaaccaactccaggtagagagccgctccttacagaatggagcctccatcaccggaaccagcgtggtgactgtgtcacagattactcccattcagacgtctctggcctatgtgaaaaccagtgaatcccttaagcagaacaaccgtgatgccatggaactcaagcccaacggcggtgctgaccaaaaatgtctcaaagtcaacagcccaataagaatgaagaatggaaatggaaaagggtggctgcgactcaagaataatatgggagcccatgaggagaaaaaggaagactggaataatgtcactaaagctgagtcaatggggctattgtctgaggaccccaagagcagtgattcagagaacagtgtgaccaaaaacccactaagaaaaacagattcttgtgacagtggaattacaaaaagtgaccttcgtttggataaggctggggaggcccgaagtccgctagagcacagtcccatccaggctgatgccaagcaccccttttatcccatccccgagcaggccttacagaccacactgcaggaagtcaaacacgaactcaaagaggacatccagctgctcagctgcagaatgactgccctagaaaagcaggtggcagaaattttaaaaatactgtcggaaaaaagcgtaccccaggcctcatctcccaaatcccaaatgccactccaagtacccccccagataccatgtcaggatatttttagtgtctcaaggcctgaatcacctgaatctgacaaagatgaaatccacttttaatatatatacatatatatttgttaatatattaaaacagtatatacatatgtgtgtatatacagtatatacatatatatattttcacttgctttcaagatgatgaccacacatggattttgatatgtaaatattgcatgtccagctggattctggcctgccaaagaagatgatgattaaaaacatagatattgcttgtatattatgcagttgactgcatgcacactttacatttatttataatctctattctataataaaagagtatgatttttgttacccaaggcaatgtaatatttgaagaatcagggtccaacctgccaatgttgccatgacaaatttgatctcaggctgagtatgtatatcgagctatcattttctcactgttctgttaagttaaaagtatagattaatgccaaggaagagttcagtcttttaaactattagtaccatgttatgatctctttccataggatatttttctgtaacttagtgttaggttcttttcccctacaggcagtgtttgctccatttaaatgactgtttagttgcctaagtcagataagagtgtgggatattgaaaacttattgctatgggttttgtgcatgaattacatttttgatcaactatacctctcgttttttaacattatacttagatagtaatcattagctcttatgtaaggaaatccctactccctccttcttggagaacagctgccatcttgtaagctgacattatcaacatcataaatactaaactattaatatagagtatgttattatagaaacactgcaccacagggtataagggccttttgacaattcatgtaagagatgctgaatttccaaagctgataaatgctctaaatttgtatttccaaaacatgttcaagagtgacattgaaaggcttgttagcaaagaaacatacaaaaaataaa

SEQ ID NO: 238684 - DNA, 2967 bp, Artificial Sequence
  derived and/or modified sequence
atgccagggggtaagcgcggtttggttgcacctcagaacacattcctggaaaatatcgtcagaagaagctctgagagctcctttctgctgggaaacgcacagatcgtggactggcccgtggtctattccaacgacgggttttgcaaactgtccggctaccaccgcgctgacgtgatgcagaaatcgtccacttgttcgttcatgtatggcgagctgacagataaaaaaacaatcgaaaaggtgaggcagacttttgataactatgaatctaactgctttgaggttctgctctacaagaaaaatcgcacccctgtgtggttctacatgcagatcgccccaatccgaaacgagcatgagaaggtggtcctcttcctctgcacctttaaggacatcacactgttcaaacagccaatcgaagatgactccaccaaaggctggaccaagttcgcgcgtttaacacgggcactcacaaattctaggagcgtattacagcagctgactcccatgaataaaaccgaagttgttcacaaacacagcagactagccgaggtgctgcagctgggtagcgacatcctccctcaatacaagcaggaagccccaaaaacccctcctcacatcatccttcactactgtgctttcaagacaacctgggactgggtcatcctcatcttgaccttctacactgccatcatggtgccttacaacgtcagcttcaaaacaaaacaaaataacatcgcttggttagtgcttgattctgtggtcgacgtgattttcctggtggatattgttttgaactttcatacaacattcgtgggtccaggaggtgaagtcatttccgatccaaagttaatccggatgaattaccttaaaacatggtttgtcattgatttgttgtcatgcttaccctacgacatcattaatgcattcgagaatgtggacgaaggaatctcatctctgttcagctccttaaaagtggttagacttctgcgcttgggccgtgtcgctcggaagctggatcactacctggagtacggagcagcggtgttggtgctgctggtgtgcgtatttggacttgttgctcattggctcgcttgtatctggtactctattggggactatgaggttatagacgaggtcacaaacacgattcagattgattcatggctttaccagctagccttgagcattggcaccccttaccgatataataccagtgcaggtatttgggaaggcggaccatccaaagactccctctatgtgagttcattgtactttaccatgaccagcctaactacaatcggctttgggaatattgccccaaccactgatgtcgaaaagatgtttagtgtcgccatgatgatggtgggctctctgttatatgccaccatcttcgggaatgtgactacgatctttcagcagatgtacgcaaacacaaatcggtaccatgaaatgctgaacaatgttcgagattttttgaaattgtaccaggtcccgaaagggttgtccgaaagagtaatggactatattgtgtcaacgtggtcaatgagtaaaggaatcgacacagaaaaggtgctctctatttgcccgaaggatatgagggccgatatttgcgtacacttgaatcggaaagttttcaatgaacatcctgcgtttcggctggcatcagacgggtgtctgagggcactggctgtcgagttccagacaatccactgtgcgccaggagacctgatctatcacgctggcgaatccgttgatgctctgtgtttcgtggtgagcggctccctcgaggtgattcaggatgacgaggtcgtggcaatcctaggcaaaggtgacgtattcggggacattttttggaaggagacaacgttagcgcacgcctgcgctaacgtaagggccctgacctactgtgacctccacatcattaagcgggaagccctcctcaaggttctggatttctacacagcatttgctaatagcttctcaaggaatcttacccttacttgtaatttacgcaaacgtatcatcttccggaagatctctgatgtaaagaaggaggaagaggaacgcttgcggcagaaaaacgaagttaccctgagcatcccagtcgatcatccggtgaggaaactctttcagaaatttaagcagcagaaagaactgcggaatcagggaagcacccaaggggatccagaaaggaaccagcttcaggttgaaagtagatccctgcagaacggcgcttctattaccggaacctccgtcgtgactgtcagtcaaataacaccgatccagacctccctggcctacgtaaaaacatccgagagtctgaagcagaacaacagagatgctatggagttgaaacccaatggtggcgcagatcagaaatgtttgaaggttaatagcccaatcagaatgaagaacgggaacggtaagggatggctcaggttgaagaataacatgggcgctcacgaagagaagaaagaagactggaataatgtgactaaggcagaaagtatggggttactgtcggaggatcctaaaagctcagatagtgaaaacagcgtgactaagaatcctctgcgaaagactgattcatgcgatagcggaataaccaaatccgatctgcgcttggataaggctggagaggcccgtagtcccctggaacatagtcccatccaggctgacgccaagcatccattctaccccatccccgaacaggccctgcaaaccacgctgcaagaggtcaaacatgaacttaaggaggacatacagctgctgtcttgcaggatgacagctctggagaaacaggttgccgagatactgaaaatcctctcagagaagagtgttccccaagcctcaagtcctaaatcccaaatgccattgcaggtgcctcctcaaatcccttgccaggacattttcagtgtcagcagaccagaaagtccagagagtgacaaggacgagatacacttctag

SEQ ID NO: 238685 - DNA, 2967 bp, Artificial Sequence
  derived and/or modified sequence
atgcccggcggcaagagaggcctggtggccccccagaacaccttcctggagaacatcgtgagaagaagcagcgagagcagcttcctgctgggcaacgcccagatcgtggactggcccgtggtgtacagcaacgacggcttctgcaagctgagcggctaccacagagccgacgtgatgcagaagagcagcacctgcagcttcatgtacggcgagctgaccgacaagaagaccatcgagaaggtgagacagaccttcgacaactacgagagcaactgcttcgaggtgctgctgtacaagaagaacagaacccccgtgtggttctacatgcagatcgcccccatcagaaacgagcacgagaaggtggtgctgttcctgtgcaccttcaaggacatcaccctgttcaagcagcccatcgaggacgacagcaccaagggctggaccaagttcgccagactgaccagagccctgaccaacagcagaagcgtgctgcagcagctgacccccatgaacaagaccgaggtggtgcacaagcacagcagactggccgaggtgctgcagctgggcagcgacatcctgccccagtacaagcaggaggcccccaagacccccccccacatcatcctgcactactgcgccttcaagaccacctgggactgggtgatcctgatcctgaccttctacaccgccatcatggtgccctacaacgtgagcttcaagaccaagcagaacaacatcgcctggctggtgctggacagcgtggtggacgtgatcttcctggtggacatcgtgctgaacttccacaccaccttcgtgggccccggcggcgaggtgatcagcgaccccaagctgatcagaatgaactacctgaagacctggttcgtgatcgacctgctgagctgcctgccctacgacatcatcaacgccttcgagaacgtggacgagggcatcagcagcctgttcagcagcctgaaggtggtgagactgctgagactgggcagagtggccagaaagctggaccactacctggagtacggcgccgccgtgctggtgctgctggtgtgcgtgttcggcctggtggcccactggctggcctgcatctggtacagcatcggcgactacgaggtgatcgacgaggtgaccaacaccatccagatcgacagctggctgtaccagctggccctgagcatcggcaccccctacagatacaacaccagcgccggcatctgggagggcggccccagcaaggacagcctgtacgtgagcagcctgtacttcaccatgaccagcctgaccaccatcggcttcggcaacatcgcccccaccaccgacgtggagaagatgttcagcgtggccatgatgatggtgggcagcctgctgtacgccaccatcttcggcaacgtgaccaccatcttccagcagatgtacgccaacaccaacagataccacgagatgctgaacaacgtgagagacttcctgaagctgtaccaggtgcccaagggcctgagcgagagagtgatggactacatcgtgagcacctggagcatgagcaagggcatcgacaccgagaaggtgctgagcatctgccccaaggacatgagagccgacatctgcgtgcacctgaacagaaaggtgttcaacgagcaccccgccttcagactggccagcgacggctgcctgagagccctggccgtggagttccagaccatccactgcgcccccggcgacctgatctaccacgccggcgagagcgtggacgccctgtgcttcgtggtgagcggcagcctggaggtgatccaggacgacgaggtggtggccatcctgggcaagggcgacgtgttcggcgacatcttctggaaggagaccaccctggcccacgcctgcgccaacgtgagagccctgacctactgcgacctgcacatcatcaagagagaggccctgctgaaggtgctggacttctacaccgccttcgccaacagcttcagcagaaacctgaccctgacctgcaacctgagaaagagaatcatcttcagaaagatcagcgacgtgaagaaggaggaggaggagagactgagacagaagaacgaggtgaccctgagcatccccgtggaccaccccgtgagaaagctgttccagaagttcaagcagcagaaggagctgagaaaccagggcagcacccagggcgaccccgagagaaaccagctgcaggtggagagcagaagcctgcagaacggcgccagcatcaccggcaccagcgtggtgaccgtgagccagatcacccccatccagaccagcctggcctacgtgaagaccagcgagagcctgaagcagaacaacagagacgccatggagctgaagcccaacggcggcgccgaccagaagtgcctgaaggtgaacagccccatcagaatgaagaacggcaacggcaagggctggctgagactgaagaacaacatgggcgcccacgaggagaagaaggaggactggaacaacgtgaccaaggccgagagcatgggcctgctgagcgaggaccccaagagcagcgacagcgagaacagcgtgaccaagaaccccctgagaaagaccgacagctgcgacagcggcatcaccaagagcgacctgagactggacaaggccggcgaggccagaagccccctggagcacagccccatccaggccgacgccaagcaccccttctaccccatccccgagcaggccctgcagaccaccctgcaggaggtgaagcacgagctgaaggaggacatccagctgctgagctgcagaatgaccgccctggagaagcaggtggccgagatcctgaagatcctgagcgagaagagcgtgccccaggccagcagccccaagagccagatgcccctgcaggtgcccccccagatcccctgccaggacatcttcagcgtgagcagacccgagagccccgagagcgacaaggacgagatccacttctag

SEQ ID NO: 238686 - protein, 589 aa, Artificial Sequence
  derived and/or modified sequence
MPFKAFDTFKEKILKPGKEGVKNAVGDSLGILQRKIDGTTEEEDNIELNEEGRPVQTSRPSPPLCDCHCCGLPKRYIIAIMSGLGFCISFGIRCNLGVAIVEMVNNSTVYVDGKPEIQTAQFNWDPETVGLIHGSFFWGYIMTQIPGGFISNKFAANRVFGAAIFLTSTLNMFIPSAARVHYGCVMCVRILQGLVEGVTYPACHGMWSKWAPPLERSRLATTSFCGSYAGAVVAMPLAGVLVQYIGWSSVFYIYGMFGIIWYMFWLLQAYECPAAHPTISNEEKTYIETSIGEGANVVSLSKFSTPWKRFFTSLPVYAIIVANFCRSWTFYLLLISQPAYFEEVFGFAISKVGLLSAVPHMVMTIVVPIGGQLADYLRSRQILTTTAVRKIMNCGGFGMEATLLLVVGFSHTKGVAISFLVLAVGFSGFAISGFNVNHLDIAPRYASILMGISNGVGTLSGMVCPLIVGAMTRHKTREEWQNVFLIAALVHYSGVIFYGVFASGEKQEWADPENLSEEKCGIIDQDELAEEIELNHESFASPKKKMSYGATSQNCEVQKKEWKGQRGATLDEEELTSYQNEERNFSTIS

SEQ ID NO: 238687 - DNA, 1770 bp, Artificial Sequence
  derived and/or modified sequence
atgccctttaaggccttcgacactttcaaagagaagattctgaaaccaggaaaagagggggtcaagaacgcagtcggggatagcctcggtattctgcagagaaagatcgatggaactacagaagaggaggataatattgagttgaatgaggagggaagacctgtgcagacctctagaccatctcctcccctttgcgactgtcattgttgtggcttgccaaaacgctatattattgctataatgtcaggactgggtttctgtataagtttcgggatacgatgcaacctgggcgttgccatcgttgaaatggtaaacaacagcaccgtgtatgtggacggaaaaccggagattcagactgctcagtttaattgggaccctgagacagtcggtctgattcatggaagcttcttctggggttatatcatgacgcagattccagggggctttatcagcaacaaattcgccgctaatcgcgtgtttggagccgctatctttctgacaagcacactgaacatgttcattccttctgccgcccgagtgcactacggctgcgtgatgtgtgtgaggatcttgcaagggcttgtcgagggggtgacctaccccgcttgtcacggtatgtggtccaagtgggcaccgccactggagcggtctcgcctggcaacaacctcattctgcgggtcttatgccggcgccgtggtggctatgcctctggcgggcgtcttggtgcagtacatcgggtggagctccgtgttctatatatatggcatgttcgggatcatctggtacatgttttggctcctgcaagcttacgagtgtccggcagcacacccaactatttccaacgaggaaaagacgtatatagaaacaagtataggcgagggagccaatgtggtttcgttatccaaatttagtaccccatggaaacgtttttttacatccctccccgtttacgctataattgtcgctaatttctgcagatcctggacattttatctgctcctgatctcacagcccgcctactttgaagaagttttcggttttgctatctccaaggtcggcctactctccgcagtaccccacatggtgatgaccatcgtggttcccatcggcgggcagttggcggattacctgagatcaagacagattcttaccacaacggcggtgaggaagatcatgaactgcggcggcttcggcatggaggccactttattgttggtggtgggctttagccatacaaagggtgtggcaatctcattcctcgtgttggccgtgggcttctctgggtttgctattagcggattcaacgtcaatcacctagatatcgctccacggtacgcctccattctcatgggaatctctaatggcgttggcaccctctcaggaatggtgtgccccttaatagtgggggctatgacccgccataagaccagagaagaatggcaaaatgtttttctcattgccgccctcgtacactattctggtgtgatattctacggagtgtttgccagtggcgagaagcaagagtgggccgatcctgagaatctgagcgaggaaaagtgtggcatcatcgaccaggacgaacttgctgaggagatcgaactaaatcatgagtccttcgccagcccaaagaaaaagatgagttatggagcaacatctcaaaattgcgaggtccagaagaaagaatggaagggacaacgtggggctactctggacgaggaagagctgactagctatcaaaatgaggagcgaaacttttcgactatcagctag

SEQ ID NO: 238688 - DNA, 1770 bp, Artificial Sequence
  derived and/or modified sequence
atgcccttcaaggcctttgacaccttcaaggagaagatcctgaagccaggcaaggagggcgtgaagaatgctgtgggggacagcctgggcatcctgcagaggaagattgatggcaccacagaggaggaggacaacatcgagctgaatgaggagggccggcctgtgcagaccagccggcccagcccccccctgtgtgactgccactgctgcggcctgcccaagcgctacatcatcgccatcatgagcggcctgggcttctgcatcagctttggcatccgctgcaacctgggcgtggccatcgtggagatggtgaacaacagcacagtgtatgtggatggcaagccagagatccagacagcccagttcaactgggaccctgagaccgtgggcctcatccacggcagcttcttctggggctacatcatgacccagatccctgggggcttcatcagcaacaagtttgctgccaacagagtgtttggagctgccatcttcctgaccagcaccctgaacatgttcatccccagcgctgcccgggtgcactacggctgtgtgatgtgtgtgcgcatcctgcagggcctggtggagggcgtgacctacccagcctgccacggcatgtggagcaagtgggccccacccctggagaggagccggctggccaccaccagcttctgtggcagctatgctggagctgtggtggccatgcccctggccggcgtgctggtgcagtacatcggctggagctctgtgttctacatctacggcatgtttggcatcatctggtacatgttctggctgctgcaggcctatgaatgtcctgctgcccaccccaccatcagcaatgaggagaagacctacatcgagaccagcattggagagggcgccaacgtggtgtccctgagcaagttcagcaccccctggaagcgcttcttcaccagcctgcctgtgtatgccatcatcgtggccaacttctgccgctcctggaccttctacctgctgctgatcagccagcctgcctactttgaggaggtgtttggatttgccatcagcaaggtgggcctgctgtctgctgtgccccacatggtgatgaccatcgtggtgcccatcggcggccagctggccgactacctgcggagccggcagatcctgaccaccacagctgtgaggaagatcatgaactgtggcggcttcggcatggaggccaccctgctgctggtggtgggcttcagccacaccaagggcgtggccatctccttcctggtgctggccgtgggcttcagcggctttgccatcagcggcttcaacgtgaaccacctggacatcgcccccaggtatgccagcatcctgatgggcatcagcaatggagtgggcaccctgagcggcatggtgtgccccctgattgtgggcgccatgaccaggcacaagacccgggaggagtggcagaatgtgttcctgattgctgccctggtgcactacagcggggtcatcttctacggcgtgtttgccagcggggagaagcaggagtgggccgaccctgagaacctgtctgaggagaagtgtggcatcatcgaccaggatgagctggccgaggagattgagctgaaccacgagagctttgccagccccaagaagaagatgtcctatggagccaccagccagaactgtgaggtgcagaagaaggagtggaagggccagagaggagccaccctggatgaggaggagctgaccagctaccagaatgaggagaggaacttcagcaccatctcctag

SEQ ID NO: 238689 - DNA, 1770 bp, Artificial Sequence
  derived and/or modified sequence
atgcccttcaaggccttcgacaccttcaaggagaagatcctgaagccaggcaaggaaggcgtgaagaacgcagttggcgattcactcggcatactccagcggaagattgacggcaccaccgaggaagaagacaacattgagttaaatgaggagggccgacccgtgcagaccagtagaccaagcccccctctgtgcgactgtcactgctgtggtctgcctaaaaggtacatcatcgccattatgagcggcttggggttctgtatcagctttgggataagatgtaatctgggagtcgctatagtggagatggtgaataactcaactgtttacgtcgatggcaagcccgagatccaaaccgcgcaattcaactgggaccccgaaaccgtgggcctaattcacggctccttcttttgggggtacatcatgactcagatccccgggggatttatcagcaacaagtttgctgctaacagggtcttcggcgcagcaatctttctcacttcaacactgaatatgttcatcccttctgctgcacgcgtgcattacgggtgcgtgatgtgcgtcagaatccttcagggtctggtagagggagtgacctatcctgcatgtcacgggatgtggagtaaatgggcaccgcctctggagaggtccaggcttgctacaacttcattttgcgggtcatacgcaggcgccgtggtagcaatgccccttgcaggcgtacttgtccagtacatagggtggtcatcagttttttatatatacgggatgttcggaattatttggtatatgttttggctgttgcaggcttatgagtgccctgcagcccatcccactattagcaacgaagagaagacatacattgagacctccatcggagaaggcgcaaacgtagtttctctgagtaagttctccaccccatggaagcgattcttcacctctcttccggtatatgccattatcgtcgcaaacttttgtcggagctggactttttacttacttttgatcagccagcctgcttacttcgaggaggtatttgggttcgctattagcaaggttggtttgctgtccgccgtgcctcacatggtgatgaccatcgtagtgcccatcggcgggcagttggccgactacctaagatctcggcaaatcctgactacaacagcggtccgcaaaataatgaactgcggtggtttcgggatggaggctacactcttactcgtggtcggattttcccacacaaaaggagtggccattagtttcctggtgctggccgtgggattctcggggtttgctatctctgggtttaacgttaatcatctcgatatcgcgccgcgctacgcctccattctgatgggcatctctaacggcgtcgggaccctcagtggcatggtctgccccctcatcgtgggagccatgacacgccataaaactcgggaagagtggcaaaacgtgtttctgattgcagctctggtgcactatagtggcgtcattttttatggtgtttttgcctcaggtgaaaagcaggagtgggcggaccccgaaaacctgagcgaagagaagtgcggtattattgatcaggacgagcttgccgaggaaatcgagctgaaccacgagtcctttgcaagccctaaaaagaagatgtcctacggtgcaactagtcagaattgcgaggtccagaaaaaagagtggaaaggacagcgcggggctaccctggacgaagaagaactgacttcttaccagaacgaagaaaggaacttttctacgatatcctag

SEQ ID NO: 238690 - DNA, 1770 bp, Artificial Sequence
  derived and/or modified sequence
atgcccttcaaggcattcgatacattcaaagaaaagatcctcaaacctggtaaagagggggtcaaaaacgccgtgggggattctcttggaatcctgcagagaaaaattgatgggacaaccgaggaagaagacaacatcgaactcaatgaagagggccgtccggtgcagaccagccgtccatcccctcccctctgtgactgtcactgctgtggcttgccaaaacgctatatcattgccattatgtcaggcctgggattctgtatttcatttggaatcagatgcaacctgggagttgcaattgtggagatggtgaataatagtacagtttacgtagacggaaagccagagatccagacagctcagttcaactgggacccagaaaccgtcggattgattcatggctcttttttttggggatatattatgacgcagattcctggcggttttatcagcaataagtttgcagcaaacagggtgtttggagctgctattttcctgacctccaccctgaacatgttcataccatccgcggctcgcgttcattatggttgtgtgatgtgcgtcagaatcctgcaaggcttggtggaaggggtcacataccctgcatgccacggaatgtggagcaagtgggccccaccactcgaacgctcaagattagctacaactagcttttgcggatcttatgcgggtgccgtggttgccatgcctctggccggagtcttggtgcagtacattgggtggtcttccgtattttacatatacggtatgtttggcattatatggtacatgttctggcttctgcaggcctatgagtgccctgcagcgcatcccacaatctcgaacgaagagaaaacttacatcgaaacttccattggtgaaggagccaatgtggtgagcctctccaagtttagtactccatggaagcgcttttttacaagtttacctgtatacgccatcatcgttgcaaacttctgtagatcttggacgttttacctgcttctcatttctcagccagcctacttcgaggaggtatttggctttgccatctcgaaggtcggcttgctgagtgcagttccacacatggttatgaccattgtggtccctattggaggtcagctagccgactacctccgctctaggcagatactgacaactacagctgtgcgcaagattatgaattgcggaggtttcgggatggaagcgactctgctgctggtcgtgggattctcacatactaagggggtcgccatttccttcttggtcctggccgtgggatttagcggtttcgctatatctggttttaatgtcaaccatttggacatcgcccctagatacgcgtccattctgatgggcattagtaacggtgtcggaaccctgtctggcatggtatgtcccctcattgtgggtgctatgacacgccacaaaacgcgggaggagtggcagaatgtctttctgattgctgccctagttcactattcaggcgtcattttctatggtgtgttcgcttccggggaaaaacaggaatgggccgatcccgagaacttgagcgaggagaaatgcggaattatcgaccaagacgagctggcagaggagatcgaactgaatcatgagtcatttgcctcgccaaaaaagaaaatgtcctacggggctaccagccagaactgtgaggttcagaagaaggaatggaagggccagagaggagctactcttgatgaagaggaactcacatcgtatcagaatgaggaacgcaacttcagcacaatttcttag

SEQ ID NO: 238691 - DNA, 3954 bp, Artificial Sequence
  derived and/or modified sequence
gagagtggctgcctgagacagctgccacaggctgctgcagagcgtgcagcttttgcaagggactgaattcccagccagacaccccttggactcttttttggaggggtggggagcagagagaggagggagttgtcttatcttggaagatccgagctgggtttcatctcctttttgattttgagtagttccctccacgagaactgacttccaggtgttcaccaagggaaacaaggtggttctcacactggaaatgaggaaggatgacagtttttgagactgactgttaacggctcagaggtgcccctcattcaaaatgccttttaaagcatttgataccttcaaagaaaaaattctgaaacctgggaaggaaggagtgaagaacgccgtgggagattctttgggaattttacaaagaaaaatcgatgggacaactgaggaagaagataacattgagctgaatgaagaaggaaggccggtgcagacgtccaggccaagccccccactctgcgactgccactgctgcggcctccccaagcgttacatcattgctatcatgagtgggctgggattctgcatttcctttgggatccggtgcaatcttggagttgccattgtggaaatggtcaacaatagcaccgtatatgttgatggaaaaccggaaattcagacagcacagtttaactgggatccagaaacagtgggccttatccatggatcttttttctggggctatattatgacacaaattccaggtggtttcatttcaaacaagtttgctgctaacagggtctttggagctgccatcttcttaacatcgactctgaacatgtttattccctctgcagccagagtgcattacggatgcgtcatgtgtgtcagaattctgcaaggtttagtggagggtgtgacctacccagcctgccatgggatgtggagtaagtgggcaccacctttggagagaagccgactggccacaacctctttttgtggttcctatgcaggggcagtggttgccatgcccctggctggggtgttggtgcagtacattggatggtcctctgtcttttatatttatggcatgtttgggattatttggtacatgttttggctgttgcaggcctatgagtgcccagcagctcatccaacaatatccaatgaggagaagacctatatagagacaagcataggagagggggccaacgtggttagtctaagtaaatttagtaccccatggaaaagatttttcacatctttgccggtttatgcaatcattgtggcaaatttttgcagaagctggaccttttatttgctcctcataagtcagcctgcttattttgaagaggtctttggatttgcaataagtaaggtgggtctcttgtcagcagtcccacacatggttatgacaatcgttgtacctattggaggacaattggctgattatttaagaagcagacaaattttaaccacaactgctgtcagaaaaatcatgaactgtggaggttttggcatggaggcaaccttactcctggtggttggcttttcgcataccaaaggggtggctatctcctttctggtacttgctgtaggatttagtggcttcgctatttcaggttttaatgtcaaccacctggacattgccccacgctatgccagcattctcatggggatctcaaacggagtgggaaccctctctggaatggtctgtcccctcattgtcggtgcaatgaccaggcacaagacccgtgaagaatggcagaatgtgttcctcatagctgccctggtgcattacagtggtgtgatcttctatggggtctttgcttctggggagaaacaggagtgggctgacccagagaatctctctgaggagaaatgtggaatcattgaccaggacgaattagctgaggagatagaactcaaccatgagagttttgcgagtcccaaaaagaagatgtcttatggagccacctcccagaattgtgaagtccagaagaaggaatggaaaggacagagaggagcgacccttgatgaggaagagctgacatcctaccagaatgaagagagaaacttctcaactatatcctaatgtctgagaggcacttctgtcttctccttactttagaaacagaaagtatccatacctattgcctttcttgtagcccagcttgccagaggtccaaatattgggaggggagaagatctaaccagcaacagggaaaagagaaatattatctttcaatgacatgtataggtaaggagctgcgctcagttgataacatagttgataatacatattttttgaattgacagttgacccttctctcaaagagctaaacttattcagaaaggaatgactagaagaaaaaggagacaataccatgttgttcaaagaaacattgaaggaaattgggatgtttggccagaaggaatgtaaacagtagtagtagctgccaccacatctctagggtagccatgcagaggagggcttcatattcccaataaaccccacgttgtggcaggtgctttataaacactcttatttaatctccacacctttatgacacacatttcttatccccattttacaaccaaggcatctaaagcaacaagaaatgaacttgcccaaggtcatctgccagggtcagtgctgagactgttgaagctctcaataggtggcagttttagggaagatttccattcagtgtagggaagacatttgtaataatgaaaactgaaaatggagtaattgtgagtaactcaccactttagcaggtgttggggaagggaaacatttgggttgatgaggcagaggggattcaaatgtgtgagaggctagattcaaagaccctcagtgttctatgttatctgaagagtcaaatggttttgtgactccatagtttttaaagtaataagggtcaaagactacatcagagattcaaataggtttttaaagaaaagctaagcaagagagccaaatttttagaaatctgatggtcaaaatagctgaaagcagtaaacaagagattggctattaaatttcaactttccataatattaagaatgtagctaaatgatgtcccaaactacttacaaacttttaagacatttaataatttaagaagtaggttcatgtgttttcttaggtaaagttcttctgaaagaattttctatttttaaaaaatgtatctctttagccttttctgctggagattatattaggaagtttcatcagattgtataaaattatgattttgtatcaaaagtattcatgatgactctatttggaatgatattcagggaaatcacaataatatagcagtagttatacagagaaatactacaatgaaaacatttggggcaattagacctacagttactgttgaaaaattcacctttgattgcataaggcaattacatggatacttttagatatatttaaaattttaacattggcatctaaagtgttatttgaaaataaaattattttcctgttcattgattttaaacattttattcctactttcagaagaaaaatataatacggaaaaaattatagatttacttgtagcttattattgtaaagtgttttttttttttttttttttttctaatttctcccacatgtatttctggtccccagtgatactagctgagttgtagtgtattttataaatggaataatcttggggaaaaattgcgattcttcattaaataatattctttatgtcactagcatacaatttatgttagtagacatctttaaatctctttaatgagtgaatccatgcaagccccataaaacagttcctagcatgcagaaaatgcccacgtaaatagctgtcatcatcattatcttttaacattttgggggactttccagttgaaaagaaaacatgctatgtcatttttatccattatccctggaacttattgtgaaagttgtgctgttttctaagt

SEQ ID NO: 238692 - DNA, 1770 bp, Artificial Sequence
  derived and/or modified sequence
atgcccttcaaggccttcgacaccttcaaggagaagatcctgaagcccggcaaggagggcgtgaagaacgccgtgggcgacagcctgggcatcctgcagagaaagatcgacggcaccaccgaggaggaggacaacatcgagctgaacgaggagggcagacccgtgcagaccagcagacccagcccccccctgtgcgactgccactgctgcggcctgcccaagagatacatcatcgccatcatgagcggcctgggcttctgcatcagcttcggcatcagatgcaacctgggcgtggccatcgtggagatggtgaacaacagcaccgtgtacgtggacggcaagcccgagatccagaccgcccagttcaactgggaccccgagaccgtgggcctgatccacggcagcttcttctggggctacatcatgacccagatccccggcggcttcatcagcaacaagttcgccgccaacagagtgttcggcgccgccatcttcctgaccagcaccctgaacatgttcatccccagcgccgccagagtgcactacggctgcgtgatgtgcgtgagaatcctgcagggcctggtggagggcgtgacctaccccgcctgccacggcatgtggagcaagtgggccccccccctggagagaagcagactggccaccaccagcttctgcggcagctacgccggcgccgtggtggccatgcccctggccggcgtgctggtgcagtacatcggctggagcagcgtgttctacatctacggcatgttcggcatcatctggtacatgttctggctgctgcaggcctacgagtgccccgccgcccaccccaccatcagcaacgaggagaagacctacatcgagaccagcatcggcgagggcgccaacgtggtgagcctgagcaagttcagcaccccctggaagagattcttcaccagcctgcccgtgtacgccatcatcgtggccaacttctgcagaagctggaccttctacctgctgctgatcagccagcccgcctacttcgaggaggtgttcggcttcgccatcagcaaggtgggcctgctgagcgccgtgccccacatggtgatgaccatcgtggtgcccatcggcggccagctggccgactacctgagaagcagacagatcctgaccaccaccgccgtgagaaagatcatgaactgcggcggcttcggcatggaggccaccctgctgctggtggtgggcttcagccacaccaagggcgtggccatcagcttcctggtgctggccgtgggcttcagcggcttcgccatcagcggcttcaacgtgaaccacctggacatcgcccccagatacgccagcatcctgatgggcatcagcaacggcgtgggcaccctgagcggcatggtgtgccccctgatcgtgggcgccatgaccagacacaagaccagagaggagtggcagaacgtgttcctgatcgccgccctggtgcactacagcggcgtgatcttctacggcgtgttcgccagcggcgagaagcaggagtgggccgaccccgagaacctgagcgaggagaagtgcggcatcatcgaccaggacgagctggccgaggagatcgagctgaaccacgagagcttcgccagccccaagaagaagatgagctacggcgccaccagccagaactgcgaggtgcagaagaaggagtggaagggccagagaggcgccaccctggacgaggaggagctgaccagctaccagaacgaggagagaaacttcagcaccatcagctag

SEQ ID NO: 238693 - protein, 1429 aa, Artificial Sequence
  derived and/or modified sequence
MVAAAAATEARLRRRTAATAALAGRSGGPHWDWDVTRAGRPGLGAGLRLPRLLSPPLRPRLLLLLLLLSPPLLLLLLPCEAEAAAAAAAVSGSAAAEAKECDRPCVNGGRCNPGTGQCVCPAGWVGEQCQHCGGRFRLTGSSGFVTDGPGNYKYKTKCTWLIEGQPNRIMRLRFNHFATECSWDHLYVYDGDSIYAPLVAAFSGLIVPERDGNETVPEVVATSGYALLHFFSDAAYNLTGFNITYSFDMCPNNCSGRGECKISNSSDTVECECSENWKGEACDIPHCTDNCGFPHRGICNSSDVRGCSCFSDWQGPGCSVPVPANQSFWTREEYSNLKLPRASHKAVVNGNIMWVVGGYMFNHSDYNMVLAYDLASREWLPLNRSVNNVVVRYGHSLALYKDKIYMYGGKIDSTGNVTNELRVFHIHNESWVLLTPKAKEQYAVVGHSAHIVTLKNGRVVMLVIFGHCPLYGYISNVQEYDLDKNTWSILHTQGALVQGGYGHSSVYDHRTRALYVHGGYKAFSANKYRLADDLYRYDVDTQMWTILKDSRFFRYLHTAVIVSGTMLVFGGNTHNDTSMSHGAKCFSSDFMAYDIACDRWSVLPRPDLHHDVNRFGHSAVLHNSTMYVFGGFNSLLLSDILVFTSEQCDAHRSEAACLAAGPGIRCVWNTGSSQCISWALATDEQEEKLKSECFSKRTLDHDRCDQHTDCYSCTANTNDCHWCNDHCVPRNHSCSEGQISIFRYENCPKDNPMYYCNKKTSCRSCALDQNCQWEPRNQECIALPENICGIGWHLVGNSCLKITTAKENYDNAKLFCRNHNALLASLTTQKKVEFVLKQLRIMQSSQSMSKLTLTPWVGLRKINVSYWCWEDMSPFTNSLLQWMPSEPSDAGFCGILSEPSTRGLKAATCINPLNGSVCERPANHSAKQCRTPCALRTACGDCTSGSSECMWCSNMKQCVDSNAYVASFPFGQCMEWYTMSTCPPENCSGYCTCSHCLEQPGCGWCTDPSNTGKGKCIEGSYKGPVKMPSQAPTGNFYPQPLLNSSMCLEDSRYNWSFIHCPACQCNGHSKCINQSICEKCENLTTGKHCETCISGFYGDPTNGGKCQPCKCNGHASLCNTNTGKCFCTTKGVKGDECQLCEVENRYQGNPLRGTCYYTLLIDYQFTFSLSQEDDRYYTAINFVATPDEQNRDLDMFINASKNFNLNITWAASFSAGTQAGEEMPVVSKTNIKEYKDSFSNEKFDFRNHPNITFFVYVSNFTWPIKIQIAFSQHSNFMDLVQFFVTFFSCFLSLLLVAAVVWKIKQSCWASRRREQLLREMQQMASRPFASVNVALETDEEPPDLIGGSIKTVPKPIALEPCFGNKAAVLSVFVRLPRGLGGIPPPGQSGLAVASALVDISQQMPIVYKEKSGAVRNRKQQPPAQPGTCI

SEQ ID NO: 238694 - protein, 1193 aa, Artificial Sequence
  derived and/or modified sequence
MVAAAAATEARLRRRTAATAALAGRSGGPHCVNGGRCNPGTGQCVCPAGWVGEQCQHCGGRFRLTGSSGFVTDGPGNYKYKTKCTWLIEGQPNRIMRLRFNHFATECSWDHLYVYDGDSIYAPLVAAFSGLIVPERDGNETVPEVVATSGYALLHFFSDAAYNLTGFNITYSFDMCPNNCSGRGECKISNSSDTVECECSENWKGEACDIPHCTDNCGFPHRGICNSSDVRGCSCFSDWQGPGCSVPVPANQSFWTREEYSNLKLPRASHKAVVNGNIMWVVGGYMFNHSDYNMVLAYDLASREWLPLNRSVNNVVVRYGHSLALYKDKIYMYGGKIDSTGNVTNELRVFHIHNESWVLLTPKAKEQYAVVGHSAHIVTLKNGRVVMLVIFGHCPLYGYISNVQEYDLDKNTWSILHTQGALVQGGYGHSSVYDHRTRALYVHGGYKAFSANKYRLADDLYRYDVDTQMWTILKDSRFFRYLHTAVIVSGTMLVFGGNTHNDTSMSHGAKCFSSDFMAYDIACDRWSVLPRPDLHHDVNRFGHSAVLHNSTMYVFGGFNSLLLSDILVFTSEQCDAHRSEAACLAAGPGIRCVWNTGSSQCISWALATDEQEEKLKSECFSKRTLDHDRCDQHTDCYSCTANTNDCHWCNDHCVPRNHSCSEGQISIFRYENCPKDNPMYYCNKKTSCRSCALDQNCQWEPRNQECIALPENICGIGWHLVGNSCLKITTAKENYDNAKLFCRNHNALLASLTTQKKVEFVLKQLRIMQSSQSMSKLTLTPWVGLRKINVSYWCWEDMSPFTNSLLQWMPSEPSDAGFCGILSEPSTRGLKAATCINPLNGSVCERPANHSAKQCRTPCALRTACGDCTSGSSECMWCSNMKQCVDSNAYVASFPFGQCMEWYTMSTCPPENCSGYCTCSHCLEQPGCGWCTDPSNTGKGKCIEGSYKGPVKMPSQAPTGNFYPQPLLNSSMCLEDSRYNWSFIHCPACQCNGHSKCINQSICEKCENLTTGKHCETCISGFYGDPTNGGKCQPCKCNGHASLCNTNTGKCFCTTKGVKGDECQLCEVENRYQGNPLRGTCYYTLLIDYQFTFSLSQEDDRYYTAINFVATPDEQNRDLDMFINASKNFNLNITWAASFSAGTQAGEEMPVVSKTNIKEYKDSFSNEKFDFRNHPNITFFVYVSNFTWPIKIQ

SEQ ID NO: 238695 - DNA, 4290 bp, Artificial Sequence
  derived and/or modified sequence
atggtggccgccgccgccgccaccgaggccagactgagaagaagaaccgccgccaccgccgccctggccggcagaagcggcggcccccactgggactgggacgtgaccagagccggcagacccggcctgggcgccggcctgagactgcccagactgctgagcccccccctgagacccagactgctgctgctgctgctgctgctgagcccccccctgctgctgctgctgctgccctgcgaggccgaggccgccgccgccgccgccgccgtgagcggcagcgccgccgccgaggccaaggagtgcgacagaccctgcgtgaacggcggcagatgcaaccccggcaccggccagtgcgtgtgccccgccggctgggtgggcgagcagtgccagcactgcggcggcagattcagactgaccggcagcagcggcttcgtgaccgacggccccggcaactacaagtacaagaccaagtgcacctggctgatcgagggccagcccaacagaatcatgagactgagattcaaccacttcgccaccgagtgcagctgggaccacctgtacgtgtacgacggcgacagcatctacgcccccctggtggccgccttcagcggcctgatcgtgcccgagagagacggcaacgagaccgtgcccgaggtggtggccaccagcggctacgccctgctgcacttcttcagcgacgccgcctacaacctgaccggcttcaacatcacctacagcttcgacatgtgccccaacaactgcagcggcagaggcgagtgcaagatcagcaacagcagcgacaccgtggagtgcgagtgcagcgagaactggaagggcgaggcctgcgacatcccccactgcaccgacaactgcggcttcccccacagaggcatctgcaacagcagcgacgtgagaggctgcagctgcttcagcgactggcagggccccggctgcagcgtgcccgtgcccgccaaccagagcttctggaccagagaggagtacagcaacctgaagctgcccagagccagccacaaggccgtggtgaacggcaacatcatgtgggtggtgggcggctacatgttcaaccacagcgactacaacatggtgctggcctacgacctggccagcagagagtggctgcccctgaacagaagcgtgaacaacgtggtggtgagatacggccacagcctggccctgtacaaggacaagatctacatgtacggcggcaagatcgacagcaccggcaacgtgaccaacgagctgagagtgttccacatccacaacgagagctgggtgctgctgacccccaaggccaaggagcagtacgccgtggtgggccacagcgcccacatcgtgaccctgaagaacggcagagtggtgatgctggtgatcttcggccactgccccctgtacggctacatcagcaacgtgcaggagtacgacctggacaagaacacctggagcatcctgcacacccagggcgccctggtgcagggcggctacggccacagcagcgtgtacgaccacagaaccagagccctgtacgtgcacggcggctacaaggccttcagcgccaacaagtacagactggccgacgacctgtacagatacgacgtggacacccagatgtggaccatcctgaaggacagcagattcttcagatacctgcacaccgccgtgatcgtgagcggcaccatgctggtgttcggcggcaacacccacaacgacaccagcatgagccacggcgccaagtgcttcagcagcgacttcatggcctacgacatcgcctgcgacagatggagcgtgctgcccagacccgacctgcaccacgacgtgaacagattcggccacagcgccgtgctgcacaacagcaccatgtacgtgttcggcggcttcaacagcctgctgctgagcgacatcctggtgttcaccagcgagcagtgcgacgcccacagaagcgaggccgcctgcctggccgccggccccggcatcagatgcgtgtggaacaccggcagcagccagtgcatcagctgggccctggccaccgacgagcaggaggagaagctgaagagcgagtgcttcagcaagagaaccctggaccacgacagatgcgaccagcacaccgactgctacagctgcaccgccaacaccaacgactgccactggtgcaacgaccactgcgtgcccagaaaccacagctgcagcgagggccagatcagcatcttcagatacgagaactgccccaaggacaaccccatgtactactgcaacaagaagaccagctgcagaagctgcgccctggaccagaactgccagtgggagcccagaaaccaggagtgcatcgccctgcccgagaacatctgcggcatcggctggcacctggtgggcaacagctgcctgaagatcaccaccgccaaggagaactacgacaacgccaagctgttctgcagaaaccacaacgccctgctggccagcctgaccacccagaagaaggtggagttcgtgctgaagcagctgagaatcatgcagagcagccagagcatgagcaagctgaccctgaccccctgggtgggcctgagaaagatcaacgtgagctactggtgctgggaggacatgagccccttcaccaacagcctgctgcagtggatgcccagcgagcccagcgacgccggcttctgcggcatcctgagcgagcccagcaccagaggcctgaaggccgccacctgcatcaaccccctgaacggcagcgtgtgcgagagacccgccaaccacagcgccaagcagtgcagaaccccctgcgccctgagaaccgcctgcggcgactgcaccagcggcagcagcgagtgcatgtggtgcagcaacatgaagcagtgcgtggacagcaacgcctacgtggccagcttccccttcggccagtgcatggagtggtacaccatgagcacctgcccccccgagaactgcagcggctactgcacctgcagccactgcctggagcagcccggctgcggctggtgcaccgaccccagcaacaccggcaagggcaagtgcatcgagggcagctacaagggccccgtgaagatgcccagccaggcccccaccggcaacttctacccccagcccctgctgaacagcagcatgtgcctggaggacagcagatacaactggagcttcatccactgccccgcctgccagtgcaacggccacagcaagtgcatcaaccagagcatctgcgagaagtgcgagaacctgaccaccggcaagcactgcgagacctgcatcagcggcttctacggcgaccccaccaacggcggcaagtgccagccctgcaagtgcaacggccacgccagcctgtgcaacaccaacaccggcaagtgcttctgcaccaccaagggcgtgaagggcgacgagtgccagctgtgcgaggtggagaacagataccagggcaaccccctgagaggcacctgctactacaccctgctgatcgactaccagttcaccttcagcctgagccaggaggacgacagatactacaccgccatcaacttcgtggccacccccgacgagcagaacagagacctggacatgttcatcaacgccagcaagaacttcaacctgaacatcacctgggccgccagcttcagcgccggcacccaggccggcgaggagatgcccgtggtgagcaagaccaacatcaaggagtacaaggacagcttcagcaacgagaagttcgacttcagaaaccaccccaacatcaccttcttcgtgtacgtgagcaacttcacctggcccatcaagatccagatcgccttcagccagcacagcaacttcatggacctggtgcagttcttcgtgaccttcttcagctgcttcctgagcctgctgctggtggccgccgtggtgtggaagatcaagcagagctgctgggccagcagaagaagagagcagctgctgagagagatgcagcagatggccagcagacccttcgccagcgtgaacgtggccctggagaccgacgaggagccccccgacctgatcggcggcagcatcaagaccgtgcccaagcccatcgccctggagccctgcttcggcaacaaggccgccgtgctgagcgtgttcgtgagactgcccagaggcctgggcggcatccccccccccggccagagcggcctggccgtggccagcgccctggtggacatcagccagcagatgcccatcgtgtacaaggagaagagcggcgccgtgagaaacagaaagcagcagccccccgcccagcccggcacctgcatctag

SEQ ID NO: 238696 - DNA, 8633 bp, Artificial Sequence
  derived and/or modified sequence
ggcgaagcggagccggccgtgcggtgtgtgtgtatgtgttcgcggggcgccgtctcagccccgggaagatggtggctgcagcggcggcaactgaggcaaggctgaggaggaggacggcggcgacggcagcgctcgcgggcaggagcggcgggccgcactgggactgggacgtgaccagggctgggaggccggggctgggggccgggctgcgcctcccgcggctgctgtctccaccgctgcggccacggctgctgctgctgctgttgttgctctcgccgccgctgctgctgctgctgctgccctgtgaggccgaggccgcggcggcggcggcggcggtgtcgggctcagccgcagccgaggccaaggaatgtgaccggccctgtgtcaacggcggtcgctgcaaccctggcaccggccagtgcgtctgccccgccggctgggtgggcgagcaatgccagcactgcgggggccgcttcagactaactggatcttctgggtttgtgacagatggacctggaaattataaatacaaaacgaagtgcacgtggctcattgaaggacagccaaatagaataatgagacttcgtttcaatcattttgctacagagtgtagttgggaccatttatatgtttatgatggggactcaatttatgcaccgctagttgctgcatttagtggcctcattgttcctgagagagatggcaatgagactgtccctgaggttgttgccacatcaggttatgccttgctgcatttttttagtgatgctgcttataatttgactggatttaatattacttacagttttgatatgtgtccaaataactgctcaggccgaggagagtgtaagatcagtaatagcagcgatactgttgaatgtgaatgttctgaaaactggaaaggtgaagcatgtgacattcctcactgtacagacaactgtggttttcctcatcgaggcatctgcaattcaagtgatgtcagaggatgctcctgcttctcagactggcagggtcctggatgttcagttcctgtaccagctaaccagtcattttggactcgagaggaatattctaacttaaagctccccagagcatctcataaagctgtggtcaatggaaacattatgtgggttgttggaggatatatgttcaaccactcagattataacatggttctagcgtatgaccttgcttctagggagtggcttccactaaaccgttctgtgaacaatgtggttgttagatatggtcattctttggcattatacaaggataaaatttacatgtatggaggaaaaattgattcaactgggaatgtgaccaatgagttgagagtttttcacattcataatgagtcatgggtgttgttgacccctaaggcaaaggagcagtatgcagtggttgggcactctgcacacattgttacactgaagaatggccgagtggtcatgctggtcatctttggtcactgccctctctatggatatataagcaatgtgcaggaatatgatttggataagaacacatggagtatattacacacccagggtgcccttgtgcaagggggttacggccatagcagtgtttacgaccataggaccagggccctatacgttcatggtggctacaaggctttcagtgccaataagtaccggcttgcagatgatctctaccgatatgatgtggatacccagatgtggaccattcttaaggacagccgatttttccgttacttgcacacagctgtgatagtgagtggaaccatgctggtgtttggaggaaacacacacaatgacacatctatgagccatggcgccaaatgcttctcttcagatttcatggcctatgacattgcctgtgaccgctggtcagtgcttcccagacctgatctccaccatgatgtcaacagatttggccattcagcagtcttacacaacagcaccatgtatgtgttcggtggtttcaatagtctcctcctcagcgacatcctggtattcacctcggaacagtgtgatgcgcatcggagtgaagccgcttgtttagcagcaggacctggtattcggtgtgtgtggaacacagggtcgtctcagtgtatctcgtgggcgctggcaactgatgaacaagaagaaaagttaaaatcagaatgtttttccaaaagaactcttgaccatgacagatgtgaccagcacacagattgttacagctgcacagccaacaccaatgactgccactggtgcaatgaccattgtgtccccaggaaccacagctgctcagaaggccagatctccatttttaggtatgagaattgccccaaggataaccccatgtactactgtaacaagaagaccagctgcaggagctgtgccctggaccagaactgccagtgggagccccggaatcaggagtgcattgccctgcccgaaaatatctgtggcattggctggcatttggttggaaactcatgtttgaaaattactactgccaaggagaattatgacaatgctaaattgttctgtaggaaccacaatgcccttttggcttctcttacaacccagaagaaggtagaatttgtccttaagcagctgcgaataatgcagtcatctcagagcatgtccaagctcaccttaaccccatgggtcggccttcggaagatcaatgtgtcctactggtgctgggaagatatgtccccatttacaaatagtttactacagtggatgccgtctgagcccagtgatgctggattctgtggaattttatcagaacccagtactcggggactgaaggctgcaacctgcatcaacccactcaatggtagtgtctgtgaaaggcctgcaaaccacagtgctaagcagtgccggacaccatgtgccttgaggacagcatgtggagattgcaccagcggcagctctgagtgcatgtggtgcagcaacatgaagcagtgtgtggactccaatgcctacgtggcctccttcccttttggccagtgtatggaatggtatacgatgagcacctgcccccctgaaaattgttcaggctactgtacctgtagtcattgcttggagcaaccaggctgtggctggtgtactgatcccagcaatactggcaaagggaaatgcatagagggttcctataaaggaccagtgaagatgccttcgcaagcccctacaggaaatttctatccacagcccctgctcaattccagcatgtgtctagaggacagcagatacaactggtctttcattcactgtccagcttgccaatgcaacggccacagtaaatgcatcaatcagagcatctgtgagaagtgtgagaacctgaccacaggcaagcactgcgagacctgcatatctggcttctacggtgatcccaccaatggagggaaatgtcagccatgcaagtgcaatgggcacgcgtctctgtgcaacaccaacacgggcaagtgcttctgcaccaccaagggcgtcaagggggacgagtgccagctatgtgaggtagaaaatcgataccaaggaaaccctctcagaggaacatgttattatactcttcttattgactatcagttcacctttagtctatcccaggaagatgatcgctattacacagctatcaattttgtggctactcctgacgaacaaaacagggatttggacatgttcatcaatgcctccaagaatttcaacctcaacatcacctgggctgccagtttctcagctggaacccaggctggagaagagatgcctgttgtttcaaaaaccaacattaaggagtacaaagatagtttctctaatgagaagtttgattttcgcaaccacccaaatatcactttctttgtttatgtcagtaatttcacctggcccatcaaaattcagattgccttctctcagcacagcaattttatggacctggtacagttcttcgtgactttcttcagttgtttcctctctttgctcctggtggctgctgtggtttggaagatcaaacaaagttgttgggcctccagacgtagagagcaacttcttcgagagatgcaacagatggccagccgtccctttgcctctgtaaatgtcgccttggaaacagatgaggagcctcctgatcttattggggggagtataaagactgttcccaaacccattgcactggagccgtgttttggcaacaaagccgctgtcctctctgtgtttgtgaggctccctcgaggcctgggtggcatccctcctcctgggcagtcaggtcttgctgtggccagcgccctggtggacatttctcagcagatgccgatagtgtacaaggagaagtcaggagccgtgagaaaccggaagcagcagccccctgcacagcctgggacctgcatctgatgctggggccagggactctcccacgcacgagctagtgagtggcacaccagagccatctgcagggaagggcgtggcggggaaatggctgtgcggtgcgggacggaagactggaaaccctcaaagcatctgactcacctgcatgatcacaagctttctttgacggtttctcccatccgtgttccagcatctaaccttttacttttgcataggaaatacttgatttaattacaggtccagggatgagctgatggttgctggaggaggccagtgtagagccagtgagagaactaggaatgacactcaggttcactgtggaaaactgttcttgggactgtctcaactgtgcaaaaaacaaaagatggagtgtttacaagtagacattcgtcatcagttgttcttgaacatggtcttttaaaaactagtcagatgaattgttttcatctgaagcctgctatcttttttaaaagatgtgctatttattcttgcacgatttaggcaattatctctcttccagggagtacctttttttctagttgagaattaataatggtccatctcttttgatcatatcaagctaggatagaaggggggctattttaaatgtcaaggtcagcagtgttactttgaatgtaaactggtataataggtagttttctatagtaacttgattaatttagtcttaatccatttgaaactctctcttcctttctctctgcctgtccctctccttctccatctcaccctccctctctcacacatacacacacaaacacatacacacaacactaagtgcctagactttaaatagatctagcaattggaaagttagtaagcctaagtttttacataattgcattcctacattcttgtaaaatttaaatagctaccattggcaatctgctttttttctaaaatctgatttgcagccaggaaagaattttctcacccaaggaacatttgatctagcagcagggatgagaggaaagcagaaatgaatgaactgtgaaagctcctgtttttattatcaaaaaggacactgtcaagaaggcgccccctgcccccacccccgtgtcaccctaggcctgataagcgatcagaggaaaggactcattcatgtcacgcttccttgagcagaaaagagcactgagagcacttgggacccctggatcagagagcatctgtgtgtcctgcagcctcctctgaacttgtggttcattctcaggctggggtggactcagatgccaggaaagggacagcctcccattgtcaggcagaagctgcccaaagcctggagaaggacttgtttgccctctttcccccaggaggggctcgacccacccaccctccctctcagaccaaggtggtggctgtgaggagggcagcaaatgctgacaaggatgaaaagcacatggaaaaaaatggatgaggagggaaaactctgccaaatggaaaatgaccaaatttaagagggtgggacagtcccctgctcctctcccagagggcactgcttggaaattgtgttttccccatttatggtgctctgtattctggcattatgcagcagcctcccagaagctctcttctgcttcaaaacctgggatctctggcattaccctattgggatggaccgctggacagcaatgctcgagtttgtgaatttggagagatactcaaaagagctaaaactgcagcattttacctttaaatgcagtgcctagagagagagtattgtctcttccccaacactaaccccactcccatgaagaattgcctggaaagatgttttcaaggaatttgaaccataaaacactatctgatgcacagaacacctctactttgagactcacctctcataaagcttctttttcacattactgttaaagaccagacgttctagaaaagacccctcctctcatgagctcccccatccctgctacagaacacagcacccatggcgcctgcagtggactggccccttaattcccacaggcccccccagcaaggccaaagggaggcccctgggtattgtcctcctacaaggaagatcctctttgtttgttcaaaggaccagttttcctaggccaaagaagtctcttccccatgttagtcctatgccttgaaatatcatgcaccatgacccacagccatctggttatgtcttatttttttcctaaaagataatgtttatttttaaaaaggaaggaaggagcaagtgaagtttcattctgctccagcggtggggaagccgctgaatccacctgcttctcctttgcaaccgacagcaaacagctttctccggcctcagggcagaaaaagggaatggcagggagtaagaggcgctgggctcggagcctgtttccaagaaggaattggttgtcatctggcagtgttgcgcgtcacaagagagcctgtatataaattaaaatagtcaagacaacactgaccttgcacttgtacataactatacagtagtgtccagaatgttcagacattcggagtgtacataaaacagaaaaaatcttcatgtatttttattaaatataacaatgtctgagtttcacctaagatgtttttgtgccatatgctggatatccaggttctcgccaggccccgatacatgaataacaaacccaagaaacgcatccccattgtgtgatgtgttcagatgcatctggcaccaattaggtatttcttaaaacaggactcatctgtcagagtgcacatgaaaaatcaggcagggaatcgaaacgacagtgctggaggagactcaggaagcagaggcgtccctgccgctgcccttggccctgcaagcacatcatgaccctttctggcagcctcttggtgctctgggtagtgagggatgaccagtcttgtcctgagaaatgtttctcttagtctttaagttcaaagactaacctgtagcaatcagactttccaaaagggggttctccattttttgtagttttgtctaaatttttaatgaccatttcctggaatcagtttattatactgaaaactgggggtgggagtagggagctagtttgttgataaatagttcccatttccccatggagaatttgacataccctggactcctgtgtgcctcctgccatccctgcacacagcctggggagaagcctgtgcctccccgtgtggagagaaggcaaccccagatcccctgagctaacccggaggaaaggcagtcctggacagaagactgtcagcagaaggaaagtactggactacccgtgggtaagtcctgccattcaagactggagacacctgggaaataaaaagagcagggcactgctggtgggaagaggcattttaccttccagtgcaaatcctgctcctttgatttaatggggtgtactggggccaggggctgattcacttccttgggagatggtggtgttttcatgaacatctttgatccttccatttcatttattcatccatccattcaacaagtatttgctaaacactaacttaagctaatgctagggtagtgactgagatgtaaaaatagattttagaattaaaacaaaatccaagtcctcacacccctgtcatcccaggagatctttccttgtggtggtttctgtgagaattggccatcctgaggacacagccaggacggcagaggcctcctggcctcagggcatgccctgcctaccttctgaaatgtttaccccattgaccaaacttggctccagccattgcggtggtttctagatagccaggcccaccaagagatattgccccttgatgagagtcaaacaccctgcctacaaggagatgttttgaaatggagaggaaaattggcacctcatcttttaaaggcagtaatggaattgattttcagtaactgaatttgtgcacaaaacattctaaacactagtgaagcctgtttcgttgaactaattctggctctggaaatgtttttgttttatagttatttacgatttcgtttgtttggattcaagcttagtttgttaatatgtataatttagcatctattacactcatgtaaatatggagtaagtattgtaaactatttcatcgcggggattgtgggtgttatacatacatttaggactgcaattttttggtattttttgtattgtaaaataacagctaatttaagcaggaacaagagaactaagggaggtctgtgcattttaaacacaaatgtgaagaacttgtatataaacaaaagtaaatactataatacaaacttccttctgaaataaaagtagatctggtaaaaatgtg

SEQ ID NO: 238697 - DNA, 4904 bp, Artificial Sequence
  derived and/or modified sequence
atggtggctgcagcggcggcaactgaggcaaggctgaggaggaggacggcggcgacggcagcgctcgcgggcaggagcggcgggccgcactgtgtcaacggcggtcgctgcaaccctggcaccggccagtgcgtctgccccgccggctgggtgggcgagcaatgccagcactgcgggggccgcttcagactaactggatcttctgggtttgtgacagatggacctggaaattataaatacaaaacgaagtgcacgtggctcattgaaggacagccaaatagaataatgagacttcgtttcaatcattttgctacagagtgtagttgggaccatttatatgtttatgatggggactcaatttatgcaccgctagttgctgcatttagtggcctcattgttcctgagagagatggcaatgagactgtccctgaggttgttgccacatcaggttatgccttgctgcatttttttagtgatgctgcttataatttgactggatttaatattacttacagttttgatatgtgtccaaataactgctcaggccgaggagagtgtaagatcagtaatagcagcgatactgttgaatgtgaatgttctgaaaactggaaaggtgaagcatgtgacattcctcactgtacagacaactgtggttttcctcatcgaggcatctgcaattcaagtgatgtcagaggatgctcctgcttctcagactggcagggtcctggatgttcagttcctgtaccagctaaccagtcattttggactcgagaggaatattctaacttaaagctccccagagcatctcataaagctgtggtcaatggaaacattatgtgggttgttggaggatatatgttcaaccactcagattataacatggttctagcgtatgaccttgcttctagggagtggcttccactaaaccgttctgtgaacaatgtggttgttagatatggtcattctttggcattatacaaggataaaatttacatgtatggaggaaaaattgattcaactgggaatgtgaccaatgagttgagagtttttcacattcataatgagtcatgggtgttgttgacccctaaggcaaaggagcagtatgcagtggttgggcactctgcacacattgttacactgaagaatggccgagtggtcatgctggtcatctttggtcactgccctctctatggatatataagcaatgtgcaggaatatgatttggataagaacacatggagtatattacacacccagggtgcccttgtgcaagggggttacggccatagcagtgtttacgaccataggaccagggccctatacgttcatggtggctacaaggctttcagtgccaataagtaccggcttgcagatgatctctaccgatatgatgtggatacccagatgtggaccattcttaaggacagccgatttttccgttacttgcacacagctgtgatagtgagtggaaccatgctggtgtttggaggaaacacacacaatgacacatctatgagccatggcgccaaatgcttctcttcagatttcatggcctatgacattgcctgtgaccgctggtcagtgcttcccagacctgatctccaccatgatgtcaacagatttggccattcagcagtcttacacaacagcaccatgtatgtgttcggtggtttcaatagtctcctcctcagcgacatcctggtattcacctcggaacagtgtgatgcgcatcggagtgaagccgcttgtttagcagcaggacctggtattcggtgtgtgtggaacacagggtcgtctcagtgtatctcgtgggcgctggcaactgatgaacaagaagaaaagttaaaatcagaatgtttttccaaaagaactcttgaccatgacagatgtgaccagcacacagattgttacagctgcacagccaacaccaatgactgccactggtgcaatgaccattgtgtccccaggaaccacagctgctcagaaggccagatctccatttttaggtatgagaattgccccaaggataaccccatgtactactgtaacaagaagaccagctgcaggagctgtgccctggaccagaactgccagtgggagccccggaatcaggagtgcattgccctgcccgaaaatatctgtggcattggctggcatttggttggaaactcatgtttgaaaattactactgccaaggagaattatgacaatgctaaattgttctgtaggaaccacaatgcccttttggcttctcttacaacccagaagaaggtagaatttgtccttaagcagctgcgaataatgcagtcatctcagagcatgtccaagctcaccttaaccccatgggtcggccttcggaagatcaatgtgtcctactggtgctgggaagatatgtccccatttacaaatagtttactacagtggatgccgtctgagcccagtgatgctggattctgtggaattttatcagaacccagtactcggggactgaaggctgcaacctgcatcaacccactcaatggtagtgtctgtgaaaggcctgcaaaccacagtgctaagcagtgccggacaccatgtgccttgaggacagcatgtggagattgcaccagcggcagctctgagtgcatgtggtgcagcaacatgaagcagtgtgtggactccaatgcctacgtggcctccttcccttttggccagtgtatggaatggtatacgatgagcacctgcccccctgaaaattgttcaggctactgtacctgtagtcattgcttggagcaaccaggctgtggctggtgtactgatcccagcaatactggcaaagggaaatgcatagagggttcctataaaggaccagtgaagatgccttcgcaagcccctacaggaaatttctatccacagcccctgctcaattccagcatgtgtctagaggacagcagatacaactggtctttcattcactgtccagcttgccaatgcaacggccacagtaaatgcatcaatcagagcatctgtgagaagtgtgagaacctgaccacaggcaagcactgcgagacctgcatatctggcttctacggtgatcccaccaatggagggaaatgtcagccatgcaagtgcaatgggcacgcgtctctgtgcaacaccaacacgggcaagtgcttctgcaccaccaagggcgtcaagggggacgagtgccagctatgtgaggtagaaaatcgataccaaggaaaccctctcagaggaacatgttattatactcttcttattgactatcagttcacctttagtctatcccaggaagatgatcgctattacacagctatcaattttgtggctactcctgacgaacaaaacagggatttggacatgttcatcaatgcctccaagaatttcaacctcaacatcacctgggctgccagtttctcagctggaacccaggctggagaagagatgcctgttgtttcaaaaaccaacattaaggagtacaaagatagtttctctaatgagaagtttgattttcgcaaccacccaaatatcactttctttgtttatgtcagtaatttcacctggcccatcaaaattcagattgccttctctcagcacagcaattttatggacctggtacagttcttcgtgactttcttcagttgtttcctctctttgctcctggtggctgctgtggtttggaagatcaaacaaagttgttgggcctccagacgtagagagcaacttcttcgagagatgcaacagatggccagccgtccctttgcctctgtaaatgtcgccttggaaacagatgaggagcctcctgatcttattggggggagtataaagactgttcccaaacccattgcactggagccgtgttttggcaacaaagccgctgtcctctctgtgtttgtgaggctccctcgaggcctgggtggcatccctcctcctgggcagtcaggtcttgctgtggccagcgccctggtggacatttctcagcagatgccgatagtgtacaaggagaagtcaggagccgtgagaaaccggaagcagcagccccctgcacagcctgggacctgcatctgatgctggggccagggactctcccacgcacgagctagtgagtggcacaccagagccatctgcagggaagggcgtggcggggaaatggctgtgcggtgcgggacggaagactggaaaccctcaaagcatctgactcacctgcatgatcacaagctttctttgacggtttctcccatccgtgttccagcatctaaccttttacttttgcataggaaatacttgatttaattacaggtccagggatgagctgatggttgctggaggaggccagtgtagagccagtgagagaactaggaatgacactcaggttcactgtggaaaactgttcttgggactgtctcaactgtgcaaaaaacaaaagatggagtgtttacaagtagacattcgtcatcagttgttcttgaacatggtcttttaaaaactagtcagatgaattgttttcatctgaagcctgctatcttttttaaaagatgtgctatttattcttgcacgatttaggcaattatctctcttccagggagtacctttttttctagttgagaattaataatggtccatctcttttgatcatatcaagctaggatagaaggggggctattttaaatgtcaaggtcagcagtgttactttgaatgtaaactggtataataggtagttttctatagtaacttgattaatttagtcttaatccatttgaaactctctcttcctttctctctgcctgtccctctccttctccatctcaccctccctctctcacacatacacacacaaacacatacacacaacactaagtgcctagactttaaatagatctagcaattggaaagttagtaagcct

SEQ ID NO: 238698 - DNA, 4290 bp, Artificial Sequence
  derived and/or modified sequence
atggtggctgctgccgcggcaactgaggcccgattacgtcggcggacagccgctacagcagccctggccgggcgcagtggcggccctcactgggactgggatgtgacgcgtgccggtcgtcccgggttaggtgcaggacttagactgcctaggttactttctccccctctcaggccgcggctgcttctcttgctgttgcttctctcgccccctcttttgcttttgctgctaccgtgcgaggcggaggcggcggctgcagctgccgcggtgtccggtagcgctgctgctgaagcaaaagagtgcgaccggccctgcgttaatggtgggcggtgcaaccccggtaccggtcagtgcgtctgtcccgcagggtgggtgggagagcagtgccagcactgcgggggacgcttccgcctgaccggtagttctgggttcgtgaccgacggtcccgggaactacaagtacaaaacaaaatgcacatggttaattgagggccagcctaaccgcatcatgaggttgcgctttaaccacttcgctactgagtgtagctgggaccacctgtacgtgtacgacggcgattctatctacgccccactggtggctgccttctcagggttgatcgtgccggagcgggacggcaatgaaaccgtccccgaggttgtggcaaccagtggctatgctctgctccactttttttccgatgccgcatataacctgaccggcttcaatatcacctatagctttgacatgtgccctaataactgcagtggccgaggtgagtgtaagattagtaattcttctgatacagtcgaatgcgaatgttcagaaaattggaaaggcgaggcttgcgatattcctcattgtacggacaattgcggattcccccacagagggatttgtaactcctcagacgtgcgtggctgttcttgtttctccgactggcagggtccgggctgttctgtacccgtgcctgccaatcagtcattttggacacgagaagaatactccaacctcaagctgccccgggcaagccacaaagcagtggttaatggaaatatcatgtgggtcgttggtggctacatgtttaaccacagcgactacaacatggtgctcgcttacgacttagcaagcagggagtggctcccactgaaccggtcagttaataacgttgtggtgcgctatgggcactccctagccctgtacaaggacaagatctatatgtatggagggaagattgactccaccggaaatgttactaacgagctgagagtattccacatccataacgagtcctgggtgttgctcacccctaaagcaaaagagcagtatgcagtggtggggcacagtgcacatattgtgaccctgaagaatggcagggtggtgatgctggtcattttcggccactgtcctctctacgggtatatctctaatgtgcaggagtatgatctggacaaaaatacatggtccatcttgcatacacagggagcactagttcagggcggatatggacacagttctgtgtatgaccacaggacaagggccctgtatgtccatggcggctacaaggccttctccgccaacaagtaccgccttgcagacgatctttacagatacgacgtcgatacacagatgtggacgatactgaaggatagtcgctttttcaggtatctgcataccgctgtaatcgtgtcaggtacaatgctagtcttcgggggcaatacccacaatgatacatctatgtctcacggcgctaaatgctttagttcagatttcatggcctatgatattgcatgtgacaggtggtctgtcctgccccgacctgacttgcaccatgacgttaatcgctttgggcattctgccgttctgcacaacagcaccatgtacgtcttcggtgggtttaactcactgctgttgagcgacattttggtgttcaccagcgagcagtgtgacgctcatagatccgaagccgcctgcctggctgcgggacccggcatccgctgtgtctggaacaccggatcatctcagtgcatcagctgggcactggccaccgacgaacaggaggagaagttgaaaagcgagtgcttttccaagcgcacgcttgaccacgaccggtgtgaccagcacactgactgctatagttgcacggccaatactaatgactgccactggtgcaacgaccactgcgtgccccggaatcactcttgctccgaaggtcagattagcatctttcgctacgaaaactgccccaaagacaacccgatgtactattgtaacaaaaagacctcttgcagatcctgtgccctggaccagaactgccaatgggagccgaggaaccaggagtgtattgctttaccagagaacatctgcggaattggatggcatcttgtgggaaatagttgcctaaaaatcaccaccgcaaaggagaactacgacaacgcgaaactgttttgtcggaatcacaacgcactgctggcctcactgaccacgcagaaaaaagtggaattcgtgttgaagcagcttagaatcatgcagagcagccagtccatgtctaaattgaccctcacaccttgggtgggcttacgaaaaatcaatgtgagttactggtgttgggaagacatgtcccctttcaccaactcacttctgcaatggatgccttctgagccatccgatgcaggtttctgcggaatattaagtgagccgtctacccggggcctgaaggccgcgacctgcatcaatcctctcaacggttcagtatgcgagaggccggcaaatcacagcgccaagcagtgcagaactccttgtgccctgaggacagcctgcggggattgtacctctgggtctagtgagtgtatgtggtgttccaacatgaaacaatgtgtcgactccaacgcttacgttgcatccttcccttttggccagtgtatggagtggtacacaatgagcacttgtccgccagaaaactgtagcggatactgcacctgctcccactgtctagaacagccaggctgcgggtggtgtaccgatccaagcaatacgggtaagggcaaatgcatcgagggatcttataagggtcctgtcaagatgcccagtcaggctccaaccggcaacttttatccccaacctctgctgaacagtagcatgtgtttagaggattcacgctataactggtccttcatacactgccccgcatgtcagtgcaacggtcactcaaagtgtattaaccaatcgatctgcgagaaatgcgagaacctgacaacaggcaaacattgcgagacctgtatcagcggattttacggagaccctacaaatggagggaagtgtcagccttgcaaatgcaacgggcacgcctctttgtgtaacaccaacactgggaaatgtttctgcaccaccaagggggtaaaaggcgatgaatgtcagttgtgcgaggtggagaatcggtatcagggtaaccccctgcgcggcacatgctattacacactattgattgattaccagtttactttttctctcagccaggaagatgaccgatactacactgcaatcaatttcgtcgctacaccagatgagcagaaccgcgatttggacatgtttataaacgcgagtaaaaattttaaccttaacattacctgggccgcaagcttctccgccggaacacaagccggggaggagatgcccgtggtgagcaagaccaacattaaggaatataaagactccttctccaacgaaaagtttgactttaggaatcatccaaatatcacttttttcgtttatgtgtccaactttacatggcccatcaaaattcagattgcttttagtcaacactccaactttatggacctcgtgcagttttttgttacgtttttttcctgctttctgtcactgctgctagtggccgctgttgtgtggaaaatcaagcaaagttgctgggcatctcggagaagggagcagctcctgcgcgaaatgcagcagatggcatctaggccatttgcttcagttaacgtggcactcgagaccgatgaagagccccccgatttgatcggaggctctatcaagactgtgcccaagcccatagccctagagccttgtttcggcaacaaagcggccgtcttatctgttttcgtgcgactccctcgcggtctgggcgggattcctccaccaggacagtctggcttagccgtcgcatccgccctggtggacatctcccagcagatgcccattgtttataaagaaaaaagcggcgctgtgaggaatagaaagcagcagcctcccgcccaacctggaacttgtatttag

SEQ ID NO: 238699 - DNA, 4290 bp, Artificial Sequence
  derived and/or modified sequence
atggtggccgctgctgctgccacagaggcccggctgcggcggaggacagctgccacagctgccctggccggccgcagcggcggcccccactgggactgggatgtgacccgggccggccggcccggcctgggcgccggcctgcggctgccccggctgctgagcccccccctgcggccccggctgctgctgctgctgctgctgctgagcccccccctgctgctgctgctgctgccctgtgaggccgaggccgctgctgctgctgctgctgtgtctggcagcgctgctgctgaggccaaggaatgtgaccggccctgtgtgaatggaggccgctgcaaccctggcaccggccagtgtgtgtgcccagctggctgggtgggggagcagtgccagcactgcggcggccgcttccggctgaccggcagcagcggctttgtgacagatggccctggcaactacaagtacaagaccaagtgcacctggctgattgagggccagcccaaccgcatcatgaggctgcgcttcaaccactttgccacagagtgctcctgggaccacctgtatgtgtatgatggagacagcatctatgcccccctggtggccgccttcagcggcctcatcgtgcctgagagagatggaaatgaaacagtgcctgaggtggtggccaccagcggctacgccctgctgcacttcttcagtgatgctgcctacaacctgaccggcttcaacatcacctacagctttgacatgtgccccaacaactgcagcggcagaggagagtgcaagatcagcaacagcagtgacacagtggagtgtgagtgcagcgagaactggaagggggaggcctgtgacatcccccactgcacagacaactgtggcttcccccaccggggcatctgcaacagcagtgatgtgcggggctgcagctgcttcagtgactggcagggccctggctgcagcgtgcctgtgcctgccaaccagagcttctggacccgggaggagtacagcaacctgaagctgccccgggccagccacaaggctgtggtgaatggaaacatcatgtgggtggtgggcggctacatgttcaaccacagcgactacaacatggtgctggcctatgacctggccagccgggagtggctgcccctgaacagatctgtgaacaacgtggtggtgcgctatggccacagcctggccctgtacaaggacaagatctacatgtatggaggcaagattgacagcactggaaatgtgaccaatgagctgcgggtcttccacatccacaatgaatcctgggtgctgctgacccccaaggccaaggagcagtatgctgtggtgggccacagcgcccacatcgtgaccctgaagaatggccgggtggtgatgctggtgatcttcggccactgccccctgtatggctacatcagcaatgtgcaggagtatgacctggacaagaacacctggagcatcctgcacacccagggcgccctggtgcagggcggctacggccacagctctgtgtatgaccacaggacccgggccctgtatgtgcatggaggctacaaggccttcagcgccaacaagtaccgcctggctgatgacctgtaccgctatgatgtggacacccagatgtggaccatcctgaaggacagccgcttcttccgctacctgcacacagctgtgattgtgtctggcaccatgctggtgtttggaggcaacacccacaatgacacctccatgagccatggagccaagtgcttcagcagtgacttcatggcctatgacatcgcctgtgaccgctggagcgtgctgcccaggccagacctgcaccatgatgtgaacagatttggccacagcgctgtgctgcacaacagcaccatgtatgtgtttggaggcttcaacagcctgctgctgagtgacatcctggtgttcaccagcgagcagtgtgatgcccacaggtctgaggccgcctgcctggccgccggccctggcatccgctgtgtgtggaacacaggcagcagccagtgcatctcctgggccctggccacagatgagcaggaggagaagctgaagtctgagtgcttcagcaagaggaccctggaccatgacagatgtgaccagcacacagactgctacagctgcacagccaacaccaatgactgccactggtgcaatgaccactgtgtgcccaggaaccacagctgcagcgagggccagatcagcatcttccgctatgagaactgccccaaggacaaccccatgtactactgcaacaagaagaccagctgccgcagctgtgccctggaccagaactgccagtgggagcccaggaaccaggagtgcatcgccctgcctgagaacatctgtggcatcggctggcacctggtgggcaacagctgcctgaagatcaccacagccaaggaaaattatgacaatgccaagctgttctgcaggaaccacaatgccctgctggccagcctgaccacccagaagaaggtggagtttgtgctgaagcagctgcgcatcatgcagagcagccagagcatgagcaagctgaccctgaccccctgggtgggcctgaggaagatcaacgtgtcctactggtgctgggaggacatgagccccttcaccaacagcctgctgcagtggatgcccagcgagcccagtgatgctggcttctgtggcatcctgtctgagcccagcacccggggcctgaaggccgccacctgcatcaaccccctgaatggatctgtgtgtgagaggcctgccaaccacagcgccaagcagtgcaggaccccctgtgccctgaggacagcctgtggggactgcaccagcggcagcagcgagtgcatgtggtgcagcaacatgaagcagtgtgtggacagcaatgcctacgtggccagcttccccttcggccagtgcatggagtggtacaccatgagcacctgccccccagagaactgcagcggctactgcacctgcagccactgcctggagcagcccggctgcggctggtgcacagaccccagcaacacaggaaaaggaaaatgtattgagggcagctacaagggccctgtgaagatgcccagccaggcccccactggaaacttctacccccagcccctgctgaacagctccatgtgcctggaggacagccgctacaactggagcttcatccactgcccagcctgccagtgcaatggccacagcaagtgcatcaaccagagcatctgtgagaagtgtgagaacctgaccaccgggaagcactgtgagacctgcatcagcggcttctatggagaccccaccaacggcggcaagtgccagccctgcaagtgcaatggccacgccagcctgtgcaacaccaacacaggcaagtgcttctgcaccaccaagggcgtgaagggagatgagtgccagctgtgtgaggtggagaaccgctaccagggcaaccccctgcggggcacctgctactacaccctgctgattgactaccagttcaccttcagcctgagccaggaggatgaccgctactacacagccatcaactttgtggccaccccagatgagcagaacagagacctggacatgttcatcaatgccagcaagaacttcaacctgaacatcacctgggccgccagcttctctgctggcacccaggccggggaggagatgcctgtggtgtccaagaccaacatcaaggagtacaaggacagcttcagcaatgagaagtttgacttcaggaaccaccccaacatcaccttctttgtgtatgtgagcaacttcacctggcccatcaagatccagatcgccttcagccagcacagcaacttcatggacctggtgcagttctttgtgaccttcttcagctgcttcctgagcctgctgctggtggccgctgtggtgtggaagatcaagcagagctgctgggccagcagaagaagagagcagctgctgcgggagatgcagcagatggccagccggccctttgcctctgtgaatgtggccctggagacagatgaggagcccccagacctgattggaggcagcatcaagacagtgcccaagcccatcgccctggagccctgcttcggcaacaaggctgctgtgctgtctgtgtttgtgcggctgccccggggcctgggcggcatccccccacctggccagagcggcctggccgtggccagcgccctggtggacatcagccagcagatgcccatcgtgtacaaggagaagtctggagctgtgaggaacaggaagcagcagcccccagcccagcccggcacctgcatctag

SEQ ID NO: 238700 - DNA, 4290 bp, Artificial Sequence
  derived and/or modified sequence
atggtggccgccgccgccgccaccgaggcccggctgcggcggcggaccgcagccaccgcagcactggctggcaggagcggtggcccccattgggactgggacgtaactagggccggtagaccagggctcggcgcgggactcagactgccccggctgttaagccccccactacggcctcggttactgctgcttttacttctgttgagcccccccctcctgctactgctcttaccctgcgaagcagaggcagcagccgccgccgccgcagtatccggctccgccgctgcagaggcaaaggagtgcgatagaccctgcgtgaatggcggccgatgcaacccgggtactggccagtgcgtgtgcccagcagggtgggtcggagagcagtgtcagcactgcggagggagattcaggttgactggcagctctggcttcgtcaccgatgggccagggaattacaaatacaagacgaaatgtacatggctcattgaaggtcagccaaataggataatgcgcttaaggtttaatcattttgccacggagtgcagctgggaccacctgtatgtgtatgacggcgatagcatctacgcgccactggtggcagcattttccggactaattgttccagagagggacggtaacgaaacagtacctgaggtggtggcaacctctggatacgctcttctgcacttcttctccgacgccgcatataacctgaccggcttcaacatcacatattcttttgatatgtgtcccaataactgctcgggccgcggagagtgtaagattagcaactccagcgacacagtagagtgcgagtgttccgagaattggaaaggagaagcctgtgatatcccacactgtactgacaattgcgggttcccccaccgagggatttgtaactccagcgatgtgagagggtgtagctgcttttccgattggcagggcccaggatgtagcgttccagtccctgctaatcagagcttttggacacgcgaggaatacagcaatcttaagctcccacgcgcatctcataaggcagttgttaatgggaatataatgtgggtggtcggcgggtacatgtttaatcactcggattacaatatggtcctggcatatgacctggctagccgtgaatggctgcctctaaacagaagtgtcaataacgtagtggttcgatatggccatagcctggccctttacaaggataaaatctacatgtatgggggcaagattgattctaccggaaacgtcactaatgagctgagagtattccatattcacaatgaatcttgggttctcttgacccccaaagctaaggagcagtacgccgttgttggacattctgcccacattgtaaccctaaagaacggccgcgtcgtcatgctggtgattttcgggcattgccccctttatggatatataagcaatgtgcaagagtatgacctggataaaaacacctggtcaattctacacacccagggagccttggtccagggcggctatggccacagttcagtttacgaccatagaacccgggccttatacgtacacggcggttataaggctttcagcgccaacaaatatcgcctggctgacgatctgtataggtacgacgtggacacccagatgtggaccatcctgaaagattcccgcttttttagatacctccatacggccgtcattgtttctggcactatgttggtctttggcggtaatacacacaacgacacaagtatgagccatggggcaaagtgtttctcaagtgacttcatggcatacgatattgcttgcgaccggtggagcgtgcttcctagacccgatcttcaccatgacgtcaaccgctttgggcatagtgccgtgctgcacaacagtacgatgtatgttttcggtggttttaatagcctactgctatccgacatactggtctttacttctgagcaatgcgacgcacatcgcagtgaggctgcatgtttggcagctggtcctggtattagatgcgtctggaataccggatctagtcagtgcatttcttgggctctggctacagacgaacaggaagagaagctcaaatctgagtgcttctctaagcggacactggatcacgatcgatgcgatcagcacacagattgttacagctgtacggctaataccaacgactgtcattggtgcaacgaccactgtgtccctagaaatcacagctgtagcgagggccagattagcatcttccggtacgagaactgccccaaagacaaccccatgtattattgtaacaagaaaacatcttgtagaagctgcgcgctcgatcagaactgccaatgggagcccagaaaccaggagtgtatcgccctgccggaaaacatctgcggaatcggatggcacctagtcggcaattcatgcctcaagataactaccgccaaggagaattacgacaacgccaagttgttttgtcgaaaccacaatgctctgttggccagtctgaccacacagaagaaggtcgagtttgtcctgaagcaactgcggattatgcagtcatcacagagcatgtccaagctgacgctgactccttgggtgggactgaggaagattaatgttagttactggtgttgggaagacatgtctccctttaccaatagcctcctccagtggatgccatccgaaccctcagacgcaggattctgcgggatactttccgaaccctccacaaggggcttaaaagctgcaacatgcatcaacccgttaaatgggtccgtatgcgaaaggccagccaaccactctgctaagcagtgtaggaccccctgtgctttacgaacagcctgcggcgactgcacgtccgggtctagtgagtgcatgtggtgctccaacatgaagcagtgcgtggatagcaatgcgtacgtcgcgtccttcccattcgggcagtgtatggagtggtacacaatgagcacatgtcctccggagaactgctccggatactgtacgtgcagccactgcctcgaacagcctggatgtgggtggtgcaccgaccctagcaacactgggaagggcaagtgcatcgaaggaagctataagggcccagtgaaaatgccctctcaggcccccacaggaaacttctacccacagccccttctcaacagttcaatgtgccttgaagactcccggtacaactggagtttcatccactgcccagcctgccagtgcaatggccattctaagtgcatcaaccagtccatatgtgagaagtgtgagaatctgacaaccggaaagcactgcgaaacctgcatctcgggattttacggcgaccccactaatggagggaagtgccagccgtgtaagtgcaacggtcacgcctccttgtgcaatactaatacgggcaagtgtttctgtacaaccaagggggtcaaaggagacgagtgtcagttgtgtgaggttgaaaataggtaccagggcaaccctctcagggggacatgttactacacactacttatcgactatcagtttactttctcattatcgcaggaggatgatcgatactacactgcaattaacttcgtagccactccagacgagcagaacagagatctagatatgttcatcaacgcatctaaaaatttcaatttgaatatcacgtgggctgccagcttctcggccggaacccaagctggagaggaaatgccggtagtgtcaaaaactaatattaaagaatataaggatagtttctccaatgaaaagttcgacttcagaaaccatccaaatatcacattcttcgtctacgtgagtaattttacttggccaataaaaatccagatagctttcagccagcactctaactttatggatctcgtccagtttttcgttacctttttcagctgcttcttatctttgctacttgtggccgcagtggtgtggaagataaaacagagttgttgggcatctcggagaagagaacagttactgagggagatgcaacagatggcatcccggcctttcgcaagcgtaaatgtggccctggaaacagacgaggagccacctgatctgattggaggatctattaagacggtgccaaaaccaattgctcttgaaccttgttttggcaacaaggctgccgtgctttcagtttttgtgcgcctcccgagaggcctgggcggcatcccgcctccaggccagtccggccttgctgttgccagtgccctggtggatataagtcagcagatgcccatagtttacaaggagaagagtggagctgtgcgaaatcgcaagcagcagccgccggcccagccgggcacgtgcatctag

SEQ ID NO: 238701 - DNA, 4290 bp, Artificial Sequence
  derived and/or modified sequence
atggtggctgccgctgctgcaactgaagcacggctcagaaggagaacagctgcgactgctgccctggctgggcgatctggagggcctcactgggattgggatgtcacacgggctgggaggccaggattaggggctggcctgaggcttcccaggttactctcccctccattgcgacctaggcttctgcttcttctcttgctgctgagtcctccattgctcctgctgcttttgccatgcgaggcagaagccgcagctgctgccgctgctgtcagtggctcagctgcggcagaagcaaaggagtgcgaccggccttgcgttaacggcggacggtgcaatccgggaaccgggcagtgtgtttgcccagcagggtgggtgggagagcagtgtcagcactgtggcggacggtttcggctgactgggtccagcggcttcgtcacagatggtcccggtaattacaagtacaagacgaaatgtacatggctcatcgaaggacagcccaaccggatcatgcgactacgctttaaccacttcgccactgaatgttcctgggaccatttgtatgtgtacgacggcgactcaatctacgctccactggtagcagcattcagcggtcttatcgttccagagagagatggaaatgagactgtgccggaagtggtggccacgtctgggtacgcattgctgcacttcttcagcgacgcagcatataacttgaccggattcaacatcacttactcattcgacatgtgcccaaataattgttccggtcgaggcgagtgtaaaattagcaactcctccgacacagtagaatgtgagtgctccgagaattggaagggggaagcttgtgatatcccccactgtactgataactgtggattcccccaccgcggtatctgcaatagttctgacgttagaggttgtagttgcttcagtgactggcaagggcctggttgttcagttcccgtgcccgctaatcagtcattttggactcgcgaagagtactctaatctgaaactgccacgcgcatctcataaagcagtggtgaatggaaatatcatgtgggtggtaggtggttatatgttcaaccatagcgattataacatggtactggcctatgaccttgcgtcccgggagtggctgcctctgaaccgctcagtgaacaacgtggttgtgcggtacggtcattctctcgcactgtacaaagacaaaatttacatgtatggcggtaaaatcgactccacagggaatgttacaaatgaactgcgagtcttccacattcacaacgaatcctgggtgttgttaaccccaaaggccaaggaacagtacgccgtcgtcggccattccgcccacattgtgactttaaaaaatggaagagtcgtgatgttagttatatttggacactgccccctgtacggctacatctctaacgtccaggagtacgatctcgataaaaatacatggagcattctgcacacacagggtgcgctagtgcagggagggtatgggcatagtagcgtgtatgaccatcggacccgagccctctacgtgcacgggggatataaagcttttagcgcaaacaagtatcgcttggctgacgacctctaccgctacgacgttgacacccaaatgtggactatcctcaaagattcccgctttttccgttatctgcacactgctgttatcgtttcaggaacgatgctcgtgtttggcggtaatacccataacgatacctctatgtctcacggcgcaaagtgcttttcctcagattttatggcatacgatatcgcttgcgatcgatggtccgtgctacctcgacctgatctgcaccacgacgtgaatagatttggtcactccgccgtgctacacaactctacaatgtacgtcttcggcggatttaattctctgctcctctcagacatcctcgtatttacttccgaacaatgcgatgcccaccgcagcgaagcggcatgcttggccgctgggccaggcattagatgtgtgtggaacacaggctcctcacagtgtattagctgggcgcttgccaccgatgaacaagaagaaaaattgaaatctgaatgtttcagcaagcgcaccttagaccacgatcggtgcgatcagcacactgactgttatagttgtacggccaacacaaatgattgccactggtgcaatgaccactgtgtgccacgaaaccatagttgtagtgaggggcaaatttcaattttcagatacgaaaattgtccaaaagataatcccatgtattactgtaacaaaaaaacttcctgtaggagctgtgccctcgaccagaattgtcaatgggaaccacgtaaccaggagtgcatcgccctcccagaaaacatatgtgggattgggtggcacctggtcggcaacagctgcctcaagattaccaccgccaaggaaaactatgacaatgccaagttattttgtcgaaaccataacgcactcctcgccagtcttacaacccagaaaaaagttgagtttgtgctaaagcagttaaggataatgcaatcgtctcagtcaatgtctaagctgaccctcactccttgggtgggtctccggaagatcaacgtctcatactggtgttgggaggatatgtccccttttactaattctttgctgcaatggatgcctagtgagccttctgatgctggcttctgtggcattctcagtgagccgagtacaagaggtcttaaagccgcaacatgtatcaacccgctgaacggttctgtgtgtgagcgcccagcgaaccattctgccaagcagtgtcgtacaccttgcgccttgcggaccgcttgcggagactgtacgtccggatcttctgaatgtatgtggtgcagcaatatgaagcaatgtgttgatagcaatgcttacgtagctagctttcccttcgggcaatgcatggagtggtataccatgagcacctgtccccctgaaaactgtagtggttactgcacatgctcccattgtctagagcagcctggttgcggctggtgtactgatccaagcaatactggcaaaggcaaatgtattgaaggcagctacaaggggccagtgaagatgccgtctcaagctccaacggggaacttctatccccagccactgctgaattcgtctatgtgtcttgaggattctagatataattggagtttcattcactgcccagcctgccagtgcaatggacattccaagtgtatcaatcagtcaatttgcgagaagtgtgagaacctgacaacgggcaagcattgtgaaacctgcatctctggattctacggcgacccgactaacggtgggaagtgccaaccctgcaagtgtaacggccatgcctcactctgcaacaccaataccgggaaatgcttttgtacgactaagggggtcaaaggagacgaatgccagctctgcgaggtagagaataggtatcagggaaatcctctgagaggaacctgctactatacactgctgatcgactatcagttcaccttctcgttatcgcaggaagatgacagatactacaccgccattaacttcgtcgctacccctgatgagcagaatagggatctggatatgtttatcaacgcgagtaagaactttaacctgaatataacatgggcagctagcttctcagccggtactcaggcgggtgaggagatgccagtggtgagcaaaaccaacatcaaggagtataaggactccttttccaatgaaaaattcgactttaggaatcacccaaacattacctttttcgtgtacgtttctaactttacttggccgattaaaatccagattgcattctctcagcattccaatttcatggaccttgtgcaatttttcgtgacattcttctcctgcttcttgtccttactgttggtggctgccgttgtttggaagataaaacaaagctgctgggcaagtaggcgccgtgaacagctgctgcgagagatgcagcagatggcctctaggccattcgcctccgttaacgtggctcttgaaactgacgaagagcccccagacttgattgggggtagcatcaaaacggttccaaagcctattgctctggaaccatgtttcggcaataaagcggctgtgttgagcgtatttgtgcggctcccaaggggtcttgggggtatccctcccccaggccagtccggcctcgctgttgcatcggctttagtggacatctcccagcagatgccaatagtgtataaggaaaagagtggcgcagtgcgtaaccgcaagcagcagccacccgcacagcccggaacttgcatttag

SEQ ID NO: 238702 - protein, 1272 aa, Artificial Sequence
  derived and/or modified sequence
MVAAAAATEARLRRRTAATAALAGRSGGPHWDWDVTRAGRPGLGAGLRLPRLLSPPLRPRLLLLLLLLSPPLLLLLLPCEAEAAAAAAAVSGSAAAEAKECDRPCVNGGRCNPGTGQCVCPAGWVGEQCQHCGGRFRLTGSSGFVTDGPGNYKYKTKCTWLIEGQPNRIMRLRFNHFATECSWDHLYVYDGDSIYAPLVAAFSGLIVPERDGNETVPEVVATSGYALLHFFSDAAYNLTGFNITYSFDMCPNNCSGRGECKISNSSDTVECECSENWKGEACDIPHCTDNCGFPHRGICNSSDVRGCSCFSDWQGPGCSVPVPANQSFWTREEYSNLKLPRASHKAVVNGNIMWVVGGYMFNHSDYNMVLAYDLASREWLPLNRSVNNVVVRYGHSLALYKDKIYMYGGKIDSTGNVTNELRVFHIHNESWVLLTPKAKEQYAVVGHSAHIVTLKNGRVVMLVIFGHCPLYGYISNVQEYDLDKNTWSILHTQGALVQGGYGHSSVYDHRTRALYVHGGYKAFSANKYRLADDLYRYDVDTQMWTILKDSRFFRYLHTAVIVSGTMLVFGGNTHNDTSMSHGAKCFSSDFMAYDIACDRWSVLPRPDLHHDVNRFGHSAVLHNSTMYVFGGFNSLLLSDILVFTSEQCDAHRSEAACLAAGPGIRCVWNTGSSQCISWALATDEQEEKLKSECFSKRTLDHDRCDQHTDCYSCTANTNDCHWCNDHCVPRNHSCSEGQISIFRYENCPKDNPMYYCNKKTSCRSCALDQNCQWEPRNQECIALPENICGIGWHLVGNSCLKITTAKENYDNAKLFCRNHNALLASLTTQKKVEFVLKQLRIMQSSQSMSKLTLTPWVGLRKINVSYWCWEDMSPFTNSLLQWMPSEPSDAGFCGILSEPSTRGLKAATCINPLNGSVCERPANHSAKQCRTPCALRTACGDCTSGSSECMWCSNMKQCVDSNAYVASFPFGQCMEWYTMSTCPPENCSGYCTCSHCLEQPGCGWCTDPSNTGKGKCIEGSYKGPVKMPSQAPTGNFYPQPLLNSSMCLEDSRYNWSFIHCPACQCNGHSKCINQSICEKCENLTTGKHCETCISGFYGDPTNGGKCQPCKCNGHASLCNTNTGKCFCTTKGVKGDECQLCEVENRYQGNPLRGTCYYTLLIDYQFTFSLSQEDDRYYTAINFVATPDEQNRDLDMFINASKNFNLNITWAASFSAGTQAGEEMPVVSKTNIKEYKDSFSNEKFDFRNHPNITFFVYVSNFTWPIKIQVQTEQ

SEQ ID NO: 238703 - DNA, 3819 bp, Artificial Sequence
  derived and/or modified sequence
atggtggccgccgccgccgccaccgaggccagactgagaagaagaaccgccgccaccgccgccctggccggcagaagcggcggcccccactgggactgggacgtgaccagagccggcagacccggcctgggcgccggcctgagactgcccagactgctgagcccccccctgagacccagactgctgctgctgctgctgctgctgagcccccccctgctgctgctgctgctgccctgcgaggccgaggccgccgccgccgccgccgccgtgagcggcagcgccgccgccgaggccaaggagtgcgacagaccctgcgtgaacggcggcagatgcaaccccggcaccggccagtgcgtgtgccccgccggctgggtgggcgagcagtgccagcactgcggcggcagattcagactgaccggcagcagcggcttcgtgaccgacggccccggcaactacaagtacaagaccaagtgcacctggctgatcgagggccagcccaacagaatcatgagactgagattcaaccacttcgccaccgagtgcagctgggaccacctgtacgtgtacgacggcgacagcatctacgcccccctggtggccgccttcagcggcctgatcgtgcccgagagagacggcaacgagaccgtgcccgaggtggtggccaccagcggctacgccctgctgcacttcttcagcgacgccgcctacaacctgaccggcttcaacatcacctacagcttcgacatgtgccccaacaactgcagcggcagaggcgagtgcaagatcagcaacagcagcgacaccgtggagtgcgagtgcagcgagaactggaagggcgaggcctgcgacatcccccactgcaccgacaactgcggcttcccccacagaggcatctgcaacagcagcgacgtgagaggctgcagctgcttcagcgactggcagggccccggctgcagcgtgcccgtgcccgccaaccagagcttctggaccagagaggagtacagcaacctgaagctgcccagagccagccacaaggccgtggtgaacggcaacatcatgtgggtggtgggcggctacatgttcaaccacagcgactacaacatggtgctggcctacgacctggccagcagagagtggctgcccctgaacagaagcgtgaacaacgtggtggtgagatacggccacagcctggccctgtacaaggacaagatctacatgtacggcggcaagatcgacagcaccggcaacgtgaccaacgagctgagagtgttccacatccacaacgagagctgggtgctgctgacccccaaggccaaggagcagtacgccgtggtgggccacagcgcccacatcgtgaccctgaagaacggcagagtggtgatgctggtgatcttcggccactgccccctgtacggctacatcagcaacgtgcaggagtacgacctggacaagaacacctggagcatcctgcacacccagggcgccctggtgcagggcggctacggccacagcagcgtgtacgaccacagaaccagagccctgtacgtgcacggcggctacaaggccttcagcgccaacaagtacagactggccgacgacctgtacagatacgacgtggacacccagatgtggaccatcctgaaggacagcagattcttcagatacctgcacaccgccgtgatcgtgagcggcaccatgctggtgttcggcggcaacacccacaacgacaccagcatgagccacggcgccaagtgcttcagcagcgacttcatggcctacgacatcgcctgcgacagatggagcgtgctgcccagacccgacctgcaccacgacgtgaacagattcggccacagcgccgtgctgcacaacagcaccatgtacgtgttcggcggcttcaacagcctgctgctgagcgacatcctggtgttcaccagcgagcagtgcgacgcccacagaagcgaggccgcctgcctggccgccggccccggcatcagatgcgtgtggaacaccggcagcagccagtgcatcagctgggccctggccaccgacgagcaggaggagaagctgaagagcgagtgcttcagcaagagaaccctggaccacgacagatgcgaccagcacaccgactgctacagctgcaccgccaacaccaacgactgccactggtgcaacgaccactgcgtgcccagaaaccacagctgcagcgagggccagatcagcatcttcagatacgagaactgccccaaggacaaccccatgtactactgcaacaagaagaccagctgcagaagctgcgccctggaccagaactgccagtgggagcccagaaaccaggagtgcatcgccctgcccgagaacatctgcggcatcggctggcacctggtgggcaacagctgcctgaagatcaccaccgccaaggagaactacgacaacgccaagctgttctgcagaaaccacaacgccctgctggccagcctgaccacccagaagaaggtggagttcgtgctgaagcagctgagaatcatgcagagcagccagagcatgagcaagctgaccctgaccccctgggtgggcctgagaaagatcaacgtgagctactggtgctgggaggacatgagccccttcaccaacagcctgctgcagtggatgcccagcgagcccagcgacgccggcttctgcggcatcctgagcgagcccagcaccagaggcctgaaggccgccacctgcatcaaccccctgaacggcagcgtgtgcgagagacccgccaaccacagcgccaagcagtgcagaaccccctgcgccctgagaaccgcctgcggcgactgcaccagcggcagcagcgagtgcatgtggtgcagcaacatgaagcagtgcgtggacagcaacgcctacgtggccagcttccccttcggccagtgcatggagtggtacaccatgagcacctgcccccccgagaactgcagcggctactgcacctgcagccactgcctggagcagcccggctgcggctggtgcaccgaccccagcaacaccggcaagggcaagtgcatcgagggcagctacaagggccccgtgaagatgcccagccaggcccccaccggcaacttctacccccagcccctgctgaacagcagcatgtgcctggaggacagcagatacaactggagcttcatccactgccccgcctgccagtgcaacggccacagcaagtgcatcaaccagagcatctgcgagaagtgcgagaacctgaccaccggcaagcactgcgagacctgcatcagcggcttctacggcgaccccaccaacggcggcaagtgccagccctgcaagtgcaacggccacgccagcctgtgcaacaccaacaccggcaagtgcttctgcaccaccaagggcgtgaagggcgacgagtgccagctgtgcgaggtggagaacagataccagggcaaccccctgagaggcacctgctactacaccctgctgatcgactaccagttcaccttcagcctgagccaggaggacgacagatactacaccgccatcaacttcgtggccacccccgacgagcagaacagagacctggacatgttcatcaacgccagcaagaacttcaacctgaacatcacctgggccgccagcttcagcgccggcacccaggccggcgaggagatgcccgtggtgagcaagaccaacatcaaggagtacaaggacagcttcagcaacgagaagttcgacttcagaaaccaccccaacatcaccttcttcgtgtacgtgagcaacttcacctggcccatcaagatccaggtgcagaccgagcagtag

SEQ ID NO: 238704 - DNA, 3921 bp, Artificial Sequence
  derived and/or modified sequence
atggtggctgcagcggcggcaactgaggcaaggctgaggaggaggacggcggcgacggcagcgctcgcgggcaggagcggcgggccgcactgggactgggacgtgaccagggctgggaggccggggctgggggccgggctgcgcctcccgcggctgctgtctccaccgctgcggccacggctgctgctgctgctgttgttgctctcgccgccgctgctgctgctgctgctgccctgtgaggccgaggccgcggcggcggcggcggcggtgtcgggctcagccgcagccgaggccaaggaatgtgaccggccctgtgtcaacggcggtcgctgcaaccctggcaccggccagtgcgtctgccccgccggctgggtgggcgagcaatgccagcactgcgggggccgcttcagactaactggatcttctgggtttgtgacagatggacctggaaattataaatacaaaacgaagtgcacgtggctcattgaaggacagccaaatagaataatgagacttcgtttcaatcattttgctacagagtgtagttgggaccatttatatgtttatgatggggactcaatttatgcaccgctagttgctgcatttagtggcctcattgttcctgagagagatggcaatgagactgtccctgaggttgttgccacatcaggttatgccttgctgcatttttttagtgatgctgcttataatttgactggatttaatattacttacagttttgatatgtgtccaaataactgctcaggccgaggagagtgtaagatcagtaatagcagcgatactgttgaatgtgaatgttctgaaaactggaaaggtgaagcatgtgacattcctcactgtacagacaactgtggttttcctcatcgaggcatctgcaattcaagtgatgtcagaggatgctcctgcttctcagactggcagggtcctggatgttcagttcctgtaccagctaaccagtcattttggactcgagaggaatattctaacttaaagctccccagagcatctcataaagctgtggtcaatggaaacattatgtgggttgttggaggatatatgttcaaccactcagattataacatggttctagcgtatgaccttgcttctagggagtggcttccactaaaccgttctgtgaacaatgtggttgttagatatggtcattctttggcattatacaaggataaaatttacatgtatggaggaaaaattgattcaactgggaatgtgaccaatgagttgagagtttttcacattcataatgagtcatgggtgttgttgacccctaaggcaaaggagcagtatgcagtggttgggcactctgcacacattgttacactgaagaatggccgagtggtcatgctggtcatctttggtcactgccctctctatggatatataagcaatgtgcaggaatatgatttggataagaacacatggagtatattacacacccagggtgcccttgtgcaagggggttacggccatagcagtgtttacgaccataggaccagggccctatacgttcatggtggctacaaggctttcagtgccaataagtaccggcttgcagatgatctctaccgatatgatgtggatacccagatgtggaccattcttaaggacagccgatttttccgttacttgcacacagctgtgatagtgagtggaaccatgctggtgtttggaggaaacacacacaatgacacatctatgagccatggcgccaaatgcttctcttcagatttcatggcctatgacattgcctgtgaccgctggtcagtgcttcccagacctgatctccaccatgatgtcaacagatttggccattcagcagtcttacacaacagcaccatgtatgtgttcggtggtttcaatagtctcctcctcagcgacatcctggtattcacctcggaacagtgtgatgcgcatcggagtgaagccgcttgtttagcagcaggacctggtattcggtgtgtgtggaacacagggtcgtctcagtgtatctcgtgggcgctggcaactgatgaacaagaagaaaagttaaaatcagaatgtttttccaaaagaactcttgaccatgacagatgtgaccagcacacagattgttacagctgcacagccaacaccaatgactgccactggtgcaatgaccattgtgtccccaggaaccacagctgctcagaaggccagatctccatttttaggtatgagaattgccccaaggataaccccatgtactactgtaacaagaagaccagctgcaggagctgtgccctggaccagaactgccagtgggagccccggaatcaggagtgcattgccctgcccgaaaatatctgtggcattggctggcatttggttggaaactcatgtttgaaaattactactgccaaggagaattatgacaatgctaaattgttctgtaggaaccacaatgcccttttggcttctcttacaacccagaagaaggtagaatttgtccttaagcagctgcgaataatgcagtcatctcagagcatgtccaagctcaccttaaccccatgggtcggccttcggaagatcaatgtgtcctactggtgctgggaagatatgtccccatttacaaatagtttactacagtggatgccgtctgagcccagtgatgctggattctgtggaattttatcagaacccagtactcggggactgaaggctgcaacctgcatcaacccactcaatggtagtgtctgtgaaaggcctgcaaaccacagtgctaagcagtgccggacaccatgtgccttgaggacagcatgtggagattgcaccagcggcagctctgagtgcatgtggtgcagcaacatgaagcagtgtgtggactccaatgcctacgtggcctccttcccttttggccagtgtatggaatggtatacgatgagcacctgcccccctgaaaattgttcaggctactgtacctgtagtcattgcttggagcaaccaggctgtggctggtgtactgatcccagcaatactggcaaagggaaatgcatagagggttcctataaaggaccagtgaagatgccttcgcaagcccctacaggaaatttctatccacagcccctgctcaattccagcatgtgtctagaggacagcagatacaactggtctttcattcactgtccagcttgccaatgcaacggccacagtaaatgcatcaatcagagcatctgtgagaagtgtgagaacctgaccacaggcaagcactgcgagacctgcatatctggcttctacggtgatcccaccaatggagggaaatgtcagccatgcaagtgcaatgggcacgcgtctctgtgcaacaccaacacgggcaagtgcttctgcaccaccaagggcgtcaagggggacgagtgccagctatgtgaggtagaaaatcgataccaaggaaaccctctcagaggaacatgttattatactcttcttattgactatcagttcacctttagtctatcccaggaagatgatcgctattacacagctatcaattttgtggctactcctgacgaacaaaacagggatttggacatgttcatcaatgcctccaagaatttcaacctcaacatcacctgggctgccagtttctcagctggaacccaggctggagaagagatgcctgttgtttcaaaaaccaacattaaggagtacaaagatagtttctctaatgagaagtttgattttcgcaaccacccaaatatcactttctttgtttatgtcagtaatttcacctggcccatcaaaattcaggtgcaaactgaacaatgaggacgcatggacacaggaaggggaacatcacacaccagggcctgttgtggggtggggggaaggggaagggatagcattaggggatatacctaatgttaaatg

SEQ ID NO: 238705 - DNA, 3819 bp, Artificial Sequence
  derived and/or modified sequence
atggtggcagctgccgcagccacggaggccaggttgaggagacggacagcagccaccgccgctctggcgggtcggtctggcggtccacactgggattgggacgtgacccgtgctggaagacccgggctgggcgcaggcttgcgactgccgagattgctgagcccccctctgcggccccggctgctgctgctgctgttactcctgtcgccccctcttttgctcttactgctgccatgtgaggccgaggcagcggcagccgccgccgctgtgagcgggtccgcggccgcggaggcgaaggagtgcgacaggccctgcgtcaatggggggagatgcaaccccgggaccggccaatgcgtctgccctgctggctgggtcggggagcaatgtcagcactgcggcgggaggtttcggctcaccggcagcagcgggttcgtcactgacgggcccggtaattacaagtacaaaactaagtgcacctggttgatcgagggtcaaccaaatagaataatgcggttgaggtttaaccacttcgctacagaatgtagttgggaccatctttacgtatatgatggagattccatatacgcgccgctagtggccgcgttctctggccttatcgtccctgaacgagatggcaacgagacggtgccggaagtggttgccaccagtggatacgccctgctgcacttcttctctgatgctgcgtataatttgactggcttcaacatcacatactccttcgatatgtgtcccaataactgttcaggcagaggagagtgcaagatcagcaattcttcggatacagtggaatgcgagtgtagtgaaaactggaaaggcgaggcttgcgatattccgcactgtactgacaactgcggatttcctcatcggggcatctgtaattcctctgacgttcgaggttgttcctgcttttccgactggcaaggcccaggatgttccgtccccgtaccagcaaaccagtctttttggacaagagaggaatatagcaatctgaagttgcccagagcaagccacaaggcagttgtgaatggcaatatcatgtgggttgtgggcgggtacatgtttaaccacagtgactacaacatggtgcttgcttacgaccttgcctctcgggagtggctccccctgaatcgttctgtcaacaatgtggtggtgcgttatggccattccctcgctctctacaaagataaaatatatatgtatgggggcaagattgactctactggcaatgtgactaacgaattgcgagtgttccacatccacaatgagagttgggttcttctaaccccgaaagccaaggaacagtacgccgttgtcgggcatagcgctcacatcgtcactctgaaaaacggcagagtggttatgttggttatctttggccactgtcctctgtacggatacatttccaatgtgcaggaatatgacctggacaagaatacatggtccattctgcacacacagggcgcccttgttcagggaggctacggacacagctccgtctacgatcaccgcacccgcgcactctacgtgcacggagggtataaagcattttccgcgaataaataccgactggcggacgatctgtacagatatgacgtggacacgcagatgtggacaattctgaaggactctcgtttctttagatatctgcatacagcagtgatcgtgagcggaacaatgctggtgttcggagggaacacacataacgatacctctatgtctcatggagctaaatgcttttccagtgacttcatggcatatgatattgcctgcgatagatggtctgtcttgccaaggcctgacctgcaccacgacgtcaacaggttcggtcacagtgcagttctgcataacagcactatgtacgtatttgggggcttcaattccttgctcctgagtgatattctggtatttacttccgaacaatgcgatgcacaccgcagcgaagcagcttgcttagccgcaggccctggcatccgatgcgtctggaacacaggaagctcccaatgcatctcctgggcccttgccactgatgagcaggaagagaagttaaaatcggagtgcttctccaaaagaacactggaccacgatcgctgcgaccagcacaccgactgttatagctgcaccgcaaacactaatgactgtcactggtgcaatgatcactgcgtgccccggaaccactcctgcagtgaaggccagatttcaattttccggtacgagaactgtcccaaagataaccccatgtattattgcaataaaaaaacttcctgtcgaagttgtgccctcgatcagaactgccagtgggaaccgcggaatcaggagtgtattgctttaccggaaaacatttgcggcatcgggtggcacctggttggtaattcctgcctcaaaataaccacagcgaaggaaaattatgacaacgctaagttattctgccgtaaccacaacgcgctgttggctagcttgaccactcagaaaaaagttgagtttgtgctgaaacagttacgcataatgcagagtagtcagagcatgagtaaactgacattgactccatgggtaggactgcggaagataaatgtctcgtattggtgctgggaagacatgtccccatttactaatagtcttctgcagtggatgccctctgagccctctgatgcaggcttctgcgggattttgtccgagccaagtactcgggggttaaaggcagcaacatgtattaaccccctgaatggctcggtctgtgagagacccgcaaaccattccgccaaacagtgtcgcaccccatgcgccctgagaaccgcctgtggggactgcacatctggatcttcggagtgtatgtggtgtagtaacatgaaacaatgcgtggattccaatgcttatgtcgcatcctttccctttggacagtgcatggaatggtacactatgagcacttgtccaccagaaaattgctccggatattgcacatgttcacactgcctggagcagcccggctgcggctggtgcacagacccctccaacactggcaagggaaaatgtatcgaaggatcttacaaagggccagtgaagatgcctagtcaggcccccacgggcaacttctatcctcaaccactgctcaactctagcatgtgcctggaagatagcaggtacaattggagctttatccactgccccgcatgtcaatgtaatggtcactctaagtgcatcaaccagtccatctgcgagaaatgtgagaatctgactaccggaaagcactgtgagacttgcatatccggattctatggtgatcccaccaacggaggcaagtgccagccttgtaagtgcaatggacacgcgtccctgtgtaacacaaataccggcaagtgcttctgtacgactaaaggtgtgaaaggggacgagtgtcagctgtgcgaagttgagaacagataccagggcaaccccctccgaggcacctgttattatactctgcttattgactatcagtttacattttcactgagccaggaggatgacagatactacactgcaatcaactttgtggctacacccgatgagcagaatagggacttggatatgtttatcaacgcttcaaagaatttcaatctgaacatcacctgggccgccagtttctcagccggcacccaagcaggtgaagagatgccagtagtgagcaagactaacatcaaagagtacaaggattccttctcaaacgagaaattcgattttaggaatcatccgaatatcaccttctttgtctatgtcagcaattttacatggcccattaagatccaggttcagacggaacaatag

SEQ ID NO: 238706 - DNA, 3819 bp, Artificial Sequence
  derived and/or modified sequence
atggtggccgctgctgctgccacagaggcccggctgcggcggaggacagctgccacagctgccctggccggccgcagcggcggcccccactgggactgggatgtgacccgggccggccggcccggcctgggcgccggcctgcggctgccccggctgctgagcccccccctgcggccccggctgctgctgctgctgctgctgctgagcccccccctgctgctgctgctgctgccctgtgaggccgaggccgctgctgctgctgctgctgtgtctggcagcgctgctgctgaggccaaggaatgtgaccggccctgtgtgaatggaggccgctgcaaccctggcaccggccagtgtgtgtgcccagctggctgggtgggggagcagtgccagcactgcggcggccgcttccggctgaccggcagcagcggctttgtgacagatggccctggcaactacaagtacaagaccaagtgcacctggctgattgagggccagcccaaccgcatcatgaggctgcgcttcaaccactttgccacagagtgctcctgggaccacctgtatgtgtatgatggagacagcatctatgcccccctggtggccgccttcagcggcctcatcgtgcctgagagagatggaaatgaaacagtgcctgaggtggtggccaccagcggctacgccctgctgcacttcttcagtgatgctgcctacaacctgaccggcttcaacatcacctacagctttgacatgtgccccaacaactgcagcggcagaggagagtgcaagatcagcaacagcagtgacacagtggagtgtgagtgcagcgagaactggaagggggaggcctgtgacatcccccactgcacagacaactgtggcttcccccaccggggcatctgcaacagcagtgatgtgcggggctgcagctgcttcagtgactggcagggccctggctgcagcgtgcctgtgcctgccaaccagagcttctggacccgggaggagtacagcaacctgaagctgccccgggccagccacaaggctgtggtgaatggaaacatcatgtgggtggtgggcggctacatgttcaaccacagcgactacaacatggtgctggcctatgacctggccagccgggagtggctgcccctgaacagatctgtgaacaacgtggtggtgcgctatggccacagcctggccctgtacaaggacaagatctacatgtatggaggcaagattgacagcactggaaatgtgaccaatgagctgcgggtcttccacatccacaatgaatcctgggtgctgctgacccccaaggccaaggagcagtatgctgtggtgggccacagcgcccacatcgtgaccctgaagaatggccgggtggtgatgctggtgatcttcggccactgccccctgtatggctacatcagcaatgtgcaggagtatgacctggacaagaacacctggagcatcctgcacacccagggcgccctggtgcagggcggctacggccacagctctgtgtatgaccacaggacccgggccctgtatgtgcatggaggctacaaggccttcagcgccaacaagtaccgcctggctgatgacctgtaccgctatgatgtggacacccagatgtggaccatcctgaaggacagccgcttcttccgctacctgcacacagctgtgattgtgtctggcaccatgctggtgtttggaggcaacacccacaatgacacctccatgagccatggagccaagtgcttcagcagtgacttcatggcctatgacatcgcctgtgaccgctggagcgtgctgcccaggccagacctgcaccatgatgtgaacagatttggccacagcgctgtgctgcacaacagcaccatgtatgtgtttggaggcttcaacagcctgctgctgagtgacatcctggtgttcaccagcgagcagtgtgatgcccacaggtctgaggccgcctgcctggccgccggccctggcatccgctgtgtgtggaacacaggcagcagccagtgcatctcctgggccctggccacagatgagcaggaggagaagctgaagtctgagtgcttcagcaagaggaccctggaccatgacagatgtgaccagcacacagactgctacagctgcacagccaacaccaatgactgccactggtgcaatgaccactgtgtgcccaggaaccacagctgcagcgagggccagatcagcatcttccgctatgagaactgccccaaggacaaccccatgtactactgcaacaagaagaccagctgccgcagctgtgccctggaccagaactgccagtgggagcccaggaaccaggagtgcatcgccctgcctgagaacatctgtggcatcggctggcacctggtgggcaacagctgcctgaagatcaccacagccaaggaaaattatgacaatgccaagctgttctgcaggaaccacaatgccctgctggccagcctgaccacccagaagaaggtggagtttgtgctgaagcagctgcgcatcatgcagagcagccagagcatgagcaagctgaccctgaccccctgggtgggcctgaggaagatcaacgtgtcctactggtgctgggaggacatgagccccttcaccaacagcctgctgcagtggatgcccagcgagcccagtgatgctggcttctgtggcatcctgtctgagcccagcacccggggcctgaaggccgccacctgcatcaaccccctgaatggatctgtgtgtgagaggcctgccaaccacagcgccaagcagtgcaggaccccctgtgccctgaggacagcctgtggggactgcaccagcggcagcagcgagtgcatgtggtgcagcaacatgaagcagtgtgtggacagcaatgcctacgtggccagcttccccttcggccagtgcatggagtggtacaccatgagcacctgccccccagagaactgcagcggctactgcacctgcagccactgcctggagcagcccggctgcggctggtgcacagaccccagcaacacaggaaaaggaaaatgtattgagggcagctacaagggccctgtgaagatgcccagccaggcccccactggaaacttctacccccagcccctgctgaacagctccatgtgcctggaggacagccgctacaactggagcttcatccactgcccagcctgccagtgcaatggccacagcaagtgcatcaaccagagcatctgtgagaagtgtgagaacctgaccaccgggaagcactgtgagacctgcatcagcggcttctatggagaccccaccaacggcggcaagtgccagccctgcaagtgcaatggccacgccagcctgtgcaacaccaacacaggcaagtgcttctgcaccaccaagggcgtgaagggagatgagtgccagctgtgtgaggtggagaaccgctaccagggcaaccccctgcggggcacctgctactacaccctgctgattgactaccagttcaccttcagcctgagccaggaggatgaccgctactacacagccatcaactttgtggccaccccagatgagcagaacagagacctggacatgttcatcaatgccagcaagaacttcaacctgaacatcacctgggccgccagcttctctgctggcacccaggccggggaggagatgcctgtggtgtccaagaccaacatcaaggagtacaaggacagcttcagcaatgagaagtttgacttcaggaaccaccccaacatcaccttctttgtgtatgtgagcaacttcacctggcccatcaagatccaggtgcagacagagcagtag

SEQ ID NO: 238707 - DNA, 3819 bp, Artificial Sequence
  derived and/or modified sequence
atggtggccgccgccgccgccaccgaggcccggctgcggcggcggactgcagctaccgcggccctcgctggccgtagcggagggcctcattgggattgggacgtcactcgggccggacgtcctggactgggagctggccttcgcctcccacgacttctgagtcctcctttaaggccccgactcttattacttttactgctcttgagccctccactgttgttactacttctgccctgcgaagctgaggccgcagcagccgccgcggctgtgagtggctcagcagctgcagaagccaaggagtgcgacagaccatgtgtgaatggcggccggtgcaatcccggaactggtcaatgcgtgtgccctgctgggtgggtgggcgagcaatgtcagcactgcggaggccgatttcgacttactgggtccagcgggtttgtcacagatggcccaggcaattataaatacaagacaaaatgtacatggctgattgaaggacagccaaatcgcattatgaggttgcgctttaatcatttcgccaccgagtgtagctgggaccacctttacgtgtacgatggagattcaatttacgcacccctggtggcagcattttctggacttattgtgccggagcgtgatggcaatgaaacggtgccggaagtggtagcgacctccggctacgcactgctgcactttttctcagacgctgcttacaatttaacaggattcaatattacctactccttcgacatgtgtccaaataattgctctggccgtggggagtgtaagattagcaattcctccgatacggttgagtgcgagtgtagcgagaattggaagggggaggcctgtgacatccctcattgtacagacaactgtggcttcccacatagagggatttgcaacagctcggatgttcgcgggtgctcctgcttcagtgattggcaaggaccaggctgttcagtgcccgtgccagccaatcaaagcttctggactcgcgaggaatactctaacctgaagctgcctcgcgccagtcataaggctgttgtgaatggaaacatcatgtgggtggttggaggttatatgttcaatcatagcgactataacatggtgcttgcctacgatcttgcctcacgggagtggctgcccctgaaccgaagcgttaataacgtagtagtaaggtatggccactctctggccctctataaggataagatttatatgtacggaggcaaaattgattccactggcaatgtcaccaatgaactcagggtgttccatatacacaatgaaagctgggtgcttctcacccctaaagccaaggagcaatatgccgtggtggggcactccgctcacatcgttacactcaagaacggaagggtggtaatgctggtcatctttggccattgtccactctacggttatattagcaatgtgcaagaatacgatctggataagaatacttggtccatcttgcacactcagggcgcacttgtgcaggggggatacggtcatagttcggtgtacgatcatcggacccgggctctgtatgtgcacggcggatacaaagctttctccgcaaacaagtatcggctggctgacgacctctatcggtatgatgttgacacacaaatgtggaccatattaaaggactcccggttcttccggtacctccataccgctgtcatagttagcggcaccatgctggtgtttggggggaacacacacaatgacacctctatgtcccatggggccaaatgcttcagttccgacttcatggcatacgacatcgcttgtgaccggtggagtgtgttaccacgaccagacctgcaccatgacgtcaaccgtttcggacacagcgccgtccttcacaatagcacaatgtatgtattcgggggatttaacagtttgctgctgtctgacattttggtgtttacttcagaacagtgtgatgctcatcgatcggaggctgcctgcttagctgcggggccagggatcaggtgtgtatggaatactggtagctctcagtgcatctcttgggcattagctaccgatgaacaggaggaaaagctgaagagcgagtgttttagtaagcgcacactagatcatgataggtgcgatcaacacaccgactgctactcgtgcacagcaaataccaacgattgccattggtgcaacgaccattgtgtgcctcggaatcattcttgcagtgaggggcagatctctatcttccgttatgaaaactgccccaaggacaaccctatgtactactgcaataaaaaaaccagctgccggtcctgcgccctggaccagaactgccaatgggaaccgcgcaatcaggagtgtattgcgctgcccgagaatatttgtggtataggctggcatttagtggggaacagctgcctgaagatcaccaccgctaaggagaactatgacaacgccaaactgttctgcaggaaccataacgctctgctggcatccctgaccacccaaaagaaggtggagttcgtattgaagcagctccgtatcatgcagagcagccagagcatgtcaaagttaaccttgactccatgggtcggactgcggaagataaacgtgagctactggtgctgggaggacatgtcacccttcacgaactctctacttcagtggatgccctccgagccaagcgacgccggcttttgcgggatcctgagcgaaccaagtaccagagggttgaaggctgctacctgcatcaacccgctgaacggcagtgtgtgtgagcggcctgccaatcattcagctaaacagtgccgcaccccctgtgcgttgagaaccgcctgtggggactgcacctctgggtcgtccgagtgtatgtggtgtagtaacatgaaacaatgcgtagacagcaacgcctatgttgcctcttttccattcggccagtgcatggagtggtataccatgtcaacctgtcctccagagaactgcagcggctactgtacatgttcgcactgtctcgaacagccgggatgcgggtggtgtactgacccctccaacaccggcaaagggaagtgcattgaggggtcctacaaaggccctgtaaagatgcctagccaggccccaacagggaacttttatccacagccactgctgaattcgtctatgtgcctggaagattcacggtataactggtcatttatccactgccctgcctgtcaatgtaatggacacagcaagtgcatcaatcagtctatatgtgaaaagtgcgagaacctgaccactggcaaacactgcgagacatgtataagcggtttttacggagatcctactaacggcgggaagtgccagccatgtaaatgcaatggacacgcaagcctgtgtaataccaacactgggaagtgcttctgcactacaaagggcgtaaagggggacgaatgtcagttgtgtgaggtagaaaaccgatatcaaggcaacccgttgaggggcacttgctattacacccttctaatcgactatcagttcaccttctctctcagtcaggaagacgatcgctattacacagcaattaacttcgtcgccacgccagatgagcagaatagggacctcgatatgttcattaacgccagcaagaacttcaacctcaatatcacttgggccgcctctttttccgctggaacacaggctggagaggagatgcctgtggtgtctaagactaacattaaggagtataaagattccttttctaatgagaagttcgactttcgtaatcaccccaatatcactttttttgtgtacgtgtcaaattttacctggcctattaaaatccaagttcagaccgagcagtag

SEQ ID NO: 238708 - DNA, 3819 bp, Artificial Sequence
  derived and/or modified sequence
atggttgctgcagctgccgcaacagaggctcggctgcggcgacggaccgctgccaccgcagccctcgcgggaaggagcggaggccctcactgggactgggacgtgacccgcgcaggtcgccctggtcttggcgctggcttgcgactgccccgactgctgagtccccctctccggcctcgccttctcctacttcttttactcctcagtcccccactccttctcctcctgctgccatgcgaggcggaagccgctgctgccgctgcggctgtaagtggcagcgcagccgctgaggccaaagaatgtgacagaccctgtgtgaacggtggccgttgcaaccccggaacaggccagtgcgtgtgcccagctggatgggtgggagagcaatgtcaacattgcggcggtcgattccgactcactggcagttccggattcgtaaccgacggtcccggtaattataaatacaaaacaaaatgcacttggttaattgagggtcagccaaaccgtatcatgagattacgctttaaccattttgccaccgagtgtagctgggaccacctgtacgtgtatgatggggattccatctacgctccactggttgccgcattctccggtctcatcgtgcccgaaagggatggtaatgagactgtcccggaagtggttgcaaccagtgggtacgctctgctccactttttctccgacgctgcgtataacctgacaggatttaacatcacatattcatttgacatgtgccccaacaattgctctggtaggggagagtgtaaaatctctaacagctcagataccgtcgagtgcgaatgcagtgagaattggaaaggtgaggcttgcgacattccacactgtacggacaactgcgggtttcctcatcggggaatctgcaattcaagtgacgtgcggggatgctcatgcttcagcgattggcaagggcctggctgctctgtacccgtccccgctaatcagtctttttggacccgagaagaatatagcaacttgaagctgcctagagcctctcacaaggcagttgtcaacggaaatatcatgtgggtcgtgggtgggtatatgttcaatcactccgactacaacatggtgcttgcttatgatttggcctcccgtgagtggctgcccctgaatagaagtgttaataacgtcgtggtgcgctacggccatagtctagcactgtacaaagataaaatctacatgtacggaggcaagatagacagtactggaaacgtcaccaacgaactgcgcgtcttccacatacacaatgagtcatgggtgctcttgacccctaaggcaaaagagcagtacgcggtcgtaggccactcagctcatattgttaccctaaagaatgggagggtggtgatgcttgtgatctttggccactgtccactgtacgggtatatttccaatgtgcaagagtatgatctggataagaacacatggagcattctgcatacacagggagctttggtgcaaggcggttacggacactctagcgtgtatgaccaccgcacacgcgcactctacgttcacggaggctacaaggccttctctgcaaacaagtaccgacttgcggatgatctctaccggtacgacgtggacacacaaatgtggaccatccttaaggactcgagattcttccgctacctgcatacagcggtcatagtgtcagggacaatgctggtgtttgggggaaacacgcataatgacacctccatgagtcacggggctaagtgcttttcatccgactttatggcctacgatattgcctgtgatcgatggtcagtcctccccagacctgatctgcatcacgacgtgaaccggttcggacactccgctgtgttgcataatagtacaatgtacgtgtttggaggtttcaattccctgcttctcagcgacatcttggtgttcacctccgagcagtgtgacgctcaccggagcgaagctgcatgtcttgccgcaggtccaggtattcgatgtgtttggaacacagggtcctcacagtgcatttcctgggcactcgctaccgacgagcaagaggaaaaactgaaatcagaatgtttcagcaaacgcacattggatcatgacagatgtgaccaacacaccgattgctacagctgcaccgctaataccaacgactgccattggtgcaatgaccattgcgttccacggaaccattcatgcagcgaagggcagatttcaatcttcaggtatgagaattgtccaaaagacaatccaatgtattattgcaacaaaaagacatcctgccgctcttgtgctttggaccaaaactgtcagtgggagccccgtaatcaggaatgcattgctcttcccgagaacatctgtggaattggctggcacctggtggggaacagctgcctgaagatcacgactgcaaaagagaactacgacaacgcaaaactgttctgtaggaatcataatgctctcctcgctagcctaaccacgcagaagaaggtggagtttgtccttaagcagctgcgtattatgcagagtagccagtcaatgtcaaaactgacacttactccatgggtcggattgagaaagatcaatgtgtcttattggtgctgggaggatatgtccccctttacaaatagcctcttacagtggatgccttccgagccctcagacgctggcttttgcggcatattgtctgaaccatctacacgcggactgaaagcagccacttgcattaacccattgaatggcagtgtgtgcgaaaggcccgcaaaccatagcgcaaagcagtgtagaaccccctgcgccctcagaaccgcttgtggtgattgtacttccgggtcttctgaatgcatgtggtgttccaacatgaaacagtgtgtagatagcaacgcttacgtcgcctctttcccttttggtcagtgtatggagtggtacacgatgtctacttgcccaccagagaactgctctgggtattgcacttgttcgcattgtctggagcagccaggttgcggctggtgcaccgacccgtccaacaccgggaagggtaaatgtattgaagggtcttataagggcccagtgaaaatgccttctcaggcaccaactggtaatttttatccccagccattgttgaattccagcatgtgccttgaggactcgagatacaattggtcttttatccattgtcccgcttgccagtgtaacgggcactccaagtgtatcaaccaatcaatttgtgagaaatgcgagaacctaacaaccggcaagcattgtgaaacttgtatatccggcttctacggcgacccgacaaatggcggtaagtgtcagccctgcaaatgcaacgggcacgcctctctgtgtaacaccaatacaggtaagtgcttctgcactaccaagggcgttaagggggatgagtgtcagctgtgtgaggtggagaacaggtaccagggcaaccctctgcgtggaacatgctattacactctgttgatcgattatcagttcaccttttctctctcacaggaggacgataggtactacaccgccatcaactttgtagccacccctgatgaacagaatcgtgatctagacatgtttattaatgcctcaaagaatttcaacctaaacattacttgggccgcttcattctcggccggtacacaggcaggcgaggagatgccagtggtgagtaagacgaatatcaaggagtacaaggattccttcagtaatgagaaattcgactttaggaatcatcccaacatcacattctttgtttatgtcagcaacttcacttggcccattaagatccaggttcagactgagcagtag

SEQ ID NO: 238709 - protein, 246 aa, Artificial Sequence
  derived and/or modified sequence
MTMDKSELVQKAKLAEQAERYDDMAAAMKAVTEQGHELSNEERNLLSVAYKNVVGARRSSWRVISSIEQKTERNEKKQQMGKEYREKIEAELQDICNDVLELLDKYLIPNATQPESKVFYLKMKGDYFRYLSEVASGDNKQTTVSNSQQAYQEAFEISKKEMQPTHPIRLGLALNFSVFYYEILNSPEKACSLAKTAFDEAIAELDTLNEESYKDSTLIMQLLRDNLTLWTSENQGDEGDAGEGEN

SEQ ID NO: 238710 - protein, 100 aa, Artificial Sequence
  derived and/or modified sequence
MTMDKSELVQKAKLAEQAERYDDMAAAMKAVTEQGHELSNEERNLLSVAYKNVVGARRSSWRVISSIEQKTERNEKKQQMGKEYREKIEAELQDICNDVL

SEQ ID NO: 238711 - protein, 74 aa, Artificial Sequence
  derived and/or modified sequence
MTMDKSELVQKAKLAEQAERYDDMAAAMKAVTEQGHELSNEERNLLSVAYKNVVGARRSSWRVISSIEQKTERN

SEQ ID NO: 238712 - DNA, 741 bp, Artificial Sequence
  derived and/or modified sequence
atgaccatggacaagagcgagctggtgcagaaggccaagctggccgagcaggccgagagatacgacgacatggccgccgccatgaaggccgtgaccgagcagggccacgagctgagcaacgaggagagaaacctgctgagcgtggcctacaagaacgtggtgggcgccagaagaagcagctggagagtgatcagcagcatcgagcagaagaccgagagaaacgagaagaagcagcagatgggcaaggagtacagagagaagatcgaggccgagctgcaggacatctgcaacgacgtgctggagctgctggacaagtacctgatccccaacgccacccagcccgagagcaaggtgttctacctgaagatgaagggcgactacttcagatacctgagcgaggtggccagcggcgacaacaagcagaccaccgtgagcaacagccagcaggcctaccaggaggccttcgagatcagcaagaaggagatgcagcccacccaccccatcagactgggcctggccctgaacttcagcgtgttctactacgagatcctgaacagccccgagaaggcctgcagcctggccaagaccgccttcgacgaggccatcgccgagctggacaccctgaacgaggagagctacaaggacagcaccctgatcatgcagctgctgagagacaacctgaccctgtggaccagcgagaaccagggcgacgagggcgacgccggcgagggcgagaactag

SEQ ID NO: 238713 - DNA, 303 bp, Artificial Sequence
  derived and/or modified sequence
atgaccatggacaagagcgagctggtgcagaaggccaagctggccgagcaggccgagagatacgacgacatggccgccgccatgaaggccgtgaccgagcagggccacgagctgagcaacgaggagagaaacctgctgagcgtggcctacaagaacgtggtgggcgccagaagaagcagctggagagtgatcagcagcatcgagcagaagaccgagagaaacgagaagaagcagcagatgggcaaggagtacagagagaagatcgaggccgagctgcaggacatctgcaacgacgtgctgtag

SEQ ID NO: 238714 - DNA, 225 bp, Artificial Sequence
  derived and/or modified sequence
atgaccatggacaagagcgagctggtgcagaaggccaagctggccgagcaggccgagagatacgacgacatggccgccgccatgaaggccgtgaccgagcagggccacgagctgagcaacgaggagagaaacctgctgagcgtggcctacaagaacgtggtgggcgccagaagaagcagctggagagtgatcagcagcatcgagcagaagaccgagagaaactag

SEQ ID NO: 238715 - DNA, 741 bp, Artificial Sequence
  derived and/or modified sequence
atgaccatggacaagagtgaactggttcaaaaggctaagttggctgagcaggccgaaagatacgacgatatggccgctgccatgaaagccgtaaccgagcagggtcacgaacttagcaatgaggagaggaacctgctctcagtggcctacaaaaacgtggttggggcaaggaggagctcatggcgggttatatcaagcattgagcaaaagactgaacggaacgagaaaaagcaacagatgggcaaggaataccgggaaaaaatcgaggccgagttgcaggacatatgtaatgacgtgctagagttgctcgacaagtacttgattcctaacgcaacgcagccagagagcaaggttttctatctaaaaatgaaaggtgattatttccggtatcttagtgaagtggcttcaggcgataataaacaaactacagttagtaattctcagcaggcctaccaggaagccttcgagatttcaaagaaggaaatgcagcccactcacccaattagattaggcttagcactcaacttttctgtcttctattacgagatcctgaactcgcccgagaaagcctgctcattggccaagaccgctttcgatgaagctatcgcggagctggacaccttgaacgaagagagttataaggactctacgcttataatgcagttgctgcgagacaacctgacgctctggacctcagagaatcagggtgacgagggtgacgcgggggagggcgaaaattag

SEQ ID NO: 238716 - DNA, 741 bp, Artificial Sequence
  derived and/or modified sequence
atgacaatggacaaatcagaattggtgcagaaagctaaactagctgaacaggcagaacgctatgacgatatggcagcggccatgaaggctgtcaccgagcagggacacgaattgagtaacgaagagcgaaatcttttgtctgtcgcttacaaaaacgttgtcggagcaaggcggagcagttggagagtcatctcttcgatagaacagaagaccgagaggaacgagaagaaacaacaaatggggaaagaatacagagagaagatcgaagcagagcttcaggatatttgcaacgatgtgctggaactcttggataaatatctgatcccaaacgccacccagcccgagtccaaggttttctatcttaaaatgaagggtgattactttagatatctgtccgaagtggcctcaggggacaacaagcagaccaccgtgtctaatagccagcaagcttatcaggaagcctttgaaatatccaaaaaggaaatgcagcccactcatcccatcagattaggtctggcactcaacttttcagtgttttattatgagattctgaactccccagaaaaggcttgttccttggccaaaaccgcttttgatgaagcgatcgccgagcttgacacactcaatgaggagagctacaaggattctacactcattatgcagctccttcgcgacaatctgaccctctggacctccgagaaccaaggtgatgagggcgacgcgggggaaggggaaaactag

SEQ ID NO: 238717 - DNA, 303 bp, Artificial Sequence
  derived and/or modified sequence
atgacaatggacaagtcagaattagttcagaaggccaagttggctgaacaggccgagcggtatgatgatatggccgctgctatgaaggccgttactgagcaggggcatgagttatctaatgaggaaagaaacttgttgtcagtggcctacaaaaatgtcgtgggtgcccggagatctagctggagggtaatttctagcattgaacagaagacagagcgcaatgaaaagaaacaacaaatgggaaaggaataccgtgaaaagatagaagccgagctgcaagacatttgtaatgacgtgttatag

SEQ ID NO: 238718 - DNA, 225 bp, Artificial Sequence
  derived and/or modified sequence
atgacaatggataaatctgagctggtgcagaaagccaaactcgccgagcaggccgagcgctatgatgacatggcagcagctatgaaagcagtgactgagcagggacacgagctgtcaaatgaagaacgtaatctactttcagttgcatataagaatgttgtgggagctagacggtccagctggagagtgataagctccattgagcagaaaaccgagcggaattag

SEQ ID NO: 238719 - DNA, 741 bp, Artificial Sequence
  derived and/or modified sequence
atgaccatggacaagtctgagctggtgcagaaggccaagctggccgagcaggccgagagatatgatgacatggccgccgccatgaaggctgtgacagagcagggccacgagctgagcaatgaggagaggaacctgctgtctgtggcctacaagaatgtggtgggcgcccggcgcagctcctggagggtcatcagcagcattgagcagaagacagaaagaaatgagaagaagcagcagatgggcaaggagtaccgggagaagattgaggccgagctgcaggacatctgcaatgatgtgctggagctgctggacaagtacctgatccccaatgccacccagcctgagagcaaggtgttctacctgaagatgaagggggactacttccgctacctgtctgaggtggccagcggggacaacaagcagaccaccgtgagcaacagccagcaggcctaccaggaggcctttgagatcagcaagaaggagatgcagcccacccaccccatccggctgggcctggccctgaacttctctgtgttctactatgagatcctgaacagccctgagaaggcctgcagcctggccaagacagcctttgatgaggccatcgccgagctggacaccctgaatgaggagagctacaaggacagcaccctcatcatgcagctgctgcgggacaacctgaccctgtggaccagcgagaaccagggagatgaaggagatgctggggagggagaaaattag

SEQ ID NO: 238720 - DNA, 303 bp, Artificial Sequence
  derived and/or modified sequence
atgaccatggacaagtctgagctggtgcagaaggccaagctggccgagcaggccgagagatatgatgacatggccgccgccatgaaggctgtgacagagcagggccacgagctgagcaatgaggagaggaacctgctgtctgtggcctacaagaatgtggtgggcgcccggcgcagctcctggagggtcatcagcagcattgagcagaagacagaaagaaatgagaagaagcagcagatgggcaaggagtaccgggagaagattgaggccgagctgcaggacatctgcaatgatgtgctgtag

SEQ ID NO: 238721 - DNA, 225 bp, Artificial Sequence
  derived and/or modified sequence
atgaccatggacaagtctgagctggtgcagaaggccaagctggccgagcaggccgagagatatgatgacatggccgccgccatgaaggctgtgacagagcagggccacgagctgagcaatgaggagaggaacctgctgtctgtggcctacaagaatgtggtgggcgcccggcgcagctcctggagggtcatcagcagcattgagcagaagacagaaagaaattag

SEQ ID NO: 238722 - DNA, 741 bp, Artificial Sequence
  derived and/or modified sequence
atgaccatggacaagagcgagctggtgcagaaggccaagctggccgagcaggcagagaggtacgatgacatggccgctgcaatgaaggccgtgaccgaacaggggcatgaactgagcaacgaagagcggaaccttttatctgtggcttataaaaacgtcgtgggcgctcggcgatctagttggcgggtgatttctagcatcgagcaaaagaccgagcgaaacgaaaagaaacaacagatgggcaaggaatatagagaaaagatagaagcagaactgcaggatatctgtaatgacgtgctggagcttctggacaaatacctcatccccaatgccactcagcccgagagcaaggtgttttatctgaagatgaaaggtgattacttcagatatctgtccgaagtggcatccggagacaacaagcagacaactgtgtccaatagccagcaagcgtaccaggaggcatttgaaatttccaagaaggaaatgcaacccacccatcctattcggttaggcctcgccttgaatttttccgtattctactacgagatcctgaattctcccgagaaagcatgtagcctggcaaaaaccgcttttgatgaggccattgctgaattggatacccttaatgaggaatcatataaggactccaccctgatcatgcagttgctgcgggacaacctgaccttgtggacttccgagaaccagggggatgaaggcgacgccggcgagggcgagaattag

SEQ ID NO: 238723 - DNA, 741 bp, Artificial Sequence
  derived and/or modified sequence
atgaccatggacaagagcgagctggtgcagaaggccaagctggccgagcaggcagagagatatgacgacatggcagctgccatgaaggctgtgactgaacaggggcacgaactgtcaaatgaggaacggaatttactgtcagttgcatataaaaacgttgtcggggcaagacgtagcagctggcgtgttatctcctctattgaacagaaaaccgaaagaaacgaaaaaaagcagcaaatgggaaaagaatatcgcgaaaagatcgaagcggaactgcaggacatctgcaacgacgttttggagctgctggacaagtatctgattcccaatgcaactcaaccggaaagcaaggttttttacctgaaaatgaaaggcgattacttccggtacctaagtgaggtggcgagcggggataataaacagacgaccgtgagtaacagccaacaggcgtaccaggaagccttcgagatcagcaagaaggaaatgcagcccactcatccaatacggctgggactcgccctaaatttcagcgtcttctactacgaaatccttaacagccctgagaaggcttgttccctggctaaaaccgctttcgacgaagccattgcagaactggacactctcaatgaggaaagctacaaggactcaaccttgattatgcagcttttgcgcgataacctaaccctgtggacatctgagaatcagggggatgaaggagatgcaggggaaggcgaaaactag

SEQ ID NO: 238724 - DNA, 303 bp, Artificial Sequence
  derived and/or modified sequence
atgaccatggacaagagcgagctggtgcagaaggccaagctggccgagcaagctgaacgctacgacgacatggccgcggccatgaaggctgtaaccgaacaaggccacgaactgtctaacgaggaacgcaatctactgtctgtggcgtataaaaatgttgtgggagcaaggaggtcatcatggcgggttatatcctcgatcgagcagaagactgaaaggaacgaaaaaaaacagcagatgggaaaagagtatcgggagaagatcgaggctgagctccaggacatctgtaacgatgtgctgtag

SEQ ID NO: 238725 - DNA, 225 bp, Artificial Sequence
  derived and/or modified sequence
atgaccatggacaagagcgagctggtgcagaaggccaagctggccgaacaggctgagcgctacgatgatatggctgcggccatgaaagctgtcaccgagcagggccatgaactgagtaacgaggagagaaacttgctaagcgtggcctacaagaatgttgtgggggctagacggtcaagttggcgcgtaattagctctatagagcagaaaacggagcggaactag

SEQ ID NO: 238726 - DNA, 741 bp, Artificial Sequence
  derived and/or modified sequence
atgacaatggacaagtccgagttagttcagaaggcgaaactcgctgaacaggcggaaagatacgatgatatggccgcagcaatgaaggcagtgacggagcagggccatgagctgagtaacgaggagcgtaatcttcttagcgtagcttacaagaatgtggtgggtgcacggcgttctagctggcgggtgatctcatccattgaacagaaaacggaaaggaacgagaagaaacaacagatgggtaaagagtatcgcgaaaagattgaagccgagctgcaggacatttgcaatgatgtgctggaactcttggacaaatatctgattcccaacgctactcaacctgagagcaaggtgttctatcttaagatgaaaggcgactattttagatatctcagcgaggttgcttcaggcgataacaaacagaccaccgtctcgaattcccagcaggcttaccaggaggccttcgaaatctctaaaaaggaaatgcagcctacccaccctattaggctcgggcttgcgctcaatttctccgtgttctattacgaaattttgaacagcccagaaaaggcatgttccctcgccaagacggctttcgatgaggctattgctgaactggatacactgaacgaggaatcttacaaggattctactttaatcatgcagctgctgagagataatttaactctgtggaccagcgaaaatcagggggatgagggagacgccggtgagggcgagaactag

SEQ ID NO: 238727 - DNA, 741 bp, Artificial Sequence
  derived and/or modified sequence
atgactatggacaaatccgaactggtgcagaaagccaagctggccgaacaggcagaacggtacgacgatatggccgctgccatgaaggccgttactgagcagggccacgaactgagcaatgaagaacgtaatctcctctctgtagcctacaagaacgtggtaggggctcgcaggtcttcatggcgggttatcagttcaattgagcagaagaccgagagaaacgaaaagaagcaacagatgggcaaagagtacagagagaaaatcgaggccgagctgcaggacatttgtaatgacgtgctggagctgcttgataagtatttaattcctaatgcaacacagcccgaatcgaaggttttctacttgaagatgaagggagattacttccgatatttgtcagaagtggcatcaggtgataacaaacaaacaactgtgtcaaattcacagcaggcataccaagaggcattcgaaattagtaagaaggagatgcagcctacccaccccattaggctggggcttgccctaaattttagtgtcttttactacgaaatcctcaactctccagagaaagcctgtagtctggccaagactgcctttgatgaagccatcgccgaactggacacactcaacgaggagtcgtataaagatagcacactgatcatgcagctcctgagagataacctgactttatggactagcgagaaccagggtgacgagggagacgccggagagggcgagaattag

SEQ ID NO: 238728 - DNA, 303 bp, Artificial Sequence
  derived and/or modified sequence
atgacgatggacaagagcgaacttgttcagaaggctaagctggccgagcaggccgagcggtatgacgatatggcagcagcaatgaaggccgtgaccgagcaggggcacgaactgagcaatgaggaacgcaatctactgtccgttgcgtataaaaatgtggtcggcgcacggaggtcctcttggcgcgttattagctccatcgagcagaagaccgagagaaatgaaaaaaagcaacagatgggcaaggaataccgggagaaaattgaggccgaactacaagatatctgtaatgatgtgctgtag

SEQ ID NO: 238729 - DNA, 225 bp, Artificial Sequence
  derived and/or modified sequence
atgacgatggacaaatcagagctcgtgcaaaaggctaaactcgccgagcaggctgaacgatatgacgacatggcggctgcaatgaaagcagtcaccgagcaggggcatgaattgtcaaatgaggaaaggaacctgctgagcgtcgcctataagaatgtcgttggagccaggcgatcaagttggagagtgatttctagtatagagcagaagactgaaagaaattag

SEQ ID NO: 238730 - DNA, 3049 bp, Artificial Sequence
  derived and/or modified sequence
aggaccggagcggaagtggcgatcggagcggaagtggagctaccgccaccgccgccgccgattccggagccggggtagtcgccgccgccgccgccgctgcagccactgcaggcaccgctgccgccgcctgagtagtgggcttaggaaggaagaggtcatctcgctcggagcttcgctcggaagggtctttgttccctgcagccctcccacgggaatgacaatggataaaagtgagctggtacagaaagccaaactcgctgagcaggctgagcgatatgatgatatggctgcagccatgaaggcagtcacagaacaggggcatgaactctccaacgaagagagaaatctgctctctgttgcctacaagaatgtggtaggcgcccgccgctcttcctggcgtgtcatctccagcattgagcagaaaacagagaggaatgagaagaagcagcagatgggcaaagagtaccgtgagaagatagaggcagaactgcaggacatctgcaatgatgttctggagctgttggacaaatatcttattcccaatgctacacaaccagaaagtaaggtgttctacttgaaaatgaaaggagattattttaggtatctttctgaagtggcatctggagacaacaaacaaaccactgtgtcgaactcccagcaggcttaccaggaagcatttgaaattagtaagaaagaaatgcagcctacacacccaattcgtcttggtctggcactaaatttctcagtcttttactatgagattctaaactctcctgaaaaggcctgtagcctggcaaaaacggcatttgatgaagcaattgctgaattggatacgctgaatgaagagtcttataaagacagcactctgatcatgcagttacttagggacaatctcactctgtggacatcggaaaaccagggagacgaaggagacgctggggagggagagaactaatgtttctcgtgctttgtgatctgttcagtgtcactctgtaccctcaacatatatcccttgtgcgataaaaaaaaaaaaaaaaaaaaaaagagaatcgtacgtcgactttcgatttttcacagcctcagcctaggaaaaatggttcatgggataaacagctggtatttgtatctaaaactcagattggtcacataaatgccacggcattccgaagttttgattttgattaacattgacaggattactgtgtgtttaattttttaaaaactgaacactgtgattatggggttttgtaatttagcagaactcttactggtagaaaaaatagacctgaattatgtgtaactttttggaaggtttaatctgatatcaaaataatcattgaaatacaattccattgtaaagttgtacagaaagttatagagattatattgtgatgctggaacttggagtgagacacacatcatttggcatttgagttgaatggtaattcacagtaatgctgccgttgttcgggacttaaagacacttgacctgtttgggctgttgccacttaaaagttcatgaccacaaatgtccacagtgtcttcctctgaggaaactcgaatcctgaaatggaaattctttgtggcagataactggcttatgacaccttgaaaagttcaagtgctcatataacacaccacactgaaccccctttcctacagcaatatgttcactatgttaccaatttgcaacttgtgcttcaatagtggaatctactttcattgttaacactgagctaaagaaaaaaagccgtgtgttttatgaatgaccttatctgtttcctggataatacctttaagaataatgtcctgagtcaggcgtggtggtgcgtgcatctagtcccaactatttgggaggctgaggcaggaggatcgcttgagcccaggagtttaaagctgcagtgccctgtggttgcacctgtgaataactgcactccagcctgggcaacatagcgagacctcatctccaaaaaagaaaacaaaaaacaaaaaaaggaatgatgttctgtagagatggcctttcacttgaggagtactcagttttcaggttcttcctagctcggggcttttaaattttgaaatctaaacattctttcccaccatcctttttgactgttgaccttggttttctcttctaagtttctgtccctctgcttccttactttttttcctttttgaattctatctttatctgtcttttgttcactttttaatgctatatatgggcaggggtgagagacattactgagcaccttggtgagcaagcctggctttaaagattggagaagagcttctggcaccagaaccctgtcttcctccagttctcaacacggtgttgctcttcagtcataccggaatctgaatcaaaaaagtatttttaaatatccatgatttctccctgtattgaggctagccctgatcatgctttttgtgcctgtcaccaggtctcccaagtgcactcatccaggtcagtgctcagatgtgtttaaggagaccctatattcagggaagttgcgtgaacactgcagtggggagaattgagaatagtcaggcctatcagtctcacagaatcacccctctacctttgatattccacttagctgtagagtccatctgtttgtccatctgctgaaatgagaaaagaaaaatttatgcactgatttaaaacaaaccaaaaaaaaagaaaaaaacaaaaaaaaaaatccctcctttctagctgaacaaaaatgtgcagttaatacttggcgcttgaaaatgcagtagtgaatgtggaaccaagcctgtctgtatatctggtagctcttttcttgctttgttttttcttaccagtattctgcctaacgtttgcttctgtgatggttatattgcctagcaagcacacccgtggttgtgaaaatagtatagcaaaaaagaaaaatccccggttattgatgtactagatttgtgtatgtcttttaaacagttctagtttcaccttacacagaataatcaggaaaagtgtaaaaattcaaaagtgaaataaaaattttatcagttagttgcctgtgaa

SEQ ID NO: 238731 - DNA, 3109 bp, Artificial Sequence
  derived and/or modified sequence
ggagctaccgccaccgccgccgccgattccggagccggggtagtcgccgccgccgccgccgctgcagccactgcaggcaccgctgccgccgcctgagtagtgggcttaggaaggaagaggtcatctcgctcggagcttcgctcggaagggtctttgttccctgcagccctcccacggcagagtctccagagatttgggccgctacaaaaagtgcattttgcccattcggctgtggatagagaagcaggaagagcactggacttggagtcagggaatgacaatggataaaagtgagctggtacagaaagccaaactcgctgagcaggctgagcgatatgatgatatggctgcagccatgaaggcagtcacagaacaggggcatgaactctccaacgaagagagaaatctgctctctgttgcctacaagaatgtggtaggcgcccgccgctcttcctggcgtgtcatctccagcattgagcagaaaacagagaggaatgagaagaagcagcagatgggcaaagagtaccgtgagaagatagaggcagaactgcaggacatctgcaatgatgttctggagctgttggacaaatatcttattcccaatgctacacaaccagaaagtaaggtgttctacttgaaaatgaaaggagattattttaggtatctttctgaagtggcatctggagacaacaaacaaaccactgtgtcgaactcccagcaggcttaccaggaagcatttgaaattagtaagaaagaaatgcagcctacacacccaattcgtcttggtctggcactaaatttctcagtcttttactatgagattctaaactctcctgaaaaggcctgtagcctggcaaaaacggcatttgatgaagcaattgctgaattggatacgctgaatgaagagtcttataaagacagcactctgatcatgcagttacttagggacaatctcactctgtggacatcggaaaaccagggagacgaaggagacgctggggagggagagaactaatgtttctcgtgctttgtgatctgttcagtgtcactctgtaccctcaacatatatcccttgtgcgataaaaaaaaaaaaaaaaaaaaaaagagaatcgtacgtcgactttcgatttttcacagcctcagcctaggaaaaatggttcatgggataaacagctggtatttgtatctaaaactcagattggtcacataaatgccacggcattccgaagttttgattttgattaacattgacaggattactgtgtgtttaattttttaaaaactgaacactgtgattatggggttttgtaatttagcagaactcttactggtagaaaaaatagacctgaattatgtgtaactttttggaaggtttaatctgatatcaaaataatcattgaaatacaattccattgtaaagttgtacagaaagttatagagattatattgtgatgctggaacttggagtgagacacacatcatttggcatttgagttgaatggtaattcacagtaatgctgccgttgttcgggacttaaagacacttgacctgtttgggctgttgccacttaaaagttcatgaccacaaatgtccacagtgtcttcctctgaggaaactcgaatcctgaaatggaaattctttgtggcagataactggcttatgacaccttgaaaagttcaagtgctcatataacacaccacactgaaccccctttcctacagcaatatgttcactatgttaccaatttgcaacttgtgcttcaatagtggaatctactttcattgttaacactgagctaaagaaaaaaagccgtgtgttttatgaatgaccttatctgtttcctggataatacctttaagaataatgtcctgagtcaggcgtggtggtgcgtgcatctagtcccaactatttgggaggctgaggcaggaggatcgcttgagcccaggagtttaaagctgcagtgccctgtggttgcacctgtgaataactgcactccagcctgggcaacatagcgagacctcatctccaaaaaagaaaacaaaaaacaaaaaaaggaatgatgttctgtagagatggcctttcacttgaggagtactcagttttcaggttcttcctagctcggggcttttaaattttgaaatctaaacattctttcccaccatcctttttgactgttgaccttggttttctcttctaagtttctgtccctctgcttccttactttttttcctttttgaattctatctttatctgtcttttgttcactttttaatgctatatatgggcaggggtgagagacattactgagcaccttggtgagcaagcctggctttaaagattggagaagagcttctggcaccagaaccctgtcttcctccagttctcaacacggtgttgctcttcagtcataccggaatctgaatcaaaaaagtatttttaaatatccatgatttctccctgtattgaggctagccctgatcatgctttttgtgcctgtcaccaggtctcccaagtgcactcatccaggtcagtgctcagatgtgtttaaggagaccctatattcagggaagttgcgtgaacactgcagtggggagaattgagaatagtcaggcctatcagtctcacagaatcacccctctacctttgatattccacttagctgtagagtccatctgtttgtccatctgctgaaatgagaaaagaaaaatttatgcactgatttaaaacaaaccaaaaaaaaagaaaaaaacaaaaaaaaaaatccctcctttctagctgaacaaaaatgtgcagttaatacttggcgcttgaaaatgcagtagtgaatgtggaaccaagcctgtctgtatatctggtagctcttttcttgctttgttttttcttaccagtattctgcctaacgtttgcttctgtgatggttatattgcctagcaagcacacccgtggttgtgaaaatagtatagcaaaaaagaaaaatccccggttattgatgtactagatttgtgtatgtcttttaaacagttctagtttcaccttacacagaataatcaggaaaagtgtaaaaattcaaaagtgaaataaaaattttatcagttagttgcctgtgaa

SEQ ID NO: 238732 - DNA, 648 bp, Artificial Sequence
  derived and/or modified sequence
cggagccggggtagtcgccgccgccgccgccgctgcagccactgcaggcaccgctgccgccgcctgagtagtgggcttaggaaggaagaggtcatctcgctcggagcttcgctcggaagggtctttgttccctgcagccctcccacgtgcttgttatattgaagccattttagaattggagcgctatagatcagggaggcagcctctataaaaccaggctgagcaaattcccatgatgctggttctctaggcagagtctccagagatttgggccgctacaaaaagtgcattttgcccattcggctgtggatagagaagcaggaagagcactggacttggagtcagggaatgacaatggataaaagtgagctggtacagaaagccaaactcgctgagcaggctgagcgatatgatgatatggctgcagccatgaaggcagtcacagaacaggggcatgaactctccaacgaagagagaaatctgctctctgttgcctacaagaatgtggtaggcgcccgccgctcttcctggcgtgtcatctccagcattgagcagaaaacagagaggaatgagaagaagcagcagatgggcaaagagtaccgtgagaagatagaggcagaactgcaggacatctgcaatgatgttctg

SEQ ID NO: 238733 - DNA, 556 bp, Artificial Sequence
  derived and/or modified sequence
agtcgccgccgccgccgccgctgcagccactgcaggcaccgctgccgccgcctgagtagtgggcttaggaaggaagaggtcatctcgctcggagcttcgctcggaagggtctttgttccctgcagccctcccacgatagcatcaggtcctgattttgcttgccctgtgtgggagatggaatttggcaagatgatgctatgaacataaaatcagcctcgggaaccaaaagagaaaggcagagtctccagagatttgggccgctacaaaaagtgcattttgcccattcggctgtggatagagaagcaggaagagcactggacttggagtcagggaatgacaatggataaaagtgagctggtacagaaagccaaactcgctgagcaggctgagcgatatgatgatatggctgcagccatgaaggcagtcacagaacaggggcatgaactctccaacgaagagagaaatctgctctctgttgcctacaagaatgtggtaggcgcccgccgctcttcctggcgtgtcatctccagcattgagcagaaaacagagaggaatg

SEQ ID NO: 238734 - protein, 593 aa, Artificial Sequence
  derived and/or modified sequence
MAEMGSKGVTAGKIASNVQKKLTRAQEKVLQKLGKADETKDEQFEQCVQNFNKQLTEGTRLQKDLRTYLASVKAMHEASKKLNECLQEVYEPDWPGRDEANKIAENNDLLWMDYHQKLVDQALLTMDTYLGQFPDIKSRIAKRGRKLVDYDSARHHYESLQTAKKKDEAKIAKPVSLLEKAAPQWCQGKLQAHLVAQTNLLRNQAEEELIKAQKVFEEMNVDLQEELPSLWNSRVGFYVNTFQSIAGLEENFHKEMSKLNQNLNDVLVGLEKQHGSNTFTVKAQPSDNAPAKGNKSPSPPDGSPAATPEIRVNHEPEPAGGATPGATLPKSPSQLRKGPPVPPPPKHTPSKEVKQEQILSLFEDTFVPEISVTTPSQFEAPGPFSEQASLLDLDFDPLPPVTSPVKAPTPSGQSIPWDLWEPTESPAGSLPSGEPSAAEGTFAVSWPSQTAEPGPAQPAEASEVAGGTQPAAGAQEPGETAASEAASSSLPAVVVETFPATVNGTVEGGSGAGRLDLPPGFMFKVQAQHDYTATDTDELQLKAGDVVLVIPFQNPEEQDEGWLMGVKESDWNQHKELEKCRGVFPENFTERVP

SEQ ID NO: 238735 - DNA, 1782 bp, Artificial Sequence
  derived and/or modified sequence
atggccgagatgggatccaaaggggtgaccgctggaaagattgcgtccaacgtccagaagaaactgacccgtgcccaagagaaggtccttcagaagcttggaaaggccgatgagactaaggacgagcaatttgagcagtgcgtgcagaatttcaacaagcagcttacagaggggacgcggctgcagaaggacttacgcacataccttgccagtgtgaaggctatgcacgaggctagcaaaaagctgaatgaatgtctgcaagaagtgtacgaacccgattggccgggccgcgatgaagccaataaaatcgccgagaacaacgacctcctctggatggattatcaccaaaagctcgtagaccaggctttattgactatggacacttatctgggtcagttccctgatattaagtctcggatcgcaaagcgtggccgcaagctcgttgattacgacagcgcccggcaccattatgaatctctacagaccgctaaaaaaaaggatgaggccaaaatcgccaaacctgtgagcctcctagagaaagcggcgccccagtggtgtcaggggaagctccaggcacacctcgtggcccagactaacctgcttagaaaccaggccgaagaagaactaatcaaggctcaaaaagtgttcgaggaaatgaatgtcgaccttcaggaagaactgcctagcctttggaatagccgtgtaggtttttacgtcaacacgttccagagcatcgctgggctggaggaaaatttccataaagagatgtctaagctgaatcaaaaccttaacgatgtgctagtgggcttagaaaagcagcacggttccaacacattcacagtgaaggcacagccaagcgataacgccccagccaaaggaaataaatcacctagccctcccgatgggtccccagccgcaaccccggagattcgggtgaatcacgaaccggaaccagccggaggcgcaacacccggagcaacactgccaaagtctcccagtcagctcaggaaaggaccccccgtgcctccgccccctaagcacacacctagcaaggaagttaagcaggagcagatccttagcctgtttgaggataccttcgtaccagagatttccgtcacaactcctagccaattcgaagctcccgggcctttttcggagcaggcgtcactgctcgatttggactttgatccactgcctccagttaccagtcctgtgaaggcacccacccccagcgggcagtcaatcccctgggatctgtgggagcccacggaatcccccgcggggagtttaccctcaggggagccaagcgcagctgaaggaacattcgccgtaagttggccaagccagaccgccgaacctggacctgcccaaccggcggaggcctccgaggtggctggtggcacccagcccgccgccggggctcaggaacccggcgagacagccgccagtgaggctgcatcctctagtctacctgctgtggtcgtcgaaacgtttccagcgactgttaatggaactgtggaaggagggtcaggagctggacgtttggatctgccaccaggattcatgtttaaagtccaggcccaacacgattatactgccaccgacaccgacgaactacaactcaaagccggcgacgtggttctggtgattcctttccagaatccggaagagcaggatgaaggctggttgatgggggttaaagagagcgattggaaccaacataaggaactagagaaatgtaggggcgtcttccctgaaaatttcacagagcgcgtgccatag

SEQ ID NO: 238736 - DNA, 1782 bp, Artificial Sequence
  derived and/or modified sequence
atggccgagatgggcagcaaaggagtgacagctgggaagatcgccagcaatgtgcagaagaagctgacccgggcccaggagaaggtgctgcagaagctgggcaaggcagatgagaccaaggatgagcagtttgagcagtgtgtgcagaacttcaacaagcagctgacagagggcacccggctgcagaaggacctgcggacctacctggcctctgtgaaggccatgcatgaggccagcaagaagctgaatgaatgtctgcaggaggtgtatgagccagactggccaggaagagatgaggccaacaagattgctgaaaataatgacctgctgtggatggactaccaccagaagctggtggaccaggccctgctgaccatggacacctacctgggccagttcccagacatcaagagccgcatcgccaagaggggcaggaagctggtggactatgacagcgcccggcaccactatgagagcctgcagacagccaagaagaaggatgaggccaagatcgccaagcctgtgtccctgctggagaaggccgccccccagtggtgccagggcaagctgcaggcccacctggtggcccagaccaacctgctgaggaaccaggccgaggaggagctgatcaaggcccagaaggtgtttgaggagatgaatgtggacctgcaggaggagctgcccagcctgtggaacagccgggtgggcttctacgtgaacaccttccagagcattgctggcctggaggagaacttccacaaggagatgagcaagctgaaccagaacctgaatgatgtgctggtgggcctggagaagcagcacggcagcaacaccttcaccgtgaaggcccagcccagcgacaatgccccagccaagggcaacaagagccccagccccccagatggcagccctgctgccaccccagagatccgggtgaaccacgagcctgagcctgctggaggagccacccctggggccaccctgcccaagagccccagccagctgaggaaaggacctcctgtgcccccaccacccaagcacacccccagcaaggaggtgaagcaggagcagatcctgagcctgtttgaggacacctttgtgcctgagatctctgtgaccacccccagccagtttgaggcccctggccccttcagcgagcaggccagcctgctggacctggactttgaccccctgccccctgtgaccagccctgtgaaggcccccaccccatctggccagagcatcccctgggacctgtgggagcccacagagagccctgctggcagcctgcccagcggggagcccagcgctgctgagggcacctttgctgtgtcctggcccagccagacagctgagcccggccctgcccagcctgctgaggccagcgaggtggccggcggcacccagcctgctgctggggcccaggagcctggagaaacagctgccagcgaggccgccagcagcagcctgcctgctgtggtggtggagaccttccctgccaccgtgaatggaacagtggagggcggcagcggggccggccgcctggacctgcccccaggcttcatgttcaaggtgcaggcccagcacgactacacagccacagacacagatgagctgcagctgaaggctggagatgtggtgctggtgatccccttccagaaccctgaggagcaggatgagggctggctgatgggcgtgaaggagagtgactggaaccagcacaaggagctggagaagtgccggggcgtcttccctgagaacttcacagagcgggtgccctag

SEQ ID NO: 238737 - DNA, 1782 bp, Artificial Sequence
  derived and/or modified sequence
atggccgagatgggcagcaagggcgtgaccgccggcaagatcgccagcaacgtgcagaaaaagctgaccagggcgcaggagaaagtactgcagaagctcggtaaggcagacgagacaaaagatgaacagttcgagcagtgcgttcagaacttcaataaacagctcaccgaaggcactcgcctacagaaagatctgcggacctatctcgcgagcgtaaaagctatgcacgaggcctctaagaagcttaacgaatgcctccaggaggtatacgaaccagactggcccggtcgcgacgaggctaataagattgcggaaaataatgatttactatggatggactaccaccagaagctcgtcgaccaggcactactcacaatggatacttatctgggacaatttcctgacataaagtctagaatcgctaagcggggacgcaagttggtggactacgatagtgcaagacatcactacgaatccctacagactgccaagaagaaagacgaggccaagatcgctaagcctgtgtccctcctggagaaagcggctccacagtggtgtcagggcaagcttcaagctcacctcgtcgctcagactaatctcctcagaaatcaagcagaggaagaactcattaaagcccagaaggttttcgaggaaatgaatgtggaccttcaggaagaactgccttctctgtggaatagtagggtcggcttctacgtgaatacattccagagcatcgctggcctcgaggaaaatttccacaaagagatgagcaaactcaaccaaaacctcaacgacgtgctggtcggcctggaaaagcagcacggatccaataccttcacggtgaaagctcagccatcagataatgcccctgctaagggtaacaagagtcccagtcccccagacggttctcctgctgctactcctgagatcagggtgaatcatgagcccgagccagctgggggggcaactcctggggccactttgcccaaatctccttcgcagctcaggaaggggcccccagtgcctcccccgccaaagcacaccccgtctaaggaggttaaacaggaacaaattttgtcgttattcgaggataccttcgtgccagagatctccgtgacgactccaagccagttcgaagctcccgggccattcagcgagcaggcatctcttctggacctggacttcgaccctctaccccccgttaccagtccagtaaaggcccctacgccctcgggtcagtctattccctgggacttgtgggaacccaccgaatctccagctggttcccttccttcaggagagcccagcgcagccgagggtactttcgctgtgtcttggccaagccagactgcagagccaggcccagcacagcctgcagaagcttccgaagtggcgggtgggactcagcctgctgctggcgcccaggagccaggtgagaccgcagcatcagaagcagcttcctcatctctgcctgccgtggtggtcgagactttccctgcaacagtgaacggaacagtggaaggaggctcgggagcaggcaggctggatctgccacccgggttcatgttcaaggtccaggctcagcacgactatacggctacagatactgacgagctgcagctcaaagctggggacgtagttctcgtgatcccctttcagaaccccgaggagcaagacgaggggtggcttatgggggttaaggaatcggactggaaccagcataaagagcttgagaagtgtcggggggtgttccccgaaaacttcacagagcgagtgccctag

SEQ ID NO: 238738 - DNA, 1782 bp, Artificial Sequence
  derived and/or modified sequence
atggcagaaatgggctccaagggagtgactgctggcaagatcgcaagtaatgtgcagaagaaacttacccgcgcacaggaaaaggtcctacagaaactgggaaaagctgatgagaccaaagacgaacagtttgagcagtgcgtccagaacttcaataagcagctgactgaaggaactaggttgcagaaagaccttaggacctacctggcgagcgtgaaggctatgcatgaggcaagtaaaaaactcaacgagtgccttcaggaagtttacgagcctgactggcccggacgtgatgaggcgaataaaatcgccgaaaataatgatcttctgtggatggattatcatcagaaacttgtggaccaggccctcctgacaatggacacttatctcggccagttccccgacatcaaatcccggattgccaagcgcggtaggaagctcgtggattatgactccgctaggcatcattacgagtccctccagacagcaaaaaaaaaggatgaagccaagattgcgaagcctgtgagtctgcttgagaaagcggcaccccagtggtgtcagggaaaactacaggcacacttggtcgctcagactaatctgttgcggaaccaggcggaagaggagctgatcaaagcccagaaagtttttgaggagatgaacgtagatctacaggaagaacttcctagtttatggaacagtagagttggcttctacgtcaatacatttcagtcgatcgctgggctggaggaaaattttcacaaagagatgtccaagttgaatcaaaacttgaacgatgtgctggtgggactcgaaaaacagcatgggagtaatacctttaccgtgaaagcacagccgtccgacaatgctccagcgaaagggaataaaagcccctctccccctgacggaagccccgctgcgaccccagaaatcagagtgaatcacgaacccgaaccggcaggtggagccactcctggagcgaccctgcctaaatcaccttctcagctaaggaagggaccccctgttcctccaccacctaaacacacccccagcaaggaagtcaagcaagaacaaatcttatctctgtttgaggatacattcgtaccggaaattagtgtgactactccctctcagttcgaggcacccggaccgttttccgagcaggccagtctgctggatctggacttcgaccccctcccaccagtgaccagtcccgtgaaggctccgaccccctcaggccagagcattccctgggatctgtgggaacctacagagtcccccgctggatccctaccttccggtgagccaagcgctgccgaaggaaccttcgcagtctcctggcctagccagacggctgagcccggtccagcccagccggctgaggcttctgaggtggctggcggaacacaacccgctgccggtgctcaagagcctggggaaacagccgcttccgaggcagctagttcctccttgcctgccgtcgtggtcgagacctttcctgccactgttaacggcactgtcgagggcggatccggggctggcagattggatcttccccctggctttatgtttaaggtgcaggcccagcatgactatacggccacagacacggatgaacttcaattaaaagccggagatgtcgtcctggtgattccattccagaatccagaggagcaggatgagggttggttaatgggagtcaaggaaagcgactggaatcagcacaaggagctggagaagtgtcgcggagtttttccagagaattttaccgaacgggtgccatag

SEQ ID NO: 238739 - DNA, 2693 bp, Artificial Sequence
  derived and/or modified sequence
tccccgccccggggcggtgcagctggagcgtcaggggagtcccgctcgccgcagccccagcgccgcgcgcgcccctccctcctcgcggacctggcggtgccggcgcccggagtggccctttaaaaggcagcttattgtccggagggggcgggcggggggcgccgaccgcggcctgaggcccggcccctcccctctccctccctctgtccccgcgtcgctcgctggctagctcgctggctcgctcgcccgtccggcgcacgctccgcctccgtcagttggctccgctgtcgggtgcgcggcgtggagcggcagccggtctggacgcgcggccggggctgggggctgggagcgcggcgcgcaagatctccccgcgcgagagcggcccctgccaccgggcgaggcctgcgccgcgatggcagagatgggcagtaaaggggtgacggcgggaaagatcgccagcaacgtgcagaagaagctcacccgcgcgcaggagaaggttctccagaagctggggaaggcagatgagaccaaggatgagcagtttgagcagtgcgtccagaatttcaacaagcagctgacggagggcacccggctgcagaaggatctccggacctacctggcctccgtcaaagccatgcacgaggcttccaagaagctgaatgagtgtctgcaggaggtgtatgagcccgattggcccggcagggatgaggcaaacaagatcgcagagaacaacgacctgctgtggatggattaccaccagaagctggtggaccaggcgctgctgaccatggacacgtacctgggccagttccccgacatcaagtcacgcattgccaagcgggggcgcaagctggtggactacgacagtgcccggcaccactacgagtcccttcaaactgccaaaaagaaggatgaagccaaaattgccaagcctgtctcgctgcttgagaaagccgccccccagtggtgccaaggcaaactgcaggctcatctcgtagctcaaactaacctgctccgaaatcaggccgaggaggagctcatcaaagcccagaaggtgtttgaggagatgaatgtggatctgcaggaggagctgccgtccctgtggaacagccgcgtaggtttctacgtcaacacgttccagagcatcgcgggcctggaggaaaacttccacaaggagatgagcaagctcaaccagaacctcaatgatgtgctggtcggcctggagaagcaacacgggagcaacaccttcacggtcaaggcccagcccagtgacaacgcgcctgcaaaagggaacaagagcccttcgcctccagatggctcccctgccgccacccccgagatcagagtcaaccacgagccagagccggccggcggggccacgcccggggccaccctccccaagtccccatctcagctccggaaaggcccaccagtccctccgcctcccaaacacaccccgtccaaggaagtcaagcaggagcagatcctcagcctgtttgaggacacgtttgtccctgagatcagcgtgaccaccccctcccagtttgaggccccggggcctttctcggagcaggccagtctgctggacctggactttgaccccctcccgcccgtgacgagccctgtgaaggcacccacgccctctggtcagtcaattccatgggacctctgggagcccacagagagtccagccggcagcctgccttccggggagcccagcgctgccgagggcacctttgctgtgtcctggcccagccagacggccgagccggggcctgcccaaccagcagaggcctcggaggtggcgggtgggacccaacctgcggctggagcccaggagccaggggagacggcggcaagtgaagcagcctccagctctcttcctgctgtcgtggtggagaccttcccagcaactgtgaatggcaccgtggagggcggcagtggggccgggcgcttggacctgcccccaggtttcatgttcaaggtacaggcccagcacgactacacggccactgacacagacgagctgcagctcaaggctggtgatgtggtgctggtgatccccttccagaaccctgaagagcaggatgaaggctggctcatgggcgtgaaggagagcgactggaaccagcacaaggagctggagaagtgccgtggcgtcttccccgagaacttcactgagagggtcccatgacggcggggcccaggcagcctccgggcgtgtgaagaacacctcctcccgaaaaatgtgtggttcttttttttgttttgttttcgtttttcatcttttgaagagcaaagggaaatcaagaggagacccccaggcagaggggcgttctcccaaagattaggtcgttttccaaagagccgcgtcccggcaagtccggcggaattcaccagtgttcctgaagctgctgtgtcctctagttgagtttctggcgcccctgcctgtgcccgcatgtgtgcctggccgcagggcggggctgggggctgccgagccaccatgcttgcctgaagcttcggccgcgccacccgggcaagggtcctcttttcctggcagctgctgtgggtggggcccagacaccagcctagcctggctctgccccgcagacggtctgtgtgctgtttgaaaataaatcttagtgttcaaaacaaaatgaaacaaaaaaaaaatgataaaaactctcagaaaa

SEQ ID NO: 238740 - DNA, 1782 bp, Artificial Sequence
  derived and/or modified sequence
atggccgagatgggcagcaagggcgtgaccgccggcaagatcgccagcaacgtgcagaagaagctgaccagagcccaggagaaggtgctgcagaagctgggcaaggccgacgagaccaaggacgagcagttcgagcagtgcgtgcagaacttcaacaagcagctgaccgagggcaccagactgcagaaggacctgagaacctacctggccagcgtgaaggccatgcacgaggccagcaagaagctgaacgagtgcctgcaggaggtgtacgagcccgactggcccggcagagacgaggccaacaagatcgccgagaacaacgacctgctgtggatggactaccaccagaagctggtggaccaggccctgctgaccatggacacctacctgggccagttccccgacatcaagagcagaatcgccaagagaggcagaaagctggtggactacgacagcgccagacaccactacgagagcctgcagaccgccaagaagaaggacgaggccaagatcgccaagcccgtgagcctgctggagaaggccgccccccagtggtgccagggcaagctgcaggcccacctggtggcccagaccaacctgctgagaaaccaggccgaggaggagctgatcaaggcccagaaggtgttcgaggagatgaacgtggacctgcaggaggagctgcccagcctgtggaacagcagagtgggcttctacgtgaacaccttccagagcatcgccggcctggaggagaacttccacaaggagatgagcaagctgaaccagaacctgaacgacgtgctggtgggcctggagaagcagcacggcagcaacaccttcaccgtgaaggcccagcccagcgacaacgcccccgccaagggcaacaagagccccagcccccccgacggcagccccgccgccacccccgagatcagagtgaaccacgagcccgagcccgccggcggcgccacccccggcgccaccctgcccaagagccccagccagctgagaaagggcccccccgtgccccccccccccaagcacacccccagcaaggaggtgaagcaggagcagatcctgagcctgttcgaggacaccttcgtgcccgagatcagcgtgaccacccccagccagttcgaggcccccggccccttcagcgagcaggccagcctgctggacctggacttcgaccccctgccccccgtgaccagccccgtgaaggcccccacccccagcggccagagcatcccctgggacctgtgggagcccaccgagagccccgccggcagcctgcccagcggcgagcccagcgccgccgagggcaccttcgccgtgagctggcccagccagaccgccgagcccggccccgcccagcccgccgaggccagcgaggtggccggcggcacccagcccgccgccggcgcccaggagcccggcgagaccgccgccagcgaggccgccagcagcagcctgcccgccgtggtggtggagaccttccccgccaccgtgaacggcaccgtggagggcggcagcggcgccggcagactggacctgccccccggcttcatgttcaaggtgcaggcccagcacgactacaccgccaccgacaccgacgagctgcagctgaaggccggcgacgtggtgctggtgatccccttccagaaccccgaggagcaggacgagggctggctgatgggcgtgaaggagagcgactggaaccagcacaaggagctggagaagtgcagaggcgtgttccccgagaacttcaccgagagagtgccctag

SEQ ID NO: 238741 - protein, 550 aa, Artificial Sequence
  derived and/or modified sequence
MAEMGSKGVTAGKIASNVQKKLTRAQEKVLQKLGKADETKDEQFEQCVQNFNKQLTEGTRLQKDLRTYLASVKAMHEASKKLNECLQEVYEPDWPGRDEANKIAENNDLLWMDYHQKLVDQALLTMDTYLGQFPDIKSRIAKRGRKLVDYDSARHHYESLQTAKKKDEAKIAKPVSLLEKAAPQWCQGKLQAHLVAQTNLLRNQAEEELIKAQKVFEEMNVDLQEELPSLWNSRVGFYVNTFQSIAGLEENFHKEMSKLNQNLNDVLVGLEKQHGSNTFTVKAQPSDNAPAKGNKSPSPPDGSPAATPEIRVNHEPEPAGGATPGATLPKSPSQFEAPGPFSEQASLLDLDFDPLPPVTSPVKAPTPSGQSIPWDLWEPTESPAGSLPSGEPSAAEGTFAVSWPSQTAEPGPAQPAEASEVAGGTQPAAGAQEPGETAASEAASSSLPAVVVETFPATVNGTVEGGSGAGRLDLPPGFMFKVQAQHDYTATDTDELQLKAGDVVLVIPFQNPEEQDEGWLMGVKESDWNQHKELEKCRGVFPENFTERVP

SEQ ID NO: 238742 - DNA, 1653 bp, Artificial Sequence
  derived and/or modified sequence
atggccgagatgggatccaaaggagttactgccggaaaaatagcgtccaacgtgcaaaagaaactaacccgcgcccaggagaaggtgctgcaaaagcttggtaaggctgatgagacgaaagacgagcaatttgaacagtgcgtgcagaactttaataaacagctgacagagggaacccgtcttcagaaagaccttcgaacgtaccttgcatccgtaaaggctatgcacgaggcttcaaagaagctcaatgaatgccttcaagaagtgtacgagccagactggcccggaagggacgaagcgaacaagatcgcggaaaacaacgaccttctgtggatggattaccatcagaaactggttgatcaagcattgctaaccatggatacctacctgggacagttccctgatatcaaatctagaatcgctaagagaggtagaaagcttgtggactacgacagcgcccgccatcactatgagagtctgcaaactgccaaaaagaaggacgaggcaaaaatcgccaagccagtgtcgcttctggaaaaagccgccccacaatggtgccagggcaaactgcaggctcatttagtggcacagactaacctgctacggaatcaggccgaagaggagttgatcaaagcccaaaaggtttttgaggagatgaacgttgacctgcaggaagaactcccatctctatggaactctagggtggggttctacgtgaatactttccagagcatcgcagggcttgaggagaatttccacaaagagatgtcaaagcttaatcaaaacctaaatgatgttctcgtaggcctagagaagcagcatggcagcaataccttcactgtaaaggcacagcccagtgacaatgcccccgccaagggtaacaagagtccgtccccccccgacggctcaccagccgcaactcccgaaatacgagtgaaccatgagccagaacctgccggaggggctacccctggcgctaccctgccaaaatctccatcccagttcgaagctccaggccctttttctgagcaggcatcactgctggacctcgatttcgacccactgcccccggttacatctcccgttaaagcacccactcccagtggacagagcatcccctgggacctctgggagcccaccgaatcgccagccggctcactgccttctggggagccttctgctgcagagggaacctttgctgtgtcgtggcctagtcaaaccgctgagcccggtcccgcacagcccgcagaggccagtgaggtcgctgggggaacacagccagctgccggggctcaggagccaggcgagactgctgccagcgaagccgccagctcatcactgcccgcggtcgtggtggaaaccttcccagctaccgtgaacggtaccgtcgaagggggcagtggtgcgggcagacttgacctgccccccgggttcatgttcaaggtccaggcccaacatgactatactgcaactgacacagatgagctgcagctaaaggcaggagacgtggtgctcgttatccctttccagaatccagaggaacaggacgaagggtggctaatgggtgtgaaggagtccgattggaaccagcacaaggagcttgaaaagtgtaggggagtgttcccggaaaatttcacggaacgggttccttag

SEQ ID NO: 238743 - DNA, 1653 bp, Artificial Sequence
  derived and/or modified sequence
atggccgagatgggcagcaaaggagtgacagctgggaagatcgccagcaatgtgcagaagaagctgacccgggcccaggagaaggtgctgcagaagctgggcaaggcagatgagaccaaggatgagcagtttgagcagtgtgtgcagaacttcaacaagcagctgacagagggcacccggctgcagaaggacctgcggacctacctggcctctgtgaaggccatgcatgaggccagcaagaagctgaatgaatgtctgcaggaggtgtatgagccagactggccaggaagagatgaggccaacaagattgctgaaaataatgacctgctgtggatggactaccaccagaagctggtggaccaggccctgctgaccatggacacctacctgggccagttcccagacatcaagagccgcatcgccaagaggggcaggaagctggtggactatgacagcgcccggcaccactatgagagcctgcagacagccaagaagaaggatgaggccaagatcgccaagcctgtgtccctgctggagaaggccgccccccagtggtgccagggcaagctgcaggcccacctggtggcccagaccaacctgctgaggaaccaggccgaggaggagctgatcaaggcccagaaggtgtttgaggagatgaatgtggacctgcaggaggagctgcccagcctgtggaacagccgggtgggcttctacgtgaacaccttccagagcattgctggcctggaggagaacttccacaaggagatgagcaagctgaaccagaacctgaatgatgtgctggtgggcctggagaagcagcacggcagcaacaccttcaccgtgaaggcccagcccagcgacaatgccccagccaagggcaacaagagccccagccccccagatggcagccctgctgccaccccagagatccgggtgaaccacgagcctgagcctgctggaggagccacccctggggccaccctgcccaagagccccagccagtttgaggcccctggccccttcagcgagcaggccagcctgctggacctggactttgaccccctgccccctgtgaccagccctgtgaaggcccccacccccagcggccagagcatcccctgggacctgtgggagcccacagagagccctgctggcagcctgcccagcggggagcccagcgctgctgagggcacctttgctgtgtcctggcccagccagacagctgagcccggccctgcccagcctgctgaggccagcgaggtggccggcggcacccagcctgctgctggggcccaggagcccggggagacagctgccagcgaggccgccagcagcagcctgcctgctgtggtggtggagaccttccctgccaccgtgaatggcaccgtggagggcggcagcggggccggccgcctggacctgcccccaggcttcatgttcaaggtgcaggcccagcacgactacacagccacagacacagatgagctgcagctgaaggctggagatgtggtgctggtgatccccttccagaaccctgaggagcaggatgagggctggctgatgggcgtgaaggagagtgactggaaccagcacaaggagctggagaagtgccggggcgtcttccctgagaacttcacagagcgggtgccctag

SEQ ID NO: 238744 - DNA, 1653 bp, Artificial Sequence
  derived and/or modified sequence
atggccgagatgggcagcaagggcgtgaccgccggcaagatcgcctccaacgtgcaaaaaaagctgactcgcgcacaagaaaaagtcctgcaaaaactgggaaaagcggatgagacaaaggacgagcagtttgaacagtgtgtgcaaaattttaataagcagctgactgagggcacgagactccagaaggatttgagaacgtatcttgccagcgtcaaagcaatgcacgaagcttcgaaaaagctgaacgagtgcctccaggaggtgtacgagcccgactggcccgggcgggatgaggcaaacaagattgccgagaataatgacctgttgtggatggactatcaccaaaaactcgtcgaccaagctctgctgacaatggacacctacctggggcaattcccggatatcaagtctaggatcgctaagcggggacgcaagttagtagattacgacagcgcccgtcaccactacgaatctcttcagacagccaagaagaaggacgaagccaagattgccaagccggtgagcttgctggaaaaggcagcgcctcagtggtgtcagggcaagctccaagcacacctcgtagcacagaccaacctgttgagaaatcaggctgaggaagaactgattaaggcccagaaagtatttgaagagatgaatgtggatcttcaggaggagttaccatctttgtggaacagccgggtgggattctacgtcaacacctttcagtcgatcgcgggacttgaggagaacttccacaaggagatgagcaaactcaaccagaacttgaacgatgtgctcgtgggtctagagaagcagcatgggagtaatacattcaccgtcaaggctcagcccagcgacaacgctccagctaaaggcaacaaaagcccctctccccccgatggttccccagcagccacacccgagattcgcgtgaaccatgagcccgagcctgctggcggagccaccccgggcgccactctgcccaagagtccctctcagttcgaagctccaggcccattctccgagcaagctagcctcttagatctagattttgacccattgccccctgtgacaagccccgtgaaagctccaacgccttcgggtcagtccattccctgggatctgtgggagcctacagaaagtcccgccgggtctctcccctccggcgaaccctccgcagcagaaggaactttcgctgttagctggcccagccagacggccgagccgggtccagctcaacccgccgaggctagtgaggttgcgggcggaacacaacccgccgcaggcgcgcaggagccgggcgaaacagccgccagtgaagcagcatcatcttctctacctgctgtggtggtcgagactttccccgcaacagttaacggcactgtagagggaggttccggagccggccggctcgacctgcccccagggtttatgtttaaagtccaggctcagcacgattatactgctacagatactgatgaactgcaactcaaggcgggggacgtagtccttgttataccctttcagaaccccgaggagcaggatgagggatggctgatgggagtgaaagaaagtgactggaatcagcataaggagctggaaaaatgtcggggtgtgttccctgagaactttaccgagagagttccatag

SEQ ID NO: 238745 - DNA, 1653 bp, Artificial Sequence
  derived and/or modified sequence
atggcagagatgggctctaagggtgtgaccgctggcaagattgcaagcaacgtgcaaaagaaactgacacgtgctcaggagaaggtattacaaaaattgggtaaagctgacgaaactaaggacgagcagtttgagcagtgtgtgcaaaacttcaataagcagctgactgagggcactcggttacagaaggacctgaggacttacctggcctccgtgaaagcgatgcatgaggcaagcaagaagctgaacgagtgtctgcaggaagtctacgagccagattggcccggtagggacgaggcaaataaaatcgccgaaaataatgatctgttatggatggattaccaccagaagttggtggaccaggccctgctgactatggacacgtacctgggccaatttcctgatattaaaagtaggattgctaagagaggcaggaagcttgtcgattatgactcagctcggcaccactacgagtcattacagaccgcaaagaagaaagacgaggcgaaaatcgcaaagcccgtaagtctgttggaaaaagctgcccctcagtggtgccagggaaaattgcaggctcacctcgtagcccagacaaatctgttgagaaatcaggctgaggaagagctgatcaaggcacaaaaggtgttcgaagagatgaacgtggatcttcaggaggaactgccatccctctggaattctcgggtaggattttacgttaatacctttcagtctatcgcgggactggaggaaaatttccacaaggaaatgagtaaattaaaccagaatcttaacgatgttctcgtgggccttgagaaacaacacggttctaacaccttcacagtgaaggctcaaccgagcgacaatgcacctgcaaaggggaataaaagtccctcaccgccagatggttctccagccgcaacgccagagatccgtgttaatcatgagcctgagcccgcagggggtgctactccaggggcaacactacctaagtcccctagccagttcgaagcgccaggacccttctctgagcaggcaagcctgctagacttagactttgatccactgccccctgtgacgtcaccggtgaaagcccctacaccttccggacagtcgatcccctgggacctctgggaacctaccgagtcaccagccggaagcttgccgagtggggagccttccgctgctgaggggacctttgcggtatcctggcctagtcagaccgccgaaccgggtcccgcacaaccggctgaagctagtgaagttgctggcggtactcagccagcagccggagcacaggaaccaggagagaccgccgctagtgaggccgcatcatcttccttgcccgctgtcgtagtcgagactttcccagctaccgtcaatggaacggtggagggagggtcaggtgccggaagacttgacctgccccctgggttcatgtttaaagtccaggctcagcacgactacaccgccacagacacggacgaattgcagctgaaggcgggtgacgtagtcctggtgatacctttccagaatccggaggagcaggatgaggggtggttgatgggcgtcaaagaaagcgattggaatcagcacaaggagctcgagaaatgccgtggcgtgtttccagagaactttactgaaagagtcccctag

SEQ ID NO: 238746 - DNA, 2497 bp, Artificial Sequence
  derived and/or modified sequence
cgcgcccctccctcctcgcggacctggcggtgccggcgcccggagtggccctttaaaaggcagcttattgtccggagggggcgggcggggggcgccgaccgcggcctgaggcccggcccctcccctctccctccctctgtccccgcgtcgctcgctggctagctcgctggctcgctcgcccgtccggcgcacgctccgcctccgtcagttggctccgctgtcgggtgcgcggcgtggagcggcagccggtctggacgcgcggccggggctgggggctgggagcgcggcgcgcaagatctccccgcgcgagagcggcccctgccaccgggcgaggcctgcgccgcgatggcagagatgggcagtaaaggggtgacggcgggaaagatcgccagcaacgtgcagaagaagctcacccgcgcgcaggagaaggttctccagaagctggggaaggcagatgagaccaaggatgagcagtttgagcagtgcgtccagaatttcaacaagcagctgacggagggcacccggctgcagaaggatctccggacctacctggcctccgtcaaagccatgcacgaggcttccaagaagctgaatgagtgtctgcaggaggtgtatgagcccgattggcccggcagggatgaggcaaacaagatcgcagagaacaacgacctgctgtggatggattaccaccagaagctggtggaccaggcgctgctgaccatggacacgtacctgggccagttccccgacatcaagtcacgcattgccaagcgggggcgcaagctggtggactacgacagtgcccggcaccactacgagtcccttcaaactgccaaaaagaaggatgaagccaaaattgccaagcctgtctcgctgcttgagaaagccgccccccagtggtgccaaggcaaactgcaggctcatctcgtagctcaaactaacctgctccgaaatcaggccgaggaggagctcatcaaagcccagaaggtgtttgaggagatgaatgtggatctgcaggaggagctgccgtccctgtggaacagccgcgtaggtttctacgtcaacacgttccagagcatcgcgggcctggaggaaaacttccacaaggagatgagcaagctcaaccagaacctcaatgatgtgctggtcggcctggagaagcaacacgggagcaacaccttcacggtcaaggcccagcccagtgacaacgcgcctgcaaaagggaacaagagcccttcgcctccagatggctcccctgccgccacccccgagatcagagtcaaccacgagccagagccggccggcggggccacgcccggggccaccctccccaagtccccatctcagtttgaggccccggggcctttctcggagcaggccagtctgctggacctggactttgaccccctcccgcccgtgacgagccctgtgaaggcacccacgccctctggtcagtcaattccatgggacctctgggagcccacagagagtccagccggcagcctgccttccggggagcccagcgctgccgagggcacctttgctgtgtcctggcccagccagacggccgagccggggcctgcccaaccagcagaggcctcggaggtggcgggtgggacccaacctgcggctggagcccaggagccaggggagacggcggcaagtgaagcagcctccagctctcttcctgctgtcgtggtggagaccttcccagcaactgtgaatggcaccgtggagggcggcagtggggccgggcgcttggacctgcccccaggtttcatgttcaaggtacaggcccagcacgactacacggccactgacacagacgagctgcagctcaaggctggtgatgtggtgctggtgatccccttccagaaccctgaagagcaggatgaaggctggctcatgggcgtgaaggagagcgactggaaccagcacaaggagctggagaagtgccgtggcgtcttccccgagaacttcactgagagggtcccatgacggcggggcccaggcagcctccgggcgtgtgaagaacacctcctcccgaaaaatgtgtggttcttttttttgttttgttttcgtttttcatcttttgaagagcaaagggaaatcaagaggagacccccaggcagaggggcgttctcccaaagattaggtcgttttccaaagagccgcgtcccggcaagtccggcggaattcaccagtgttcctgaagctgctgtgtcctctagttgagtttctggcgcccctgcctgtgcccgcatgtgtgcctggccgcagggcggggctgggggctgccgagccaccatgcttgcctgaagcttcggccgcgccacccgggcaagggtcctcttttcctggcagctgctgtgggtggggcccagacaccagcctagcctggctctgccccgcagacggtctgtgtgctgtttgaaaataaatcttagtgttcaaaacaaaatgaaacaaaaaaaaaatgataaaaactctcagaaaa

SEQ ID NO: 238747 - DNA, 1653 bp, Artificial Sequence
  derived and/or modified sequence
atggccgagatgggcagcaagggcgtgaccgccggcaagatcgccagcaacgtgcagaagaagctgaccagagcccaggagaaggtgctgcagaagctgggcaaggccgacgagaccaaggacgagcagttcgagcagtgcgtgcagaacttcaacaagcagctgaccgagggcaccagactgcagaaggacctgagaacctacctggccagcgtgaaggccatgcacgaggccagcaagaagctgaacgagtgcctgcaggaggtgtacgagcccgactggcccggcagagacgaggccaacaagatcgccgagaacaacgacctgctgtggatggactaccaccagaagctggtggaccaggccctgctgaccatggacacctacctgggccagttccccgacatcaagagcagaatcgccaagagaggcagaaagctggtggactacgacagcgccagacaccactacgagagcctgcagaccgccaagaagaaggacgaggccaagatcgccaagcccgtgagcctgctggagaaggccgccccccagtggtgccagggcaagctgcaggcccacctggtggcccagaccaacctgctgagaaaccaggccgaggaggagctgatcaaggcccagaaggtgttcgaggagatgaacgtggacctgcaggaggagctgcccagcctgtggaacagcagagtgggcttctacgtgaacaccttccagagcatcgccggcctggaggagaacttccacaaggagatgagcaagctgaaccagaacctgaacgacgtgctggtgggcctggagaagcagcacggcagcaacaccttcaccgtgaaggcccagcccagcgacaacgcccccgccaagggcaacaagagccccagcccccccgacggcagccccgccgccacccccgagatcagagtgaaccacgagcccgagcccgccggcggcgccacccccggcgccaccctgcccaagagccccagccagttcgaggcccccggccccttcagcgagcaggccagcctgctggacctggacttcgaccccctgccccccgtgaccagccccgtgaaggcccccacccccagcggccagagcatcccctgggacctgtgggagcccaccgagagccccgccggcagcctgcccagcggcgagcccagcgccgccgagggcaccttcgccgtgagctggcccagccagaccgccgagcccggccccgcccagcccgccgaggccagcgaggtggccggcggcacccagcccgccgccggcgcccaggagcccggcgagaccgccgccagcgaggccgccagcagcagcctgcccgccgtggtggtggagaccttccccgccaccgtgaacggcaccgtggagggcggcagcggcgccggcagactggacctgccccccggcttcatgttcaaggtgcaggcccagcacgactacaccgccaccgacaccgacgagctgcagctgaaggccggcgacgtggtgctggtgatccccttccagaaccccgaggagcaggacgagggctggctgatgggcgtgaaggagagcgactggaaccagcacaaggagctggagaagtgcagaggcgtgttccccgagaacttcaccgagagagtgccctag

SEQ ID NO: 238748 - protein, 506 aa, Artificial Sequence
  derived and/or modified sequence
MAEMGSKGVTAGKIASNVQKKLTRAQEKVLQKLGKADETKDEQFEQCVQNFNKQLTEGTRLQKDLRTYLASVKAMHEASKKLNECLQEVYEPDWPGRDEANKIAENNDLLWMDYHQKLVDQALLTMDTYLGQFPDIKSRIAKRGRKLVDYDSARHHYESLQTAKKKDEAKIAKPVSLLEKAAPQWCQGKLQAHLVAQTNLLRNQAEEELIKAQKVFEEMNVDLQEELPSLWNSRVGFYVNTFQSIAGLEENFHKEMSKLNQNLNDVLVGLEKQHGSNTFTVKAQPSDNAPAKGNKSPSPPDGSPAATPEIRVNHEPEPAGGATPGATLPKSPSQPTESPAGSLPSGEPSAAEGTFAVSWPSQTAEPGPAQPAEASEVAGGTQPAAGAQEPGETAASEAASSSLPAVVVETFPATVNGTVEGGSGAGRLDLPPGFMFKVQAQHDYTATDTDELQLKAGDVVLVIPFQNPEEQDEGWLMGVKESDWNQHKELEKCRGVFPENFTERVP

SEQ ID NO: 238749 - DNA, 1521 bp, Artificial Sequence
  derived and/or modified sequence
atggctgagatgggatcaaagggcgttactgccggcaagatcgcttctaacgtccagaagaaactgacgagggcgcaggagaaggtgctccaaaagctcggcaaggctgatgagactaaggacgagcagtttgagcagtgcgtgcaaaattttaacaaacagttgacagagggaacgcgactgcagaaagatctgaggacatacctcgcgtccgtcaaggcgatgcatgaggcatcaaagaaactgaacgagtgtctgcaggaagtgtatgagcccgattggcctgggagagatgaggctaacaagatcgccgagaacaatgacctgctgtggatggattaccaccagaagctagtggatcaagccttgctgacaatggacacttacctcggtcagttcccagacattaagtctcgtatcgccaaacggggtcgaaagcttgtggactatgacagcgcacggcatcactacgagtccctacagacagcaaagaagaaggacgaagccaagatcgccaagcccgtgtcccttctggagaaagctgctcctcagtggtgccagggtaaactccaggcacatctcgttgctcagaccaacctcctacgtaaccaagcagaagaggaactcatcaaggcccagaaggtgttcgaagagatgaacgtcgacctgcaagaggagctgcccagcttatggaatagtagagtggggttttacgtgaacactttccagtccattgccggcctggaggagaatttccataaagagatgagcaaactaaatcagaatctgaacgacgttttggtggggctggaaaaacagcacggtagcaatacatttactgtaaaagcccagccaagcgataatgccccggcaaaggggaacaagtctcctagtcccccggatggcagtcctgccgccactcccgagattcgggtgaaccacgaacctgaacccgcaggcggggccaccccgggtgctacactgccaaaaagtccttctcagcctacggaatctccagccggctccctgccatccggcgagcccagtgctgctgaaggcaccttcgccgtcagctggccctcacagacggcggagcctgggccagcccagcctgcggaagcatccgaggtggccggggggacacagccagcagccggtgctcaggagcccggcgaaactgctgcctccgaggctgcaagctcctcacttcctgcagttgtggtggaaacattccctgctacagtgaatggaacggtggaagggggcagcggcgcaggcaggctagatcttcccccaggtttcatgttcaaggttcaagcacagcacgactacaccgccacggacacagatgaactgcagttgaaagccggtgatgtggttctggttattccttttcagaacccagaggagcaggatgaggggtggctcatgggagtgaaagaatccgattggaatcaacataaagaactggaaaagtgccgcggagtgtttccagaaaacttcacagaacgcgtgccttag

SEQ ID NO: 238750 - DNA, 1521 bp, Artificial Sequence
  derived and/or modified sequence
atggccgagatgggcagcaaaggagtgacagctgggaagatcgccagcaatgtgcagaagaagctgacccgggcccaggagaaggtgctgcagaagctgggcaaggcagatgagaccaaggatgagcagtttgagcagtgtgtgcagaacttcaacaagcagctgacagagggcacccggctgcagaaggacctgcggacctacctggcctctgtgaaggccatgcatgaggccagcaagaagctgaatgaatgtctgcaggaggtgtatgagccagactggccaggaagagatgaggccaacaagattgctgaaaataatgacctgctgtggatggactaccaccagaagctggtggaccaggccctgctgaccatggacacctacctgggccagttcccagacatcaagagccgcatcgccaagaggggcaggaagctggtggactatgacagcgcccggcaccactatgagagcctgcagacagccaagaagaaggatgaggccaagatcgccaagcctgtgtccctgctggagaaggccgccccccagtggtgccagggcaagctgcaggcccacctggtggcccagaccaacctgctgaggaaccaggccgaggaggagctgatcaaggcccagaaggtgtttgaggagatgaatgtggacctgcaggaggagctgcccagcctgtggaacagccgggtgggcttctacgtgaacaccttccagagcattgctggcctggaggagaacttccacaaggagatgagcaagctgaaccagaacctgaatgatgtgctggtgggcctggagaagcagcacggcagcaacaccttcaccgtgaaggcccagcccagcgacaatgccccagccaagggcaacaagagccccagccccccagatggcagccctgctgccaccccagagatccgggtgaaccacgagcctgagcctgctggaggagccacccctggggccaccctgcccaagagccccagccagcccacagagagccctgctggcagcctgcccagcggggagcccagcgctgctgagggcacctttgctgtgtcctggcccagccagacagctgagcccggccctgcccagcctgctgaggccagcgaggtggccggcggcacccagcctgctgctggggcccaggagcccggggagacagctgccagcgaggccgccagcagcagcctgcctgctgtggtggtggagaccttccctgccaccgtgaatggcaccgtggagggcggcagcggggccggccgcctggacctgcccccaggcttcatgttcaaggtgcaggcccagcacgactacacagccacagacacagatgagctgcagctgaaggctggagatgtggtgctggtgatccccttccagaaccctgaggagcaggatgagggctggctgatgggcgtgaaggagagtgactggaaccagcacaaggagctggagaagtgccggggcgtcttccctgagaacttcacagagcgggtgccctag

SEQ ID NO: 238751 - DNA, 1521 bp, Artificial Sequence
  derived and/or modified sequence
atggccgagatgggcagcaagggcgtgaccgccggcaagatcgcctccaatgtccagaagaagcttacacgggcccaggagaaggtgttacagaaactgggcaaggccgacgaaactaaagacgaacagttcgaacagtgtgtccagaattttaacaagcaactgactgagggtacaagattgcaaaaagacctgagaacctacctggccagcgtcaaagccatgcacgaagcctcaaagaagcttaatgaatgtttacaggaggtttatgagccagattggccaggcagggacgaggcaaataagatagcagagaataacgatctattgtggatggattatcatcagaagttggtcgaccaggccctgctcactatggatacttatctgggccagttcccggatattaaatcccggatcgccaagaggggaagaaagctggtggattacgattcagctaggcaccactatgagtctctgcagaccgctaagaagaaggacgaggccaaaatcgccaagcccgtgtccctcctcgagaaggctgcaccacaatggtgccaaggcaaattgcaggcccacttggtggctcaaacaaacttactccggaaccaggcagaagaagagttgatcaaggcacagaaggtgttcgaagagatgaatgtggatctgcaagaagagctacccagtctttggaactccagggtcggcttctatgtcaatacgttccagtctatcgccggactggaggaaaacttccacaaggaaatgtccaaactcaaccagaatctgaacgacgtgctggtcggtctggaaaagcagcatggttctaatacctttactgttaaggctcagcccagtgataatgctcccgccaaaggcaacaagagcccttcaccgccggacgggtctcccgcagctacacccgagattcgcgtaaaccatgagccagagccagctggtggggctacacccggggcgactcttcctaagtcccccagccaacctaccgagtcccccgccggtagtttgcccagcggggagccaagcgcggctgaaggtacctttgctgtgagttggcccagccaaactgccgagcccggaccggctcaaccagcggaggccagcgaggttgccgggggcactcagccggccgcgggagctcaagagcctggtgagacggcagctagcgaagcggctagcagcagcttgcccgccgttgtggttgaaacttttcctgcaaccgtgaacgggaccgtagagggtggttctggcgctggaagactggatctgcctcccggctttatgtttaaggtgcaggctcaacatgattatacagccacggataccgatgagttgcagcttaaagccggtgacgttgttctcgttatcccatttcagaatccagaagagcaagacgaaggatggctgatgggagtgaaggagtccgactggaaccagcataaggaattagagaagtgccgaggtgtgttccccgaaaacttcacggagagagtcccttag

SEQ ID NO: 238752 - DNA, 1521 bp, Artificial Sequence
  derived and/or modified sequence
atggccgaaatgggatccaagggtgtcaccgccggaaagatcgccagtaacgtgcagaaaaaactgaccagggcgcaggagaaagttctgcagaagttgggaaaggctgacgagaccaaggatgaacaattcgagcaatgcgtgcagaattttaacaagcaacttactgaagggactcgcctacagaaagatctccgtacttatctggcctccgtgaaagctatgcatgaagcttctaagaagttgaatgaatgcctgcaggaagtctatgagccagactggcctgggagggacgaagcgaacaagattgcggagaataatgatcttttgtggatggattaccaccaaaaactggtggatcaggctctcttgaccatggacacctacttgggccagttcccagacatcaaatccagaattgccaagaggggtcgcaagcttgtggactatgacagcgcacgtcaccattatgagtctctgcaaacggcgaagaagaaagacgaggctaagattgccaagccagtgtccctccttgagaaagccgctccacagtggtgccagggaaaactccaggcccatcttgtcgcccagaccaacttactcaggaaccaggctgaggaggaactgatcaaagcacagaaggtcttcgaagagatgaatgtcgatcttcaggaagaactcccctcactgtggaacagtcgggtgggcttttatgtgaatacctttcagagcattgctggcctggaagagaactttcacaaagaaatgtctaaactgaaccaaaatctcaacgacgttctggtaggactggagaaacagcacgggtccaatacgtttaccgttaaggctcaaccatctgacaatgcccctgctaaggggaacaagtcaccctccccgcctgacggcagcccagcagccacccctgaaatccgagtgaaccatgagccagaacccgctggcggagccaccccaggtgcaaccctgcccaaatcaccaagccaacccacggaatcaccagctgggagtttgcccagtggcgagccttcagctgcagaggggacattcgcagtgtcatggccaagccagacagctgagcccggtccagctcagccagctgaggcatctgaggtggccggaggtacacagccagccgctggggctcaagaacccggagagactgccgcaagcgaagctgcatcaagctctctcccagcggtcgttgttgaaactttcccggcaacggtgaacgggaccgtggagggcggatccggagccggacgactggatcttccgcctggattcatgttcaaagttcaggcccagcatgactatactgccaccgatacagacgagttgcagctgaaagctggggacgtggtcctggtgataccttttcagaatcccgaagaacaagacgaaggatggctcatgggagttaaagagagcgactggaaccagcataaggagctcgagaagtgtcgcggtgtttttccagaaaattttaccgaacgggtgccttag

SEQ ID NO: 238753 - DNA, 2365 bp, Artificial Sequence
  derived and/or modified sequence
cgcgcccctccctcctcgcggacctggcggtgccggcgcccggagtggccctttaaaaggcagcttattgtccggagggggcgggcggggggcgccgaccgcggcctgaggcccggcccctcccctctccctccctctgtccccgcgtcgctcgctggctagctcgctggctcgctcgcccgtccggcgcacgctccgcctccgtcagttggctccgctgtcgggtgcgcggcgtggagcggcagccggtctggacgcgcggccggggctgggggctgggagcgcggcgcgcaagatctccccgcgcgagagcggcccctgccaccgggcgaggcctgcgccgcgatggcagagatgggcagtaaaggggtgacggcgggaaagatcgccagcaacgtgcagaagaagctcacccgcgcgcaggagaaggttctccagaagctggggaaggcagatgagaccaaggatgagcagtttgagcagtgcgtccagaatttcaacaagcagctgacggagggcacccggctgcagaaggatctccggacctacctggcctccgtcaaagccatgcacgaggcttccaagaagctgaatgagtgtctgcaggaggtgtatgagcccgattggcccggcagggatgaggcaaacaagatcgcagagaacaacgacctgctgtggatggattaccaccagaagctggtggaccaggcgctgctgaccatggacacgtacctgggccagttccccgacatcaagtcacgcattgccaagcgggggcgcaagctggtggactacgacagtgcccggcaccactacgagtcccttcaaactgccaaaaagaaggatgaagccaaaattgccaagcctgtctcgctgcttgagaaagccgccccccagtggtgccaaggcaaactgcaggctcatctcgtagctcaaactaacctgctccgaaatcaggccgaggaggagctcatcaaagcccagaaggtgtttgaggagatgaatgtggatctgcaggaggagctgccgtccctgtggaacagccgcgtaggtttctacgtcaacacgttccagagcatcgcgggcctggaggaaaacttccacaaggagatgagcaagctcaaccagaacctcaatgatgtgctggtcggcctggagaagcaacacgggagcaacaccttcacggtcaaggcccagcccagtgacaacgcgcctgcaaaagggaacaagagcccttcgcctccagatggctcccctgccgccacccccgagatcagagtcaaccacgagccagagccggccggcggggccacgcccggggccaccctccccaagtccccatctcagcccacagagagtccagccggcagcctgccttccggggagcccagcgctgccgagggcacctttgctgtgtcctggcccagccagacggccgagccggggcctgcccaaccagcagaggcctcggaggtggcgggtgggacccaacctgcggctggagcccaggagccaggggagacggcggcaagtgaagcagcctccagctctcttcctgctgtcgtggtggagaccttcccagcaactgtgaatggcaccgtggagggcggcagtggggccgggcgcttggacctgcccccaggtttcatgttcaaggtacaggcccagcacgactacacggccactgacacagacgagctgcagctcaaggctggtgatgtggtgctggtgatccccttccagaaccctgaagagcaggatgaaggctggctcatgggcgtgaaggagagcgactggaaccagcacaaggagctggagaagtgccgtggcgtcttccccgagaacttcactgagagggtcccatgacggcggggcccaggcagcctccgggcgtgtgaagaacacctcctcccgaaaaatgtgtggttcttttttttgttttgttttcgtttttcatcttttgaagagcaaagggaaatcaagaggagacccccaggcagaggggcgttctcccaaagattaggtcgttttccaaagagccgcgtcccggcaagtccggcggaattcaccagtgttcctgaagctgctgtgtcctctagttgagtttctggcgcccctgcctgtgcccgcatgtgtgcctggccgcagggcggggctgggggctgccgagccaccatgcttgcctgaagcttcggccgcgccacccgggcaagggtcctcttttcctggcagctgctgtgggtggggcccagacaccagcctagcctggctctgccccgcagacggtctgtgtgctgtttgaaaataaatcttagtgttcaaaacaaaatgaaacaaaaaaaaaatgataaaaactctcagaaaa

SEQ ID NO: 238754 - DNA, 1521 bp, Artificial Sequence
  derived and/or modified sequence
atggccgagatgggcagcaagggcgtgaccgccggcaagatcgccagcaacgtgcagaagaagctgaccagagcccaggagaaggtgctgcagaagctgggcaaggccgacgagaccaaggacgagcagttcgagcagtgcgtgcagaacttcaacaagcagctgaccgagggcaccagactgcagaaggacctgagaacctacctggccagcgtgaaggccatgcacgaggccagcaagaagctgaacgagtgcctgcaggaggtgtacgagcccgactggcccggcagagacgaggccaacaagatcgccgagaacaacgacctgctgtggatggactaccaccagaagctggtggaccaggccctgctgaccatggacacctacctgggccagttccccgacatcaagagcagaatcgccaagagaggcagaaagctggtggactacgacagcgccagacaccactacgagagcctgcagaccgccaagaagaaggacgaggccaagatcgccaagcccgtgagcctgctggagaaggccgccccccagtggtgccagggcaagctgcaggcccacctggtggcccagaccaacctgctgagaaaccaggccgaggaggagctgatcaaggcccagaaggtgttcgaggagatgaacgtggacctgcaggaggagctgcccagcctgtggaacagcagagtgggcttctacgtgaacaccttccagagcatcgccggcctggaggagaacttccacaaggagatgagcaagctgaaccagaacctgaacgacgtgctggtgggcctggagaagcagcacggcagcaacaccttcaccgtgaaggcccagcccagcgacaacgcccccgccaagggcaacaagagccccagcccccccgacggcagccccgccgccacccccgagatcagagtgaaccacgagcccgagcccgccggcggcgccacccccggcgccaccctgcccaagagccccagccagcccaccgagagccccgccggcagcctgcccagcggcgagcccagcgccgccgagggcaccttcgccgtgagctggcccagccagaccgccgagcccggccccgcccagcccgccgaggccagcgaggtggccggcggcacccagcccgccgccggcgcccaggagcccggcgagaccgccgccagcgaggccgccagcagcagcctgcccgccgtggtggtggagaccttccccgccaccgtgaacggcaccgtggagggcggcagcggcgccggcagactggacctgccccccggcttcatgttcaaggtgcaggcccagcacgactacaccgccaccgacaccgacgagctgcagctgaaggccggcgacgtggtgctggtgatccccttccagaaccccgaggagcaggacgagggctggctgatgggcgtgaaggagagcgactggaaccagcacaaggagctggagaagtgcagaggcgtgttccccgagaacttcaccgagagagtgccctag

SEQ ID NO: 238755 - protein, 497 aa, Artificial Sequence
  derived and/or modified sequence
MAEMGSKGVTAGKIASNVQKKLTRAQEKVLQKLGKADETKDEQFEQCVQNFNKQLTEGTRLQKDLRTYLASVKAMHEASKKLNECLQEVYEPDWPGRDEANKIAENNDLLWMDYHQKLVDQALLTMDTYLGQFPDIKSRIAKRGRKLVDYDSARHHYESLQTAKKKDEAKIAKAEEELIKAQKVFEEMNVDLQEELPSLWNSRVGFYVNTFQSIAGLEENFHKEMSKLNQNLNDVLVGLEKQHGSNTFTVKAQPRKKSKLFSRLRRKKNSDNAPAKGNKSPSPPDGSPAATPEIRVNHEPEPAGGATPGATLPKSPSQLRKGPPVPPPPKHTPSKEVKQEQILSLFEDTFVPEISVTTPSQPAEASEVAGGTQPAAGAQEPGETAASEAASSSLPAVVVETFPATVNGTVEGGSGAGRLDLPPGFMFKVQAQHDYTATDTDELQLKAGDVVLVIPFQNPEEQDEGWLMGVKESDWNQHKELEKCRGVFPENFTERVP

SEQ ID NO: 238756 - DNA, 1494 bp, Artificial Sequence
  derived and/or modified sequence
atggcggaaatgggaagcaagggcgtcaccgccggcaaaatagcctcaaacgtgcagaagaagctgacacgggctcaggaaaaggtgctccagaagcttggtaaggctgacgagaccaaggacgagcagttcgagcagtgcgtccaaaactttaataagcaactgacagaggggactaggctgcaaaaggacctgcgaacctatctagcatcagtgaaggccatgcacgaggcttccaagaaacttaatgagtgtttacaggaggtctacgaacctgactggccgggccgcgacgaagccaataaaattgccgagaataacgacttgttgtggatggactaccaccagaaactggtggatcaagcactgctgacgatggacacgtaccttgggcagtttcctgatataaagtcccgtatcgcaaaacggggacgtaagctggtagattacgactctgcccggcatcactacgagagcttgcaaacggctaaaaagaaggatgaggccaaaattgccaaagccgaggaagagttaattaaagcgcagaaagtatttgaagaaatgaatgtggacctgcaagaggagctgccatctttgtggaacagtcgcgtcgggttctatgttaacacatttcagtcgatcgcgggacttgaggaaaatttccacaaggagatgtctaagcttaaccagaacctaaacgacgtcctggttgggctagagaagcagcatggcagtaatacattcactgtcaaggcacagcccagaaaaaaaagcaaactattctcccgacttcggaggaagaaaaactcggataacgccccagcaaaggggaacaaatctccttcaccaccagatgggtcacccgcggccacacctgagataagggtgaatcacgaacccgagcccgctggaggcgctaccccaggagccacccttccgaagtccccatctcaactccgtaaaggacctccagttcctcccccaccgaagcatactccctccaaggaggtaaaacaagaacagatactgtccctctttgaggatacgtttgtgcccgaaatctccgtcactaccccatctcaaccagctgaggcttccgaagtcgcggggggcacacagccagctgccggggcccaggagcctggcgagactgccgcgtcagaagctgcctcttcgtcactcccagcggtggtcgtagagacattccccgctaccgtcaatggcaccgttgaagggggctctggcgctggccggctggacttgcccccagggtttatgttcaaggttcaggctcaacacgactatacagctaccgacacagatgagctgcaattgaaggccggcgacgtggttctcgtcatcccgtttcaaaaccctgaggagcaggatgagggctggctgatgggggtcaaagaatccgactggaatcaacacaaggaactcgagaaatgtaggggagtgttcccagaaaactttaccgagcgcgtgccttag

SEQ ID NO: 238757 - DNA, 1494 bp, Artificial Sequence
  derived and/or modified sequence
atggccgagatgggcagcaaaggagtgacagctgggaagatcgccagcaatgtgcagaagaagctgacccgggcccaggagaaggtgctgcagaagctgggcaaggcagatgagaccaaggatgagcagtttgagcagtgtgtgcagaacttcaacaagcagctgacagagggcacccggctgcagaaggacctgcggacctacctggcctctgtgaaggccatgcatgaggccagcaagaagctgaatgaatgtctgcaggaggtgtatgagccagactggccaggaagagatgaggccaacaagattgctgaaaataatgacctgctgtggatggactaccaccagaagctggtggaccaggccctgctgaccatggacacctacctgggccagttcccagacatcaagagccgcatcgccaagaggggcaggaagctggtggactatgacagcgcccggcaccactatgagagcctgcagacagccaagaagaaggatgaggccaagatcgccaaggccgaggaggagctgatcaaggcccagaaggtgtttgaggagatgaatgtggacctgcaggaggagctgcccagcctgtggaacagccgggtgggcttctacgtgaacaccttccagagcattgctggcctggaggagaacttccacaaggagatgagcaagctgaaccagaacctgaatgatgtgctggtgggcctggagaagcagcacggcagcaacaccttcaccgtgaaggcccagcccaggaagaagagcaagctgttcagccggctgcggaggaagaagaacagcgacaatgccccagccaagggcaacaagagccccagccccccagatggcagccctgctgccaccccagagatccgggtgaaccacgagcctgagcctgctggaggagccacccctggggccaccctgcccaagagccccagccagctgaggaaaggacctcctgtgcccccaccacccaagcacacccccagcaaggaggtgaagcaggagcagatcctgagcctgtttgaggacacctttgtgcctgagatctctgtgaccacccccagccagcctgctgaggccagcgaggtggccggcggcacccagcctgctgctggggcccaggagcctggagaaacagctgccagcgaggccgccagcagcagcctgcctgctgtggtggtggagaccttccctgccaccgtgaatggaacagtggagggcggcagcggggccggccgcctggacctgcccccaggcttcatgttcaaggtgcaggcccagcacgactacacagccacagacacagatgagctgcagctgaaggctggagatgtggtgctggtgatccccttccagaaccctgaggagcaggatgagggctggctgatgggcgtgaaggagagtgactggaaccagcacaaggagctggagaagtgccggggcgtcttccctgagaacttcacagagcgggtgccctag

SEQ ID NO: 238758 - DNA, 1494 bp, Artificial Sequence
  derived and/or modified sequence
atggccgagatgggcagcaagggcgtgaccgccggcaagatcgcctctaatgtgcagaaaaagctgacacgtgctcaggagaaagtcctccaaaaactgggaaaagccgacgagacgaaagatgagcaattcgagcaatgtgttcagaacttcaataaacagctgaccgagggcacccgccttcaaaaagatcttaggacctaccttgcatctgtgaaagccatgcatgaagcgtcaaagaagttgaatgaatgtcttcaggaagtttacgaacccgactggccagggagggacgaggcaaacaaaatcgccgaaaacaacgacttgttgtggatggattatcatcagaagctcgtcgaccaggcattactgacaatggatacatatcttggtcagtttcctgacatcaagtcaagaatcgccaagcgcggccggaagctcgtcgattatgattctgcacgacatcactacgaaagccttcagactgctaagaagaaggacgaggccaagatcgcaaaggccgaggaggaactgatcaaggcccagaaggtgtttgaggagatgaacgtggacctgcaagaggaactcccttctctctggaactcacgggtaggattttatgtgaacacatttcagagtattgctggcctggaagagaactttcacaaggagatgagcaaacttaaccagaatctcaatgacgtgttagtgggcttagagaagcagcatggctctaataccttcaccgtcaaggcgcagccgcgtaagaagagcaaactctttagccgcctccgaagaaagaagaactccgacaacgctccagctaaaggaaacaagtccccttcccctccagatggaagcccggccgcgactccagagatccgtgtgaaccacgaaccagagcctgcgggaggtgccacacctggagctactctcccgaaaagtcccagtcagctgagaaaagggccccccgttcctcctccaccaaaacatactccaagcaaggaggtcaaacaggagcagatcctgtcactgtttgaggacactttcgtacctgagatctcagttacaacgccaagccaaccggctgaagccagtgaggtggcaggaggcacacaaccagcggctggggcccaggaacccggagaaactgcagcaagtgaagccgcctccagctctcttccagcggttgtggtcgagaccttccccgccactgtgaatggtaccgttgagggcggatccggggctggaagacttgatctcccaccgggattcatgttcaaggttcaggcgcagcacgattataccgccactgataccgatgagcttcagctgaaggcgggcgatgtcgtgttggttattcccttccaaaacccagaggaacaggatgaaggctggctgatgggcgtcaaagagagtgactggaatcagcacaaggagcttgaaaagtgccgcggtgtgtttccggaaaatttcaccgagagggtgccatag

SEQ ID NO: 238759 - DNA, 1494 bp, Artificial Sequence
  derived and/or modified sequence
atggccgagatgggctcgaagggcgttaccgcaggaaaaatcgcgtcaaacgttcagaagaaactgactagagcacaagagaaagtcctacagaagcttggcaaagccgacgaaacaaaggacgagcagtttgaacaatgtgttcagaacttcaacaaacagctcaccgaaggaaccaggctacaaaaggacctcaggacatatttagccagcgttaaagcaatgcacgaggccagcaaaaaattgaacgagtgcctgcaggaagtgtatgaacccgactggcctggccgtgatgaagccaataagatcgcggaaaataatgatttgctgtggatggattatcatcagaaattggtggaccaggccctactgacgatggacacttacttgggacagtttcccgacattaagtctcgcatcgcaaaacgaggaagaaaactagtggattacgattccgctcggcatcactacgaaagcctgcagaccgccaagaagaaggatgaggccaaaatagcgaaagcggaagaagaactcatcaaggctcagaaggtatttgaggagatgaacgtggacctccaggaagagcttcccagcctgtggaattcacgcgtgggcttctacgtcaacacttttcagtcgatcgctggactggaggagaactttcataaagaaatgtctaaactgaaccagaatctcaatgatgtgctggttgggctcgagaaacagcatggctcaaatacattcaccgtaaaggcgcagcccaggaagaaaagcaagctgttctcccgcctgcgtagaaagaagaattcagataacgctcccgcaaaagggaataagtctcccagccctcccgatgggtccccagcagctaccccagagatccgcgtgaatcatgagcctgagcctgccggtggcgctacacctggcgcaaccctccccaagtcaccgagtcagctccggaagggacccccagtgccccctcccccaaaacacacaccaagcaaggaggtgaaacaggagcaaatcttaagcctgtttgaggacactttcgtccccgagatcagtgtgactacaccctcacagcccgctgaagccagtgaggtggccggtggtactcagcctgccgctggagcacaggagcctggtgagacggccgcatcggaagctgccagcagcagcctgcctgccgtggttgtcgaaaccttccccgctactgttaacgggaccgtggagggcggtagtggggctgggaggctggatcttccccctggcttcatgtttaaagtacaggctcagcacgactataccgcaactgacacggatgagttacagctgaaagcaggagacgtggtgctagttatcccctttcaaaaccccgaggagcaagacgagggttggctcatgggcgtgaaggagtccgactggaaccagcataaagaactagaaaagtgcaggggggtatttcccgagaatttcactgagcgggtgccctag

SEQ ID NO: 238760 - DNA, 2338 bp, Artificial Sequence
  derived and/or modified sequence
cgcgcccctccctcctcgcggacctggcggtgccggcgcccggagtggccctttaaaaggcagcttattgtccggagggggcgggcggggggcgccgaccgcggcctgaggcccggcccctcccctctccctccctctgtccccgcgtcgctcgctggctagctcgctggctcgctcgcccgtccggcgcacgctccgcctccgtcagttggctccgctgtcgggtgcgcggcgtggagcggcagccggtctggacgcgcggccggggctgggggctgggagcgcggcgcgcaagatctccccgcgcgagagcggcccctgccaccgggcgaggcctgcgccgcgatggcagagatgggcagtaaaggggtgacggcgggaaagatcgccagcaacgtgcagaagaagctcacccgcgcgcaggagaaggttctccagaagctggggaaggcagatgagaccaaggatgagcagtttgagcagtgcgtccagaatttcaacaagcagctgacggagggcacccggctgcagaaggatctccggacctacctggcctccgtcaaagccatgcacgaggcttccaagaagctgaatgagtgtctgcaggaggtgtatgagcccgattggcccggcagggatgaggcaaacaagatcgcagagaacaacgacctgctgtggatggattaccaccagaagctggtggaccaggcgctgctgaccatggacacgtacctgggccagttccccgacatcaagtcacgcattgccaagcgggggcgcaagctggtggactacgacagtgcccggcaccactacgagtcccttcaaactgccaaaaagaaggatgaagccaaaattgccaaggccgaggaggagctcatcaaagcccagaaggtgtttgaggagatgaatgtggatctgcaggaggagctgccgtccctgtggaacagccgcgtaggtttctacgtcaacacgttccagagcatcgcgggcctggaggaaaacttccacaaggagatgagcaagctcaaccagaacctcaatgatgtgctggtcggcctggagaagcaacacgggagcaacaccttcacggtcaaggcccagcccagaaagaaaagtaaactgttttcgcggctgcgcagaaagaagaacagtgacaacgcgcctgcaaaagggaacaagagcccttcgcctccagatggctcccctgccgccacccccgagatcagagtcaaccacgagccagagccggccggcggggccacgcccggggccaccctccccaagtccccatctcagctccggaaaggcccaccagtccctccgcctcccaaacacaccccgtccaaggaagtcaagcaggagcagatcctcagcctgtttgaggacacgtttgtccctgagatcagcgtgaccaccccctcccagccagcagaggcctcggaggtggcgggtgggacccaacctgcggctggagcccaggagccaggggagacggcggcaagtgaagcagcctccagctctcttcctgctgtcgtggtggagaccttcccagcaactgtgaatggcaccgtggagggcggcagtggggccgggcgcttggacctgcccccaggtttcatgttcaaggtacaggcccagcacgactacacggccactgacacagacgagctgcagctcaaggctggtgatgtggtgctggtgatccccttccagaaccctgaagagcaggatgaaggctggctcatgggcgtgaaggagagcgactggaaccagcacaaggagctggagaagtgccgtggcgtcttccccgagaacttcactgagagggtcccatgacggcggggcccaggcagcctccgggcgtgtgaagaacacctcctcccgaaaaatgtgtggttcttttttttgttttgttttcgtttttcatcttttgaagagcaaagggaaatcaagaggagacccccaggcagaggggcgttctcccaaagattaggtcgttttccaaagagccgcgtcccggcaagtccggcggaattcaccagtgttcctgaagctgctgtgtcctctagttgagtttctggcgcccctgcctgtgcccgcatgtgtgcctggccgcagggcggggctgggggctgccgagccaccatgcttgcctgaagcttcggccgcgccacccgggcaagggtcctcttttcctggcagctgctgtgggtggggcccagacaccagcctagcctggctctgccccgcagacggtctgtgtgctgtttgaaaataaatcttagtgttcaaaacaaaatgaaacaaaaaaaaaatgataaaaactctcagaaaa

SEQ ID NO: 238761 - DNA, 1494 bp, Artificial Sequence
  derived and/or modified sequence
atggccgagatgggcagcaagggcgtgaccgccggcaagatcgccagcaacgtgcagaagaagctgaccagagcccaggagaaggtgctgcagaagctgggcaaggccgacgagaccaaggacgagcagttcgagcagtgcgtgcagaacttcaacaagcagctgaccgagggcaccagactgcagaaggacctgagaacctacctggccagcgtgaaggccatgcacgaggccagcaagaagctgaacgagtgcctgcaggaggtgtacgagcccgactggcccggcagagacgaggccaacaagatcgccgagaacaacgacctgctgtggatggactaccaccagaagctggtggaccaggccctgctgaccatggacacctacctgggccagttccccgacatcaagagcagaatcgccaagagaggcagaaagctggtggactacgacagcgccagacaccactacgagagcctgcagaccgccaagaagaaggacgaggccaagatcgccaaggccgaggaggagctgatcaaggcccagaaggtgttcgaggagatgaacgtggacctgcaggaggagctgcccagcctgtggaacagcagagtgggcttctacgtgaacaccttccagagcatcgccggcctggaggagaacttccacaaggagatgagcaagctgaaccagaacctgaacgacgtgctggtgggcctggagaagcagcacggcagcaacaccttcaccgtgaaggcccagcccagaaagaagagcaagctgttcagcagactgagaagaaagaagaacagcgacaacgcccccgccaagggcaacaagagccccagcccccccgacggcagccccgccgccacccccgagatcagagtgaaccacgagcccgagcccgccggcggcgccacccccggcgccaccctgcccaagagccccagccagctgagaaagggcccccccgtgccccccccccccaagcacacccccagcaaggaggtgaagcaggagcagatcctgagcctgttcgaggacaccttcgtgcccgagatcagcgtgaccacccccagccagcccgccgaggccagcgaggtggccggcggcacccagcccgccgccggcgcccaggagcccggcgagaccgccgccagcgaggccgccagcagcagcctgcccgccgtggtggtggagaccttccccgccaccgtgaacggcaccgtggagggcggcagcggcgccggcagactggacctgccccccggcttcatgttcaaggtgcaggcccagcacgactacaccgccaccgacaccgacgagctgcagctgaaggccggcgacgtggtgctggtgatccccttccagaaccccgaggagcaggacgagggctggctgatgggcgtgaaggagagcgactggaaccagcacaaggagctggagaagtgcagaggcgtgttccccgagaacttcaccgagagagtgccctag

SEQ ID NO: 238762 - protein, 518 aa, Artificial Sequence
  derived and/or modified sequence
MAEMGSKGVTAGKIASNVQKKLTRAQEKVLQKLGKADETKDEQFEQCVQNFNKQLTEGTRLQKDLRTYLASVKAMHEASKKLNECLQEVYEPDWPGRDEANKIAENNDLLWMDYHQKLVDQALLTMDTYLGQFPDIKSRIAKRGRKLVDYDSARHHYESLQTAKKKDEAKIAKAEEELIKAQKVFEEMNVDLQEELPSLWNSRVGFYVNTFQSIAGLEENFHKEMSKLNQNLNDVLVGLEKQHGSNTFTVKAQPSDNAPAKGNKSPSPPDGSPAATPEIRVNHEPEPAGGATPGATLPKSPSQLRKGPPVPPPPKHTPSKEVKQEQILSLFEDTFVPEISVTTPSQPTESPAGSLPSGEPSAAEGTFAVSWPSQTAEPGPAQPAEASEVAGGTQPAAGAQEPGETAASEAASSSLPAVVVETFPATVNGTVEGGSGAGRLDLPPGFMFKVQAQHDYTATDTDELQLKAGDVVLVIPFQNPEEQDEGWLMGVKESDWNQHKELEKCRGVFPENFTERVP

SEQ ID NO: 238763 - DNA, 1557 bp, Artificial Sequence
  derived and/or modified sequence
atggccgagatgggctccaagggtgtcaccgctggcaagatagcatctaatgtgcagaaaaaactgactcgagctcaggagaaggtcctgcagaagctggggaaagctgacgagaccaaggacgaacagttcgagcaatgcgtacagaatttcaataaacagctgactgaaggaacacgcctacagaaagatcttaggacctacttggccagcgtgaaagccatgcacgaggcatccaagaaattaaacgaatgtttgcaggaagtgtatgaaccagattggccagggcgggacgaagccaacaaaattgccgagaacaacgacttactctggatggattaccatcagaaacttgtagaccaagctctgctgacgatggacacgtacctcgggcagttccccgacatcaaatcgcggattgcgaagcggggacgaaagctggttgactatgattcggcgcggcatcactacgaatctttacagactgccaagaagaaggatgaagccaagatcgccaaggccgaagaggagctgattaaagctcaaaaggtgttcgaagagatgaatgtggacctccaagaggaactgccatctctatggaatagtcgagtcgggttctatgttaacaccttccagagcatcgctgggctggaagaaaatttccacaaggagatgtcaaaattgaatcagaatctgaacgatgtgctcgtgggtctagaaaagcagcatggttcaaacacgttcactgtaaaggcccaacctagtgacaacgcacccgcaaaaggaaacaaaagtccctccccgcccgacggcagtcctgcagccactcccgaaattagagtgaaccatgaacccgaaccagcaggaggggcgacacccggagctaccttgccaaagtcccccagtcagctgcggaaaggcccacctgtgccaccccctcctaaacacacacctagcaaggaagtgaagcaggaacagatcctgagcttgttcgaagataccttcgttcccgaaatctctgtgacaactcctagccagccgaccgagagccctgcaggtagtctgccctcaggcgagccatccgcagcggaaggcacttttgccgtgtcgtggccatcacagacggccgaaccgggcccagcacagcccgcagaagcaagcgaggttgccgggggtacacagcctgccgcgggggcccaggaacctggtgagaccgctgcctcggaggccgcctctagctccctgcctgcagtggtggtggagactttccctgccaccgtcaatggtacggtcgaaggtggatctggcgcgggaaggctcgatttgccaccaggatttatgttcaaggtgcaggcccagcacgactatacagccaccgacactgatgagctccagctgaaagccggggacgtcgtcctggttataccgtttcaaaatccagaagaacaggatgaaggatggctcatgggggttaaggaatccgactggaatcagcacaaagagctggagaagtgtaggggggttttccccgagaacttcactgaaagagtgccctag

SEQ ID NO: 238764 - DNA, 1557 bp, Artificial Sequence
  derived and/or modified sequence
atggccgagatgggcagcaaaggagtgacagctgggaagatcgccagcaatgtgcagaagaagctgacccgggcccaggagaaggtgctgcagaagctgggcaaggcagatgagaccaaggatgagcagtttgagcagtgtgtgcagaacttcaacaagcagctgacagagggcacccggctgcagaaggacctgcggacctacctggcctctgtgaaggccatgcatgaggccagcaagaagctgaatgaatgtctgcaggaggtgtatgagccagactggccaggaagagatgaggccaacaagattgctgaaaataatgacctgctgtggatggactaccaccagaagctggtggaccaggccctgctgaccatggacacctacctgggccagttcccagacatcaagagccgcatcgccaagaggggcaggaagctggtggactatgacagcgcccggcaccactatgagagcctgcagacagccaagaagaaggatgaggccaagatcgccaaggccgaggaggagctgatcaaggcccagaaggtgtttgaggagatgaatgtggacctgcaggaggagctgcccagcctgtggaacagccgggtgggcttctacgtgaacaccttccagagcattgctggcctggaggagaacttccacaaggagatgagcaagctgaaccagaacctgaatgatgtgctggtgggcctggagaagcagcacggcagcaacaccttcaccgtgaaggcccagcccagcgacaatgccccagccaagggcaacaagagccccagccccccagatggcagccctgctgccaccccagagatccgggtgaaccacgagcctgagcctgctgggggcgccacccctggggccaccctgcccaagagccccagccagctgaggaagggcccccctgtgcccccaccacccaagcacacccccagcaaggaggtgaagcaggagcagatcctgagcctgtttgaggacacctttgtgcctgagatctctgtgaccacccccagccagcccacagagagccctgctggcagcctgcccagcggggagcccagcgctgctgagggcacctttgctgtgtcctggcccagccagacagctgagcccggccctgcccagcctgctgaggccagcgaggtggccggcggcacccagcctgctgctggggcccaggagcccggggagacagctgccagcgaggccgccagcagcagcctgcctgctgtggtggtggagaccttccctgccaccgtgaatggcaccgtggagggcggcagcggggccggccgcctggacctgcccccaggcttcatgttcaaggtgcaggcccagcacgactacacagccacagacacagatgagctgcagctgaaggctggagatgtggtgctggtgatccccttccagaaccctgaggagcaggatgagggctggctgatgggcgtgaaggagagtgactggaaccagcacaaggagctggagaagtgccggggcgtcttccctgagaacttcacagagcgggtgccctag

SEQ ID NO: 238765 - DNA, 1557 bp, Artificial Sequence
  derived and/or modified sequence
atggccgagatgggcagcaagggcgtgaccgccggcaagatcgccagcaacgtacagaaaaaactaacccgcgcccaggagaaggtgctgcaaaagctcggcaaggctgatgagacaaaagatgaacaattcgaacaatgcgtccagaatttcaacaaacagctgactgaggggaccaggctgcagaaagacctcaggacgtatctggcaagtgtgaaagctatgcatgaggcttccaaaaagcttaatgaatgtttgcaggaagtctacgaacctgattggccgggccgcgatgaagccaataagatcgcagaaaacaatgacttgctgtggatggactatcatcaaaagctcgtggaccaggctctgttgactatggatacctatctggggcaatttcctgatatcaagtctaggattgcgaagcgggggaggaaactagtggactacgacagcgccaggcaccattacgagagccttcagactgcaaaaaaaaaagatgaggcaaagatcgctaaagctgaggaggagctaattaaagctcagaaagtcttcgaggaaatgaacgtggatttacaggaggaattgccctccttatggaacagcagggtggggttctacgtgaacacgtttcagtcaatcgctgggctggaggagaactttcataaggagatgtcaaaactgaatcagaatttgaatgacgtgctagttggattggagaaacagcacgggagcaacacctttacggttaaggcgcagccttctgacaatgcccccgctaaagggaataagtctcccagtcccccggacggctctcccgctgctaccccagaaattagagtgaaccacgaaccagaacccgccgggggggccaccccaggggctaccctgcccaaaagtccctctcagctgagaaagggacctcccgtacctcctcctcctaagcacactccctctaaggaagtgaagcaggagcagattcttagcctgttcgaagacacattcgtgcccgagatttcggttaccaccccatcccagccaaccgagagccccgctggcagcctgccgtcaggagaaccaagcgccgccgagggaacatttgcagtctcatggccctctcagaccgcggaaccagggccggcgcagcccgccgaagctagcgaggttgcaggggggacccaaccggctgcaggagcccaggagcccggcgagaccgccgctagtgaagccgcttccagctcgttgccagccgtcgtggttgaaacattccctgccactgtgaacggaacagtggaaggcggctctggcgccggaaggttagacctgccaccaggcttcatgtttaaggtgcaggcacagcatgactataccgcaactgacaccgacgagttgcagctgaaggcaggggacgtggtcctagtaattccattccagaaccctgaggagcaagatgagggttggttgatgggcgtgaaggagagcgattggaaccagcataaggagctggaaaaatgtaggggcgtctttcctgagaatttcactgaaagggtgccgtag

SEQ ID NO: 238766 - DNA, 1557 bp, Artificial Sequence
  derived and/or modified sequence
atggccgaaatggggtccaaaggcgtgacagcaggcaagattgccagtaatgtgcaaaaaaagctgactagggcacaggagaaagtactgcaaaagctgggcaaagccgatgaaaccaaagacgagcagttcgagcagtgcgttcaaaacttcaacaagcagctgaccgagggaaccaggctccagaaggatcttcgtacataccttgcctccgtgaaggccatgcacgaggctagcaaaaaactcaatgaatgtctgcaggaggtctacgagcctgactggcctgggcgtgatgaagccaataagattgctgagaataacgaccttctgtggatggactaccaccagaaattggtcgatcaggccttacttacaatggacacttatctcggacagtttcccgatatcaaaagtcgcatcgccaagagaggcagaaagctggtcgattatgattctgctaggcaccattatgaaagtctgcagacagcgaagaagaaggatgaagctaaaattgctaaagcagaggaagaacttatcaaagcccagaaagtcttcgaggaaatgaatgtggatctgcaggaggagttgccctctttatggaattccagggttggattctacgtcaacaccttccagtctatcgctggactggaggagaactttcataaagagatgagcaaactgaatcagaacctcaacgatgtgctggtcggccttgaaaaacagcacggaagcaacacctttaccgttaaagcccagccatccgacaatgctcccgctaagggtaacaagtccccctccccccctgacggaagtcctgctgcaacaccagagatccgcgtgaatcatgaaccagagcctgcagggggagccacacctggagcaaccttaccaaaaagcccctctcagctgcggaaggggcctcctgttcctccaccacctaagcatacccctagcaaggaggttaagcaggagcaaattttgagcctgtttgaggatacgtttgtgcctgagatatctgttaccaccccatcacagcccacggaatcaccagcagggtctctcccctcaggggaaccttcggcagcagagggaacctttgccgtatcctggccctctcagacagctgaacctgggccagcccagcccgcagaggccagcgaggtcgccggtggaactcagcctgctgcaggggctcaggagcccggagagactgccgcatctgaagctgcctcatccagtcttcccgcagtcgtagtggagaccttccctgctacagtcaacggaaccgtggaaggcggatccggcgctggtagactggaccttccccctggctttatgtttaaggtccaggcacaacatgactacacagccactgacaccgacgaactccagctgaaggcaggcgatgtggtgttagtgattcctttccaaaacccagaggaacaagacgaaggctggctgatgggcgtcaaggagagtgactggaaccagcacaaggagctggaaaagtgcagaggagtcttccccgagaacttcaccgagcgggtgccttag

SEQ ID NO: 238767 - DNA, 2401 bp, Artificial Sequence
  derived and/or modified sequence
cgcgcccctccctcctcgcggacctggcggtgccggcgcccggagtggccctttaaaaggcagcttattgtccggagggggcgggcggggggcgccgaccgcggcctgaggcccggcccctcccctctccctccctctgtccccgcgtcgctcgctggctagctcgctggctcgctcgcccgtccggcgcacgctccgcctccgtcagttggctccgctgtcgggtgcgcggcgtggagcggcagccggtctggacgcgcggccggggctgggggctgggagcgcggcgcgcaagatctccccgcgcgagagcggcccctgccaccgggcgaggcctgcgccgcgatggcagagatgggcagtaaaggggtgacggcgggaaagatcgccagcaacgtgcagaagaagctcacccgcgcgcaggagaaggttctccagaagctggggaaggcagatgagaccaaggatgagcagtttgagcagtgcgtccagaatttcaacaagcagctgacggagggcacccggctgcagaaggatctccggacctacctggcctccgtcaaagccatgcacgaggcttccaagaagctgaatgagtgtctgcaggaggtgtatgagcccgattggcccggcagggatgaggcaaacaagatcgcagagaacaacgacctgctgtggatggattaccaccagaagctggtggaccaggcgctgctgaccatggacacgtacctgggccagttccccgacatcaagtcacgcattgccaagcgggggcgcaagctggtggactacgacagtgcccggcaccactacgagtcccttcaaactgccaaaaagaaggatgaagccaaaattgccaaggccgaggaggagctcatcaaagcccagaaggtgtttgaggagatgaatgtggatctgcaggaggagctgccgtccctgtggaacagccgcgtaggtttctacgtcaacacgttccagagcatcgcgggcctggaggaaaacttccacaaggagatgagcaagctcaaccagaacctcaatgatgtgctggtcggcctggagaagcaacacgggagcaacaccttcacggtcaaggcccagcccagtgacaacgcgcctgcaaaagggaacaagagcccttcgcctccagatggctcccctgccgccacccccgagatcagagtcaaccacgagccagagccggccggcggggccacgcccggggccaccctccccaagtccccatctcagctccggaaaggcccaccagtccctccgcctcccaaacacaccccgtccaaggaagtcaagcaggagcagatcctcagcctgtttgaggacacgtttgtccctgagatcagcgtgaccaccccctcccagcccacagagagtccagccggcagcctgccttccggggagcccagcgctgccgagggcacctttgctgtgtcctggcccagccagacggccgagccggggcctgcccaaccagcagaggcctcggaggtggcgggtgggacccaacctgcggctggagcccaggagccaggggagacggcggcaagtgaagcagcctccagctctcttcctgctgtcgtggtggagaccttcccagcaactgtgaatggcaccgtggagggcggcagtggggccgggcgcttggacctgcccccaggtttcatgttcaaggtacaggcccagcacgactacacggccactgacacagacgagctgcagctcaaggctggtgatgtggtgctggtgatccccttccagaaccctgaagagcaggatgaaggctggctcatgggcgtgaaggagagcgactggaaccagcacaaggagctggagaagtgccgtggcgtcttccccgagaacttcactgagagggtcccatgacggcggggcccaggcagcctccgggcgtgtgaagaacacctcctcccgaaaaatgtgtggttcttttttttgttttgttttcgtttttcatcttttgaagagcaaagggaaatcaagaggagacccccaggcagaggggcgttctcccaaagattaggtcgttttccaaagagccgcgtcccggcaagtccggcggaattcaccagtgttcctgaagctgctgtgtcctctagttgagtttctggcgcccctgcctgtgcccgcatgtgtgcctggccgcagggcggggctgggggctgccgagccaccatgcttgcctgaagcttcggccgcgccacccgggcaagggtcctcttttcctggcagctgctgtgggtggggcccagacaccagcctagcctggctctgccccgcagacggtctgtgtgctgtttgaaaataaatcttagtgttcaaaacaaaatgaaacaaaaaaaaaatgataaaaactctcagaaaa

SEQ ID NO: 238768 - DNA, 1557 bp, Artificial Sequence
  derived and/or modified sequence
atggccgagatgggcagcaagggcgtgaccgccggcaagatcgccagcaacgtgcagaagaagctgaccagagcccaggagaaggtgctgcagaagctgggcaaggccgacgagaccaaggacgagcagttcgagcagtgcgtgcagaacttcaacaagcagctgaccgagggcaccagactgcagaaggacctgagaacctacctggccagcgtgaaggccatgcacgaggccagcaagaagctgaacgagtgcctgcaggaggtgtacgagcccgactggcccggcagagacgaggccaacaagatcgccgagaacaacgacctgctgtggatggactaccaccagaagctggtggaccaggccctgctgaccatggacacctacctgggccagttccccgacatcaagagcagaatcgccaagagaggcagaaagctggtggactacgacagcgccagacaccactacgagagcctgcagaccgccaagaagaaggacgaggccaagatcgccaaggccgaggaggagctgatcaaggcccagaaggtgttcgaggagatgaacgtggacctgcaggaggagctgcccagcctgtggaacagcagagtgggcttctacgtgaacaccttccagagcatcgccggcctggaggagaacttccacaaggagatgagcaagctgaaccagaacctgaacgacgtgctggtgggcctggagaagcagcacggcagcaacaccttcaccgtgaaggcccagcccagcgacaacgcccccgccaagggcaacaagagccccagcccccccgacggcagccccgccgccacccccgagatcagagtgaaccacgagcccgagcccgccggcggcgccacccccggcgccaccctgcccaagagccccagccagctgagaaagggcccccccgtgccccccccccccaagcacacccccagcaaggaggtgaagcaggagcagatcctgagcctgttcgaggacaccttcgtgcccgagatcagcgtgaccacccccagccagcccaccgagagccccgccggcagcctgcccagcggcgagcccagcgccgccgagggcaccttcgccgtgagctggcccagccagaccgccgagcccggccccgcccagcccgccgaggccagcgaggtggccggcggcacccagcccgccgccggcgcccaggagcccggcgagaccgccgccagcgaggccgccagcagcagcctgcccgccgtggtggtggagaccttccccgccaccgtgaacggcaccgtggagggcggcagcggcgccggcagactggacctgccccccggcttcatgttcaaggtgcaggcccagcacgactacaccgccaccgacaccgacgagctgcagctgaaggccggcgacgtggtgctggtgatccccttccagaaccccgaggagcaggacgagggctggctgatgggcgtgaaggagagcgactggaaccagcacaaggagctggagaagtgcagaggcgtgttccccgagaacttcaccgagagagtgccctag

SEQ ID NO: 238769 - protein, 482 aa, Artificial Sequence
  derived and/or modified sequence
MAEMGSKGVTAGKIASNVQKKLTRAQEKVLQKLGKADETKDEQFEQCVQNFNKQLTEGTRLQKDLRTYLASVKAMHEASKKLNECLQEVYEPDWPGRDEANKIAENNDLLWMDYHQKLVDQALLTMDTYLGQFPDIKSRIAKRGRKLVDYDSARHHYESLQTAKKKDEAKIAKAEEELIKAQKVFEEMNVDLQEELPSLWNSRVGFYVNTFQSIAGLEENFHKEMSKLNQNLNDVLVGLEKQHGSNTFTVKAQPSDNAPAKGNKSPSPPDGSPAATPEIRVNHEPEPAGGATPGATLPKSPSQLRKGPPVPPPPKHTPSKEVKQEQILSLFEDTFVPEISVTTPSQPAEASEVAGGTQPAAGAQEPGETAASEAASSSLPAVVVETFPATVNGTVEGGSGAGRLDLPPGFMFKVQAQHDYTATDTDELQLKAGDVVLVIPFQNPEEQDEGWLMGVKESDWNQHKELEKCRGVFPENFTERVP

SEQ ID NO: 238770 - DNA, 1449 bp, Artificial Sequence
  derived and/or modified sequence
atggctgaaatgggcagcaagggagtcaccgccggtaaaattgcctccaatgttcaaaagaaacttaccagggcacaagagaaagtcctccagaaattgggtaaggcggatgagaccaaggatgagcagtttgagcaatgcgtgcaaaacttcaataaacaactgacagagggaaccagactgcagaaggatctgaggacctatctcgcctctgttaaagccatgcatgaggcttctaaaaagctgaacgaatgtctgcaggaagtgtacgagcccgactggcccggtcgcgatgaagcgaacaagatcgccgaaaataatgatcttctgtggatggactaccatcagaaacttgtggaccaggcactgctgactatggatacgtacttaggccaattccctgatatcaagtcacggattgccaagcgtggaaggaagctggtcgactatgactcagctcgacaccactatgaatccctccaaacagctaaaaagaaggacgaggccaagatagcgaaggcggaggaggagttgatcaaggcacagaaggtattcgaagaaatgaatgttgacctccaggaggagctgccctccctgtggaacagtcgggtggggttctacgtcaatacttttcagtccatcgcaggcctggaggagaatttccacaaggagatgtctaagctaaaccagaatctgaatgacgtcctggtcggacttgaaaagcagcacggctcaaacaccttcacggtaaaggcacagcctagcgataatgcccctgctaagggcaataagagccctagtccgcccgacggcagtcctgcagctacacctgaaatccgagtgaatcacgagccggaacccgcaggtggtgccactcccggcgccactctgcctaagtctccatcgcagctgcgtaaaggaccgcctgtgccgcccccaccaaagcatacaccgagcaaagaggtgaagcaggagcagatccttagcttgtttgaagatacattcgttccggagattagtgtgactacacctagccagccagctgaggcgagcgaagtggccggaggaacacagccggctgccggagctcaggaaccgggcgaaacagcggctagtgaggccgcgtctagctccttgccagctgtcgtagtggagacgtttcctgccaccgtgaacggaaccgtagagggaggcagcggagctgggaggctggacctgccccctgggttcatgttcaaggtgcaggcgcagcatgactacacggcgactgacactgacgagcttcagctgaaagccggcgatgtggtgctagttattccttttcagaaccctgaagagcaggatgagggctggctcatgggtgtcaaagagagcgactggaaccagcataaggagctcgaaaagtgcaggggcgtttttccagaaaactttacagagcgcgtcccctag

SEQ ID NO: 238771 - DNA, 1449 bp, Artificial Sequence
  derived and/or modified sequence
atggccgagatgggcagcaaaggagtgacagctgggaagatcgccagcaatgtgcagaagaagctgacccgggcccaggagaaggtgctgcagaagctgggcaaggcagatgagaccaaggatgagcagtttgagcagtgtgtgcagaacttcaacaagcagctgacagagggcacccggctgcagaaggacctgcggacctacctggcctctgtgaaggccatgcatgaggccagcaagaagctgaatgaatgtctgcaggaggtgtatgagccagactggccaggaagagatgaggccaacaagattgctgaaaataatgacctgctgtggatggactaccaccagaagctggtggaccaggccctgctgaccatggacacctacctgggccagttcccagacatcaagagccgcatcgccaagaggggcaggaagctggtggactatgacagcgcccggcaccactatgagagcctgcagacagccaagaagaaggatgaggccaagatcgccaaggccgaggaggagctgatcaaggcccagaaggtgtttgaggagatgaatgtggacctgcaggaggagctgcccagcctgtggaacagccgggtgggcttctacgtgaacaccttccagagcattgctggcctggaggagaacttccacaaggagatgagcaagctgaaccagaacctgaatgatgtgctggtgggcctggagaagcagcacggcagcaacaccttcaccgtgaaggcccagcccagcgacaatgccccagccaagggcaacaagagccccagccccccagatggcagccctgctgccaccccagagatccgggtgaaccacgagcctgagcctgctgggggcgccacccctggggccaccctgcccaagagccccagccagctgaggaagggcccccctgtgcccccaccacccaagcacacccccagcaaggaggtgaagcaggagcagatcctgagcctgtttgaggacacctttgtgcctgagatctctgtgaccacccccagccagcctgctgaggccagcgaggtggccggcggcacccagcctgctgctggggcccaggagcccggggagacagctgccagcgaggccgccagcagcagcctgcctgctgtggtggtggagaccttccctgccaccgtgaatggcaccgtggagggcggcagcggggccggccgcctggacctgcccccaggcttcatgttcaaggtgcaggcccagcacgactacacagccacagacacagatgagctgcagctgaaggctggagatgtggtgctggtgatccccttccagaaccctgaggagcaggatgagggctggctgatgggcgtgaaggagagtgactggaaccagcacaaggagctggagaagtgccggggcgtcttccctgagaacttcacagagcgggtgccctag

SEQ ID NO: 238772 - DNA, 1449 bp, Artificial Sequence
  derived and/or modified sequence
atggccgagatgggcagcaagggcgtgaccgccggcaagatcgccagcaacgtgcagaaaaagctgacccgcgcccaggagaaggtcctgcagaagctcggaaaagcagatgaaactaaggacgagcaatttgaacagtgtgtgcagaatttcaacaaacagttaacagaaggaacaaggctccagaaggacctgcgtacctatttggctagtgtgaaggccatgcatgaggcctccaagaagctaaacgagtgcctgcaggaggtctacgaacctgattggcctggccgcgacgaggccaacaaaatcgccgagaataatgacttactgtggatggattatcatcaaaagctggtggaccaggcacttctgacaatggacacgtatttaggccagtttcctgacattaagagccgcattgcaaagcgggggaggaaactggtggactatgactcagctcgccaccattatgagtccctacaaaccgccaaaaagaaggacgaggctaagattgccaaagcggaagaggagctgatcaaagcccagaaagtattcgaagagatgaacgtagatttacaggaagaacttcctagtttgtggaacagtcgcgtgggcttctatgtcaacactttccagtccatagctggactggaggagaatttccacaaggagatgagcaaactgaaccagaatctgaacgacgtgctggtcggcctcgaaaagcagcacggctcgaacacgtttacagtcaaggcacagccgagcgacaacgctcctgctaagggtaataaaagcccctccccccccgacggatcaccggccgccacccccgaaataagagttaatcacgagccagagcctgctgggggggctactccaggcgccactctcccgaagtcccccagtcaattacgcaaggggccccctgtccctcctcccccaaaacacactccaagcaaggaggtcaagcaggaacagatcctttccttgtttgaggacacgtttgtccccgagatctctgtcacaacaccttcccaaccggccgaagcctcggaagtggcaggaggaacccagccggctgccggcgcacaagagcctggagagacggcagcctcggaagcagcgagcagtagtctgccagcagtggttgttgagacttttccggcaaccgttaacggaacagtagaggggggtagcggcgcaggacggttagatctccctccaggcttcatgttcaaagtccaggcacagcacgactataccgctaccgacaccgacgaacttcagctgaaggcaggggacgtggtgctggtcatccctttccagaacccagaagaacaggacgaggggtggctaatgggcgtgaaggaaagcgattggaaccagcacaaggagctggagaagtgccgaggagtgttcccagagaactttacggagagggtgccttag

SEQ ID NO: 238773 - DNA, 1449 bp, Artificial Sequence
  derived and/or modified sequence
atggctgagatgggatcaaaaggcgtaacagctgggaagatcgcctcaaatgtacagaagaagctgactcgggctcaggaaaaggtgctgcaaaaactgggaaaggccgatgaaactaaagacgaacagttcgagcagtgcgtccaaaacttcaacaaacagctgactgaaggcacccgccttcaaaaggacctgaggacctaccttgctagtgtgaaggccatgcatgaagcatccaagaagctgaatgaatgtctgcaggaagtctacgaaccagattggccgggaagagacgaagcaaataagatagccgaaaataacgatttgctgtggatggactatcaccagaagttagtagatcaggctttgcttacaatggatacttacctgggccagtttcccgatatcaagtccagaatcgccaagaggggtaggaaactggtggactatgacagcgcaagacaccattatgaatctctgcagactgctaaaaaaaaggatgaagcaaaaatcgctaaggctgaggaggagctcattaaggcccaaaaggtgtttgaagagatgaatgtggacctgcaagaagaactacccagtctgtggaattcccgcgtggggttttatgtgaataccttccagtcaatcgccggtctcgaagagaacttccacaaagagatgtctaaactgaatcagaacttgaatgatgtgctcgtgggcctggaaaaacagcatggatcaaatacctttacggttaaagcgcagcctagcgataacgcccctgccaagggaaataaatctccgagtccgcctgacggctcacccgcagctacgcctgaaatacgcgtgaatcatgagccagagcccgctggcggtgcaaccccaggtgccacattacccaagtctccgagccagttacgtaaaggtccgccagttcctccaccgccaaagcacaccccttccaaagaagtgaagcaggaacagattctgtctctttttgaggatacatttgtccccgaaattagtgtcacaaccccttcccaaccggcagaagcctcagaggtggcgggaggcacccaacctgccgcaggggcacaggagcctggggaaacagctgcgagtgaggccgcatcatctagccttcccgcagtcgtggtcgaaacttttcccgcaacagtcaatgggactgtcgaggggggaagcggcgctgggcgactggacttgccgcctggcttcatgttcaaggtacaggctcaacacgattataccgccactgacaccgatgagctgcaactcaaggccggagacgtagtccttgtgattccattccagaaccctgaggaacaggacgagggatggctgatgggagtgaaggaatctgactggaatcagcataaagagttggaaaaatgtcggggtgtgttcccggagaatttcaccgaacgcgttccatag

SEQ ID NO: 238774 - DNA, 2293 bp, Artificial Sequence
  derived and/or modified sequence
cgcgcccctccctcctcgcggacctggcggtgccggcgcccggagtggccctttaaaaggcagcttattgtccggagggggcgggcggggggcgccgaccgcggcctgaggcccggcccctcccctctccctccctctgtccccgcgtcgctcgctggctagctcgctggctcgctcgcccgtccggcgcacgctccgcctccgtcagttggctccgctgtcgggtgcgcggcgtggagcggcagccggtctggacgcgcggccggggctgggggctgggagcgcggcgcgcaagatctccccgcgcgagagcggcccctgccaccgggcgaggcctgcgccgcgatggcagagatgggcagtaaaggggtgacggcgggaaagatcgccagcaacgtgcagaagaagctcacccgcgcgcaggagaaggttctccagaagctggggaaggcagatgagaccaaggatgagcagtttgagcagtgcgtccagaatttcaacaagcagctgacggagggcacccggctgcagaaggatctccggacctacctggcctccgtcaaagccatgcacgaggcttccaagaagctgaatgagtgtctgcaggaggtgtatgagcccgattggcccggcagggatgaggcaaacaagatcgcagagaacaacgacctgctgtggatggattaccaccagaagctggtggaccaggcgctgctgaccatggacacgtacctgggccagttccccgacatcaagtcacgcattgccaagcgggggcgcaagctggtggactacgacagtgcccggcaccactacgagtcccttcaaactgccaaaaagaaggatgaagccaaaattgccaaggccgaggaggagctcatcaaagcccagaaggtgtttgaggagatgaatgtggatctgcaggaggagctgccgtccctgtggaacagccgcgtaggtttctacgtcaacacgttccagagcatcgcgggcctggaggaaaacttccacaaggagatgagcaagctcaaccagaacctcaatgatgtgctggtcggcctggagaagcaacacgggagcaacaccttcacggtcaaggcccagcccagtgacaacgcgcctgcaaaagggaacaagagcccttcgcctccagatggctcccctgccgccacccccgagatcagagtcaaccacgagccagagccggccggcggggccacgcccggggccaccctccccaagtccccatctcagctccggaaaggcccaccagtccctccgcctcccaaacacaccccgtccaaggaagtcaagcaggagcagatcctcagcctgtttgaggacacgtttgtccctgagatcagcgtgaccaccccctcccagccagcagaggcctcggaggtggcgggtgggacccaacctgcggctggagcccaggagccaggggagacggcggcaagtgaagcagcctccagctctcttcctgctgtcgtggtggagaccttcccagcaactgtgaatggcaccgtggagggcggcagtggggccgggcgcttggacctgcccccaggtttcatgttcaaggtacaggcccagcacgactacacggccactgacacagacgagctgcagctcaaggctggtgatgtggtgctggtgatccccttccagaaccctgaagagcaggatgaaggctggctcatgggcgtgaaggagagcgactggaaccagcacaaggagctggagaagtgccgtggcgtcttccccgagaacttcactgagagggtcccatgacggcggggcccaggcagcctccgggcgtgtgaagaacacctcctcccgaaaaatgtgtggttcttttttttgttttgttttcgtttttcatcttttgaagagcaaagggaaatcaagaggagacccccaggcagaggggcgttctcccaaagattaggtcgttttccaaagagccgcgtcccggcaagtccggcggaattcaccagtgttcctgaagctgctgtgtcctctagttgagtttctggcgcccctgcctgtgcccgcatgtgtgcctggccgcagggcggggctgggggctgccgagccaccatgcttgcctgaagcttcggccgcgccacccgggcaagggtcctcttttcctggcagctgctgtgggtggggcccagacaccagcctagcctggctctgccccgcagacggtctgtgtgctgtttgaaaataaatcttagtgttcaaaacaaaatgaaacaaaaaaaaaatgataaaaactctcagaaaa

SEQ ID NO: 238775 - DNA, 1449 bp, Artificial Sequence
  derived and/or modified sequence
atggccgagatgggcagcaagggcgtgaccgccggcaagatcgccagcaacgtgcagaagaagctgaccagagcccaggagaaggtgctgcagaagctgggcaaggccgacgagaccaaggacgagcagttcgagcagtgcgtgcagaacttcaacaagcagctgaccgagggcaccagactgcagaaggacctgagaacctacctggccagcgtgaaggccatgcacgaggccagcaagaagctgaacgagtgcctgcaggaggtgtacgagcccgactggcccggcagagacgaggccaacaagatcgccgagaacaacgacctgctgtggatggactaccaccagaagctggtggaccaggccctgctgaccatggacacctacctgggccagttccccgacatcaagagcagaatcgccaagagaggcagaaagctggtggactacgacagcgccagacaccactacgagagcctgcagaccgccaagaagaaggacgaggccaagatcgccaaggccgaggaggagctgatcaaggcccagaaggtgttcgaggagatgaacgtggacctgcaggaggagctgcccagcctgtggaacagcagagtgggcttctacgtgaacaccttccagagcatcgccggcctggaggagaacttccacaaggagatgagcaagctgaaccagaacctgaacgacgtgctggtgggcctggagaagcagcacggcagcaacaccttcaccgtgaaggcccagcccagcgacaacgcccccgccaagggcaacaagagccccagcccccccgacggcagccccgccgccacccccgagatcagagtgaaccacgagcccgagcccgccggcggcgccacccccggcgccaccctgcccaagagccccagccagctgagaaagggcccccccgtgccccccccccccaagcacacccccagcaaggaggtgaagcaggagcagatcctgagcctgttcgaggacaccttcgtgcccgagatcagcgtgaccacccccagccagcccgccgaggccagcgaggtggccggcggcacccagcccgccgccggcgcccaggagcccggcgagaccgccgccagcgaggccgccagcagcagcctgcccgccgtggtggtggagaccttccccgccaccgtgaacggcaccgtggagggcggcagcggcgccggcagactggacctgccccccggcttcatgttcaaggtgcaggcccagcacgactacaccgccaccgacaccgacgagctgcagctgaaggccggcgacgtggtgctggtgatccccttccagaaccccgaggagcaggacgagggctggctgatgggcgtgaaggagagcgactggaaccagcacaaggagctggagaagtgcagaggcgtgttccccgagaacttcaccgagagagtgccctag

SEQ ID NO: 238776 - protein, 475 aa, Artificial Sequence
  derived and/or modified sequence
MAEMGSKGVTAGKIASNVQKKLTRAQEKVLQKLGKADETKDEQFEQCVQNFNKQLTEGTRLQKDLRTYLASVKAMHEASKKLNECLQEVYEPDWPGRDEANKIAENNDLLWMDYHQKLVDQALLTMDTYLGQFPDIKSRIAKRGRKLVDYDSARHHYESLQTAKKKDEAKIAKAEEELIKAQKVFEEMNVDLQEELPSLWNSRVGFYVNTFQSIAGLEENFHKEMSKLNQNLNDVLVGLEKQHGSNTFTVKAQPSDNAPAKGNKSPSPPDGSPAATPEIRVNHEPEPAGGATPGATLPKSPSQPTESPAGSLPSGEPSAAEGTFAVSWPSQTAEPGPAQPAEASEVAGGTQPAAGAQEPGETAASEAASSSLPAVVVETFPATVNGTVEGGSGAGRLDLPPGFMFKVQAQHDYTATDTDELQLKAGDVVLVIPFQNPEEQDEGWLMGVKESDWNQHKELEKCRGVFPENFTERVP

SEQ ID NO: 238777 - DNA, 1428 bp, Artificial Sequence
  derived and/or modified sequence
atggccgagatggggagcaaaggggtcactgctgggaagatcgcttccaacgttcagaagaaacttaccagggctcaggagaaagtcttgcagaaactcggcaaagccgatgaaacaaaagacgaacagttcgaacagtgcgtccagaattttaataaacaactgaccgaagggaccaggctgcagaaagacctccggacatatctggcttctgtcaaagccatgcatgaagccagcaagaagttgaacgaatgcttgcaggaggtgtacgaaccagactggccaggtcgcgacgaagcaaataaaattgcggaaaacaacgatcttctgtggatggattaccaccagaaactggtcgaccaagccctcctgactatggacacctatctcgggcagttccccgatattaagagccgtatcgctaaaagaggccggaaactggtggattacgacagcgcaaggcaccactatgagtctctccaaaccgcgaaaaagaaagacgaggccaagatcgcaaaggctgaagaggaacttatcaaagcccagaaagtgttcgaagagatgaatgtcgatctgcaggaggagctcccctccctctggaactctagagtgggtttttatgttaatacctttcaaagcatagccggactggaggaaaactttcacaaggagatgagcaagctgaatcagaatcttaatgacgttctcgtcggccttgagaaacaacatggctcaaacactttcacagtcaaggcccagccctctgacaacgctcccgccaaaggaaataagagtccttcaccgcccgacggatcacccgccgctacccccgaaatacgagtgaatcatgaacccgagcctgcaggaggcgcgactccaggagctaccctgcctaaatctccgtcccagcccaccgaaagtcccgctggcagcctgcccagtggagagccttccgccgccgagggcacctttgcagtgtcctggccctcccaaactgcagaacccggcccggcgcagcccgccgaagcgagtgaagttgcaggaggcactcagcctgccgctggagcgcaggagcctggtgaaacagcagcttctgaggcagcaagctcctcactccccgccgtggtggtggaaacgttccccgcaaccgtgaatggtacagtggagggtggctccggggctggccgtctcgaccttcctcccggattcatgtttaaggtacaggctcagcatgattacactgccaccgataccgacgaactgcagcttaaggccggagacgtggtgctagtgatccccttccaaaacccagaagagcaggatgagggttggctgatgggcgtcaaagaaagcgactggaatcagcataaggaactggagaaatgcaggggggtgttccctgaaaactttacggagcgagtgccctag

SEQ ID NO: 238778 - DNA, 1428 bp, Artificial Sequence
  derived and/or modified sequence
atggccgagatgggcagcaaaggagtgacagctgggaagatcgccagcaatgtgcagaagaagctgacccgggcccaggagaaggtgctgcagaagctgggcaaggcagatgagaccaaggatgagcagtttgagcagtgtgtgcagaacttcaacaagcagctgacagagggcacccggctgcagaaggacctgcggacctacctggcctctgtgaaggccatgcatgaggccagcaagaagctgaatgaatgtctgcaggaggtgtatgagccagactggccaggaagagatgaggccaacaagattgctgaaaataatgacctgctgtggatggactaccaccagaagctggtggaccaggccctgctgaccatggacacctacctgggccagttcccagacatcaagagccgcatcgccaagaggggcaggaagctggtggactatgacagcgcccggcaccactatgagagcctgcagacagccaagaagaaggatgaggccaagatcgccaaggccgaggaggagctgatcaaggcccagaaggtgtttgaggagatgaatgtggacctgcaggaggagctgcccagcctgtggaacagccgggtgggcttctacgtgaacaccttccagagcattgctggcctggaggagaacttccacaaggagatgagcaagctgaaccagaacctgaatgatgtgctggtgggcctggagaagcagcacggcagcaacaccttcaccgtgaaggcccagcccagcgacaatgccccagccaagggcaacaagagccccagccccccagatggcagccctgctgccaccccagagatccgggtgaaccacgagcctgagcctgctgggggcgccacccctggggccaccctgcccaagagccccagccagcccacagagagccctgctggcagcctgcccagcggggagcccagcgctgctgagggcacctttgctgtgtcctggcccagccagacagctgagcccggccctgcccagcctgctgaggccagcgaggtggccggcggcacccagcctgctgctggggcccaggagcctggagaaacagctgccagcgaggccgccagcagcagcctgcctgctgtggtggtggagaccttccctgccaccgtgaatggaacagtggagggcggcagcggggccggccgcctggacctgcccccaggcttcatgttcaaggtgcaggcccagcacgactacacagccacagacacagatgagctgcagctgaaggctggagatgtggtgctggtgatccccttccagaaccctgaggagcaggatgagggctggctgatgggcgtgaaggagagtgactggaaccagcacaaggagctggagaagtgccggggcgtcttccctgagaacttcacagagcgggtgccctag

SEQ ID NO: 238779 - DNA, 1428 bp, Artificial Sequence
  derived and/or modified sequence
atggccgagatgggcagcaagggcgtgaccgccggcaagatcgcctccaatgttcagaagaaactgactcgggctcaggagaaagttttgcaaaagttaggaaaggccgatgaaaccaaagacgagcaatttgaacagtgtgtgcagaattttaataagcagctgacagaagggaccaggcttcagaaagacttgcgaacctacctcgcatcggttaaagcaatgcacgaggcttctaagaaattaaatgaatgcctacaggaggtttacgagcctgattggcccggccgggatgaggccaataagatcgctgagaacaacgatcttctttggatggactaccaccagaaactggtcgaccaagcccttttgacaatggacacatacctgggacaatttcccgacatcaaaagtcgtatcgcaaagcgaggccggaagctcgtcgactacgatagtgctcgtcaccattacgagtctcttcaaaccgctaagaagaaagatgaagctaagattgccaaagccgaagaggagttgataaaggcccagaaggtcttcgaggagatgaatgtggacctgcaggaagagctcccatctctatggaactcaagagtcggtttttatgtgaacacatttcagagcattgccgggctggaagagaactttcataaggagatgtcaaaactgaatcaaaatctcaatgacgtgctggtgggcctagagaaacagcacggttcgaatacttttaccgtgaaggcacaaccttctgataatgccccagctaaaggaaataagtctccttctcctccagacggtagcccggccgccacccctgagatccgtgtgaaccatgaacccgagcccgcggggggcgctacccctggggccactctccctaaatccccttcccagccaaccgagagccctgccggtagtcttcctagcggcgaaccaagtgcggccgagggaacatttgctgtgtcttggccttcccagacagcagagcctggccctgcccagcctgccgaagcttctgaagtggcgggcggaacccagcctgctgctggcgcccaggagcctggcgaaactgccgcaagtgaagcagcctccagttcactgccagcagtggtggtggaaaccttccccgccacggtgaatggaactgttgagggaggtagtggagctggaagactggatctccctccaggattcatgtttaaagtgcaagcacaacacgactacactgccactgacacagatgagctccagctgaaggctggcgacgtcgtgctggtgatcccctttcagaatcccgaagagcaagacgaaggatggttgatgggagttaaagaatccgactggaatcagcataaggagcttgagaaatgcagaggggtattccccgagaattttaccgagcgggttccgtag

SEQ ID NO: 238780 - DNA, 1428 bp, Artificial Sequence
  derived and/or modified sequence
atggccgagatgggctctaagggggtcacagccggaaaaattgctagcaatgtgcaaaagaaactgacccgcgctcaggagaaggttttgcaaaaactgggtaaagcggacgagactaaggatgagcagtttgagcaatgcgtacaaaacttcaataaacagctcaccgaaggcacccggcttcaaaaggatctgcggacctatctcgctagtgtcaaggcgatgcatgaggctagcaaaaagctgaacgaatgtctgcaggaggtgtatgagcccgactggcctggtagagacgaggccaacaagatcgccgaaaataacgatttactctggatggattaccaccagaagcttgtggaccaggccctcctgacaatggatacatatctgggccagttcccagatattaaatcacgcatcgcgaaaaggggtcggaagctcgttgactacgacagtgccagacatcactatgaatcattgcagaccgcgaaaaaaaaggacgaggctaaaatcgctaaagcagaagaggaactcatcaaagcgcaaaaggtgtttgaggaaatgaacgtggatctacaagaggaattgccttccttgtggaatagcagggtggggttctatgtaaataccttccagtccatcgcgggtcttgaggaaaattttcacaaggaaatgtcaaaacttaatcagaatcttaacgatgtcttagtggggctcgagaagcaacacggtagcaacaccttcacagttaaggctcaaccgtctgataacgcaccagctaagggcaataagagtccctcgccgcctgatggatcgccggcagccacacccgaaattcgggttaatcacgagcctgaacctgccggaggtgcaacccctggagccactcttcccaagtccccctcacagccaaccgagtcgccagccggtagcctaccaagtggcgaaccttccgctgccgaggggacatttgcagtgagctggcccagccagacagcagaacctggccctgcccaacctgctgaggctagtgaggtggccggagggactcagcctgctgccggagcgcaggagcctggggagacagcagcttccgaggctgcgagcagctctctgccagcagtagtggtcgagacgttccctgccaccgtgaatggaacagttgaaggtggtagcggggctggcagactggacctcccaccaggtttcatgttcaaggttcaggcccagcacgactatacggccaccgacacagatgaattacagttgaaggcgggtgacgtggtgctcgtgataccatttcaaaatccagaagagcaggatgagggatggctcatgggagtgaaggaaagtgactggaatcagcataaggaattggaaaagtgccggggagtctttccagagaactttacagagcgcgtgccctag

SEQ ID NO: 238781 - DNA, 2272 bp, Artificial Sequence
  derived and/or modified sequence
cgcgcccctccctcctcgcggacctggcggtgccggcgcccggagtggccctttaaaaggcagcttattgtccggagggggcgggcggggggcgccgaccgcggcctgaggcccggcccctcccctctccctccctctgtccccgcgtcgctcgctggctagctcgctggctcgctcgcccgtccggcgcacgctccgcctccgtcagttggctccgctgtcgggtgcgcggcgtggagcggcagccggtctggacgcgcggccggggctgggggctgggagcgcggcgcgcaagatctccccgcgcgagagcggcccctgccaccgggcgaggcctgcgccgcgatggcagagatgggcagtaaaggggtgacggcgggaaagatcgccagcaacgtgcagaagaagctcacccgcgcgcaggagaaggttctccagaagctggggaaggcagatgagaccaaggatgagcagtttgagcagtgcgtccagaatttcaacaagcagctgacggagggcacccggctgcagaaggatctccggacctacctggcctccgtcaaagccatgcacgaggcttccaagaagctgaatgagtgtctgcaggaggtgtatgagcccgattggcccggcagggatgaggcaaacaagatcgcagagaacaacgacctgctgtggatggattaccaccagaagctggtggaccaggcgctgctgaccatggacacgtacctgggccagttccccgacatcaagtcacgcattgccaagcgggggcgcaagctggtggactacgacagtgcccggcaccactacgagtcccttcaaactgccaaaaagaaggatgaagccaaaattgccaaggccgaggaggagctcatcaaagcccagaaggtgtttgaggagatgaatgtggatctgcaggaggagctgccgtccctgtggaacagccgcgtaggtttctacgtcaacacgttccagagcatcgcgggcctggaggaaaacttccacaaggagatgagcaagctcaaccagaacctcaatgatgtgctggtcggcctggagaagcaacacgggagcaacaccttcacggtcaaggcccagcccagtgacaacgcgcctgcaaaagggaacaagagcccttcgcctccagatggctcccctgccgccacccccgagatcagagtcaaccacgagccagagccggccggcggggccacgcccggggccaccctccccaagtccccatctcagcccacagagagtccagccggcagcctgccttccggggagcccagcgctgccgagggcacctttgctgtgtcctggcccagccagacggccgagccggggcctgcccaaccagcagaggcctcggaggtggcgggtgggacccaacctgcggctggagcccaggagccaggggagacggcggcaagtgaagcagcctccagctctcttcctgctgtcgtggtggagaccttcccagcaactgtgaatggcaccgtggagggcggcagtggggccgggcgcttggacctgcccccaggtttcatgttcaaggtacaggcccagcacgactacacggccactgacacagacgagctgcagctcaaggctggtgatgtggtgctggtgatccccttccagaaccctgaagagcaggatgaaggctggctcatgggcgtgaaggagagcgactggaaccagcacaaggagctggagaagtgccgtggcgtcttccccgagaacttcactgagagggtcccatgacggcggggcccaggcagcctccgggcgtgtgaagaacacctcctcccgaaaaatgtgtggttcttttttttgttttgttttcgtttttcatcttttgaagagcaaagggaaatcaagaggagacccccaggcagaggggcgttctcccaaagattaggtcgttttccaaagagccgcgtcccggcaagtccggcggaattcaccagtgttcctgaagctgctgtgtcctctagttgagtttctggcgcccctgcctgtgcccgcatgtgtgcctggccgcagggcggggctgggggctgccgagccaccatgcttgcctgaagcttcggccgcgccacccgggcaagggtcctcttttcctggcagctgctgtgggtggggcccagacaccagcctagcctggctctgccccgcagacggtctgtgtgctgtttgaaaataaatcttagtgttcaaaacaaaatgaaacaaaaaaaaaatgataaaaactctcagaaaa

SEQ ID NO: 238782 - DNA, 1428 bp, Artificial Sequence
  derived and/or modified sequence
atggccgagatgggcagcaagggcgtgaccgccggcaagatcgccagcaacgtgcagaagaagctgaccagagcccaggagaaggtgctgcagaagctgggcaaggccgacgagaccaaggacgagcagttcgagcagtgcgtgcagaacttcaacaagcagctgaccgagggcaccagactgcagaaggacctgagaacctacctggccagcgtgaaggccatgcacgaggccagcaagaagctgaacgagtgcctgcaggaggtgtacgagcccgactggcccggcagagacgaggccaacaagatcgccgagaacaacgacctgctgtggatggactaccaccagaagctggtggaccaggccctgctgaccatggacacctacctgggccagttccccgacatcaagagcagaatcgccaagagaggcagaaagctggtggactacgacagcgccagacaccactacgagagcctgcagaccgccaagaagaaggacgaggccaagatcgccaaggccgaggaggagctgatcaaggcccagaaggtgttcgaggagatgaacgtggacctgcaggaggagctgcccagcctgtggaacagcagagtgggcttctacgtgaacaccttccagagcatcgccggcctggaggagaacttccacaaggagatgagcaagctgaaccagaacctgaacgacgtgctggtgggcctggagaagcagcacggcagcaacaccttcaccgtgaaggcccagcccagcgacaacgcccccgccaagggcaacaagagccccagcccccccgacggcagccccgccgccacccccgagatcagagtgaaccacgagcccgagcccgccggcggcgccacccccggcgccaccctgcccaagagccccagccagcccaccgagagccccgccggcagcctgcccagcggcgagcccagcgccgccgagggcaccttcgccgtgagctggcccagccagaccgccgagcccggccccgcccagcccgccgaggccagcgaggtggccggcggcacccagcccgccgccggcgcccaggagcccggcgagaccgccgccagcgaggccgccagcagcagcctgcccgccgtggtggtggagaccttccccgccaccgtgaacggcaccgtggagggcggcagcggcgccggcagactggacctgccccccggcttcatgttcaaggtgcaggcccagcacgactacaccgccaccgacaccgacgagctgcagctgaaggccggcgacgtggtgctggtgatccccttccagaaccccgaggagcaggacgagggctggctgatgggcgtgaaggagagcgactggaaccagcacaaggagctggagaagtgcagaggcgtgttccccgagaacttcaccgagagagtgccctag

SEQ ID NO: 238783 - protein, 439 aa, Artificial Sequence
  derived and/or modified sequence
MAEMGSKGVTAGKIASNVQKKLTRAQEKVLQKLGKADETKDEQFEQCVQNFNKQLTEGTRLQKDLRTYLASVKAMHEASKKLNECLQEVYEPDWPGRDEANKIAENNDLLWMDYHQKLVDQALLTMDTYLGQFPDIKSRIAKRGRKLVDYDSARHHYESLQTAKKKDEAKIAKAEEELIKAQKVFEEMNVDLQEELPSLWNSRVGFYVNTFQSIAGLEENFHKEMSKLNQNLNDVLVGLEKQHGSNTFTVKAQPSDNAPAKGNKSPSPPDGSPAATPEIRVNHEPEPAGGATPGATLPKSPSQPAEASEVAGGTQPAAGAQEPGETAASEAASSSLPAVVVETFPATVNGTVEGGSGAGRLDLPPGFMFKVQAQHDYTATDTDELQLKAGDVVLVIPFQNPEEQDEGWLMGVKESDWNQHKELEKCRGVFPENFTERVP

SEQ ID NO: 238784 - DNA, 1320 bp, Artificial Sequence
  derived and/or modified sequence
atggccgagatgggttccaaaggcgtgaccgccggcaagattgccagcaacgtgcagaaaaagctgactagagctcaggagaaggtcctccaaaagctgggcaaagccgatgaaacaaaggacgagcagttcgagcagtgcgtgcagaactttaacaagcagctgacagaggggacacggttgcaaaaagacttgcgcacctacctcgctagtgtgaaggccatgcacgaagcttccaagaagctcaatgagtgtttgcaggaggtctacgaaccagactggcctgggcgtgatgaggctaataaaattgctgaaaataatgatcttctctggatggactaccatcagaagctggtcgaccaagccctgttgacgatggacacatacctgggtcagttccccgacatcaagtcaagaatcgctaagagaggacgcaaactggttgattatgattccgcgagacaccactacgaatctctgcaaacagccaagaagaaagacgaagccaagatagcgaaggccgaggaagaacttatcaaagctcagaaagtctttgaagaaatgaacgtggacctccaggaggagctccccagtctgtggaacagccgggtgggcttttatgttaacacttttcagagcatcgcaggcctcgaggagaatttccacaaggagatgtctaagttaaatcagaacctgaatgacgtgcttgtggggctggaaaagcagcatggcagcaacaccttcactgtgaaggcgcagcccagtgacaacgctccagccaagggcaacaaatccccttcgccacccgacggtagccccgcagccacacctgagatccgagttaaccatgagcctgagcctgctggaggcgccacacctggtgccactcttcctaagtctccttcccaaccagcggaagcaagtgaagtggccggcggtacacagcccgccgctggggcgcaggagccaggtgagactgccgcttccgaggcagcgagcagttcactgcctgctgtcgttgtggaaacctttcctgcaaccgtcaacggcacagttgaaggagggtcaggggcagggcggctggacctgcctcctggcttcatgtttaaggtacaggcccagcatgactacacagccacagataccgatgagttacagctcaaagcgggggatgttgtgctcgtgattccattccaaaacccagaagaacaggatgaaggatggctcatgggagtgaaggaatctgattggaaccaacataaggaactggagaagtgtagaggggtcttcccagaaaactttactgagcgggttccttag

SEQ ID NO: 238785 - DNA, 1320 bp, Artificial Sequence
  derived and/or modified sequence
atggccgagatgggcagcaaaggagtgacagctgggaagatcgccagcaatgtgcagaagaagctgacccgggcccaggagaaggtgctgcagaagctgggcaaggcagatgagaccaaggatgagcagtttgagcagtgtgtgcagaacttcaacaagcagctgacagagggcacccggctgcagaaggacctgcggacctacctggcctctgtgaaggccatgcatgaggccagcaagaagctgaatgaatgtctgcaggaggtgtatgagccagactggccaggaagagatgaggccaacaagattgctgaaaataatgacctgctgtggatggactaccaccagaagctggtggaccaggccctgctgaccatggacacctacctgggccagttcccagacatcaagagccgcatcgccaagaggggcaggaagctggtggactatgacagcgcccggcaccactatgagagcctgcagacagccaagaagaaggatgaggccaagatcgccaaggccgaggaggagctgatcaaggcccagaaggtgtttgaggagatgaatgtggacctgcaggaggagctgcccagcctgtggaacagccgggtgggcttctacgtgaacaccttccagagcattgctggcctggaggagaacttccacaaggagatgagcaagctgaaccagaacctgaatgatgtgctggtgggcctggagaagcagcacggcagcaacaccttcaccgtgaaggcccagcccagcgacaatgccccagccaagggcaacaagagccccagccccccagatggcagccctgctgccaccccagagatccgggtgaaccacgagcctgagcctgctgggggcgccacccctggggccaccctgcccaagagccccagccagcctgctgaggccagcgaggtggccggcggcacccagcctgctgctggggcccaggagcctggagaaacagctgccagcgaggccgccagcagcagcctgcctgctgtggtggtggagaccttccctgccaccgtgaatggaacagtggagggcggcagcggggccggccgcctggacctgcccccaggcttcatgttcaaggtgcaggcccagcacgactacacagccacagacacagatgagctgcagctgaaggctggagatgtggtgctggtgatccccttccagaaccctgaggagcaggatgagggctggctgatgggcgtgaaggagagtgactggaaccagcacaaggagctggagaagtgccggggcgtcttccctgagaacttcacagagcgggtgccctag

SEQ ID NO: 238786 - DNA, 1320 bp, Artificial Sequence
  derived and/or modified sequence
atggccgagatgggcagcaagggcgtgaccgccggcaagatcgccagtaatgtgcagaaaaagctcactagggcgcaggagaaggtcctacaaaagctaggtaaggccgatgaaaccaaagacgagcaattcgaacagtgcgtacagaattttaataagcagttgacagagggcacccggctccagaaggacctgaggacctacctggcctctgtcaaggccatgcatgaggcttccaagaaattaaatgaatgcctccaagaggtgtatgagcccgactggccaggcagagatgaggcaaataaaatcgcagaaaataacgacctcctctggatggattatcatcagaagctggtcgaccaggcactacttacaatggacacatatcttggacaatttccagatatcaagagccgcatcgccaagagaggacgcaagcttgtcgactacgacagcgctcgtcaccattacgaatctctacaaacagccaagaaaaaggatgaagccaagatagccaaagctgaggaggaactcattaaggcacagaaggtgtttgaggagatgaacgttgaccttcaggaagaactgccgtctctatggaactctcgggtggggttctacgtcaacaccttccaatccatcgctggccttgaagaaaattttcataaggagatgtcaaaactgaatcagaacctgaacgacgtgctggtcgggttagagaagcagcatggatctaacaccttcacggtcaaagctcagcccagtgataacgctcccgctaagggtaacaagtccccgtctccccccgatgggtcacccgctgcgactcccgagattcgggtcaatcacgaaccagaacccgcaggtggtgccacaccaggggccacactgcccaaatcaccttctcagcctgcagaggcctccgaagttgccggtggaacacagcccgctgccggagcccaggagccaggcgagaccgcggcctctgaggccgccagtagctccctccctgctgttgtcgtggaaacatttcccgctactgtcaatggtaccgtagaaggcggctcgggggccgggcgactagatcttccccctggatttatgttcaaggttcaggcccagcacgactatactgctacggataccgacgaactgcagcttaaggccggtgatgtggtcctcgtgattccatttcaaaatcccgaggaacaggatgaagggtggttgatgggtgtcaaggagagtgactggaatcagcataaggagctcgagaaatgtcgcggcgtctttccagaaaattttaccgagcgagtgccttag

SEQ ID NO: 238787 - DNA, 1320 bp, Artificial Sequence
  derived and/or modified sequence
atggccgagatggggagcaaaggcgtaacagctgggaagattgcttctaacgttcagaaaaagcttaccagggcccaagaaaaagtactacagaaactaggaaaggccgatgagacaaaagacgaacaattcgaacagtgcgtacaaaatttcaacaaacagctgacagagggtacacggctccagaaggatctgcggacatatctcgccagtgtgaaggcaatgcacgaagcctcaaagaagttgaacgagtgcctgcaggaggtgtacgagcctgactggcccggtcgtgatgaagcaaataaaatagcagaaaataatgacctgctgtggatggattatcaccagaagctggtagaccaagcgctactgacaatggacacatacttggggcagtttcctgatattaagtcccgcattgcgaagcggggacgaaagctggtagattatgatagtgcgagacaccattacgagtcccttcagactgcaaagaaaaaagacgaagccaaaattgctaaggcggaagaagagcttattaaggcccaaaaggtatttgaagagatgaacgtcgatctgcaggaggagctcccatcactttggaatagccgcgttgggttttacgtaaacacgttccagtctatcgctgggcttgaagagaattttcacaaagagatgtctaaactgaaccagaacctgaatgacgtcctagtcggactggagaaacagcacggatccaacacattcaccgtgaaggcgcagccatccgacaacgccccagccaaggggaataagagcccttcccctccagatggctctcctgccgcaacacctgaaataagagtgaaccacgagccagagccagccggtggcgcaacaccgggtgccacactgccaaagtctccaagccagccagcagaagcatccgaggtagctggtggcacacaacccgcagcaggagctcaggaacctggcgagactgctgcctctgaggctgcctcatcctcactacccgctgtggtagtcgaaacgttccctgctaccgtgaatggaaccgtagagggtggcagcggcgcaggccgattagacctccctccgggttttatgttcaaggtgcaagcacagcacgattacacagctacagatacagacgagcttcagttgaaggccggagatgtggttctcgtgatccctttccagaaccctgaggagcaggacgaagggtggctgatgggtgtcaaggagtcggactggaaccagcacaaagaactggagaaatgcaggggtgttttcccagaaaactttactgagagggtgccttag

SEQ ID NO: 238788 - DNA, 2143 bp, Artificial Sequence
  derived and/or modified sequence
cctcctcgcggacctggcggtgccggcgcccggagtggccctttaaaaggcagcttattgtccggagggggcgggcggggggcgccgaccgcggcctgaggcccggcccctcccctctccctccctctgtccccgcgtcgctcgctggctagctcgctggctcgctcgcccgtccggcgcacgctccgcctccgtcagttggctccgctgtcgggtgcgcggcgtggagcggcagccggtctggacgcgcggccggggctgggggctgggagcgcggcgcgcaagatctccccgcgcgagagcggcccctgccaccgggcgaggcctgcgccgcgatggcagagatgggcagtaaaggggtgacggcgggaaagatcgccagcaacgtgcagaagaagctcacccgcgcgcaggagaaggttctccagaagctggggaaggcagatgagaccaaggatgagcagtttgagcagtgcgtccagaatttcaacaagcagctgacggagggcacccggctgcagaaggatctccggacctacctggcctccgtcaaagccatgcacgaggcttccaagaagctgaatgagtgtctgcaggaggtgtatgagcccgattggcccggcagggatgaggcaaacaagatcgcagagaacaacgacctgctgtggatggattaccaccagaagctggtggaccaggcgctgctgaccatggacacgtacctgggccagttccccgacatcaagtcacgcattgccaagcgggggcgcaagctggtggactacgacagtgcccggcaccactacgagtcccttcaaactgccaaaaagaaggatgaagccaaaattgccaaggccgaggaggagctcatcaaagcccagaaggtgtttgaggagatgaatgtggatctgcaggaggagctgccgtccctgtggaacagccgcgtaggtttctacgtcaacacgttccagagcatcgcgggcctggaggaaaacttccacaaggagatgagcaagctcaaccagaacctcaatgatgtgctggtcggcctggagaagcaacacgggagcaacaccttcacggtcaaggcccagcccagtgacaacgcgcctgcaaaagggaacaagagcccttcgcctccagatggctcccctgccgccacccccgagatcagagtcaaccacgagccagagccggccggcggggccacgcccggggccaccctccccaagtccccatctcagccagcagaggcctcggaggtggcgggtgggacccaacctgcggctggagcccaggagccaggggagacggcggcaagtgaagcagcctccagctctcttcctgctgtcgtggtggagaccttcccagcaactgtgaatggcaccgtggagggcggcagtggggccgggcgcttggacctgcccccaggtttcatgttcaaggtacaggcccagcacgactacacggccactgacacagacgagctgcagctcaaggctggtgatgtggtgctggtgatccccttccagaaccctgaagagcaggatgaaggctggctcatgggcgtgaaggagagcgactggaaccagcacaaggagctggagaagtgccgtggcgtcttccccgagaacttcactgagagggtcccatgacggcggggcccaggcagcctccgggcgtgtgaagaacacctcctcccgaaaaatgtgtggttcttttttttgttttgttttcgtttttcatcttttgaagagcaaagggaaatcaagaggagacccccaggcagaggggcgttctcccaaagattaggtcgttttccaaagagccgcgtcccggcaagtccggcggaattcaccagtgttcctgaagctgctgtgtcctctagttgagtttctggcgcccctgcctgtgcccgcatgtgtgcctggccgcagggcggggctgggggctgccgagccaccatgcttgcctgaagcttcggccgcgccacccgggcaagggtcctcttttcctggcagctgctgtgggtggggcccagacaccagcctagcctggctctgccccgcagacggtctgtgtgctgtttgaaaataaatcttagtgttcaaaacaaaatgaaacaaaaaaaaaatgataaaaa

SEQ ID NO: 238789 - DNA, 1320 bp, Artificial Sequence
  derived and/or modified sequence
atggccgagatgggcagcaagggcgtgaccgccggcaagatcgccagcaacgtgcagaagaagctgaccagagcccaggagaaggtgctgcagaagctgggcaaggccgacgagaccaaggacgagcagttcgagcagtgcgtgcagaacttcaacaagcagctgaccgagggcaccagactgcagaaggacctgagaacctacctggccagcgtgaaggccatgcacgaggccagcaagaagctgaacgagtgcctgcaggaggtgtacgagcccgactggcccggcagagacgaggccaacaagatcgccgagaacaacgacctgctgtggatggactaccaccagaagctggtggaccaggccctgctgaccatggacacctacctgggccagttccccgacatcaagagcagaatcgccaagagaggcagaaagctggtggactacgacagcgccagacaccactacgagagcctgcagaccgccaagaagaaggacgaggccaagatcgccaaggccgaggaggagctgatcaaggcccagaaggtgttcgaggagatgaacgtggacctgcaggaggagctgcccagcctgtggaacagcagagtgggcttctacgtgaacaccttccagagcatcgccggcctggaggagaacttccacaaggagatgagcaagctgaaccagaacctgaacgacgtgctggtgggcctggagaagcagcacggcagcaacaccttcaccgtgaaggcccagcccagcgacaacgcccccgccaagggcaacaagagccccagcccccccgacggcagccccgccgccacccccgagatcagagtgaaccacgagcccgagcccgccggcggcgccacccccggcgccaccctgcccaagagccccagccagcccgccgaggccagcgaggtggccggcggcacccagcccgccgccggcgcccaggagcccggcgagaccgccgccagcgaggccgccagcagcagcctgcccgccgtggtggtggagaccttccccgccaccgtgaacggcaccgtggagggcggcagcggcgccggcagactggacctgccccccggcttcatgttcaaggtgcaggcccagcacgactacaccgccaccgacaccgacgagctgcagctgaaggccggcgacgtggtgctggtgatccccttccagaaccccgaggagcaggacgagggctggctgatgggcgtgaaggagagcgactggaaccagcacaaggagctggagaagtgcagaggcgtgttccccgagaacttcaccgagagagtgccctag

SEQ ID NO: 238790 - protein, 409 aa, Artificial Sequence
  derived and/or modified sequence
MAEMGSKGVTAGKIASNVQKKLTRAQEKVLQKLGKADETKDEQFEQCVQNFNKQLTEGTRLQKDLRTYLASVKAMHEASKKLNECLQEVYEPDWPGRDEANKIAENNDLLWMDYHQKLVDQALLTMDTYLGQFPDIKSRIAKRGRKLVDYDSARHHYESLQTAKKKDEAKIAKAEEELIKAQKVFEEMNVDLQEELPSLWNSRVGFYVNTFQSIAGLEENFHKEMSKLNQNLNDVLVGLEKQHGSNTFTVKAQPSDNAPAKGNKSPSPPDGSPAATPEIRVNHEPEPAGGATPGATLPKSPSQSSLPAVVVETFPATVNGTVEGGSGAGRLDLPPGFMFKVQAQHDYTATDTDELQLKAGDVVLVIPFQNPEEQDEGWLMGVKESDWNQHKELEKCRGVFPENFTERVP

SEQ ID NO: 238791 - DNA, 1230 bp, Artificial Sequence
  derived and/or modified sequence
atggccgaaatggggagcaaaggggtgacagctggcaaaatcgcaagcaacgttcaaaagaaactcacgagggctcaggaaaaggtcctgcagaaacttggaaaagctgacgaaacaaaagacgaacaattcgaacaatgcgtccaaaattttaataagcagctgaccgagggtactcgcctgcagaaagatctgaggacttacctggcttcagtgaaggctatgcatgaggctagcaaaaagctaaatgaatgcctccaggaggtctacgagcctgactggccagggagggatgaggccaacaaaatagcggagaataacgacctgctttggatggactaccatcagaaattggtggaccaggccctattaacgatggacacttacctcgggcagttccccgacataaagagtcggatagcgaagcggggtaggaaattagtggactacgatagtgcaaggcatcactatgagagcctgcagaccgccaagaagaaggacgaagcaaaaatcgccaaggcggaagaagagctgatcaaggcccagaaggtgtttgaagaaatgaatgtggacttgcaggaggaactgcctagcttgtggaacagtcgggtgggcttctatgtcaacacatttcaatccattgccggattagaggagaacttccataaggaaatgtctaagctaaaccagaatctgaacgacgttctggtgggactggagaagcaacatggatctaacaccttcacagtcaaagctcagccatccgataatgctccagcgaagggaaacaaatctccatctcccccagacggctccccggcggcgacccccgagattcgcgtgaaccatgaacctgagcctgccgggggcgctacacctggggctactctgcccaaatctccttctcagtcctccctgcccgctgtggtggtagaaactttccctgcgaccgttaatggcacagtggaaggtggctccggcgcggggcgcctggacctgcctccagggtttatgttcaaagtgcaagctcagcatgattatacagctactgacacagatgagttgcaactaaaggctggcgatgtcgtcttggtgatcccgttccaaaatcctgaggaacaggacgaggggtggctgatgggagtcaaggaatcagattggaaccaacacaaagaactcgaaaagtgccggggtgtgttcccagagaatttcacggagcgcgttccatag

SEQ ID NO: 238792 - DNA, 1230 bp, Artificial Sequence
  derived and/or modified sequence
atggccgagatgggcagcaaaggagtgacagctgggaagatcgccagcaatgtgcagaagaagctgacccgggcccaggagaaggtgctgcagaagctgggcaaggcagatgagaccaaggatgagcagtttgagcagtgtgtgcagaacttcaacaagcagctgacagagggcacccggctgcagaaggacctgcggacctacctggcctctgtgaaggccatgcatgaggccagcaagaagctgaatgaatgtctgcaggaggtgtatgagccagactggccaggaagagatgaggccaacaagattgctgaaaataatgacctgctgtggatggactaccaccagaagctggtggaccaggccctgctgaccatggacacctacctgggccagttcccagacatcaagagccgcatcgccaagaggggcaggaagctggtggactatgacagcgcccggcaccactatgagagcctgcagacagccaagaagaaggatgaggccaagatcgccaaggccgaggaggagctgatcaaggcccagaaggtgtttgaggagatgaatgtggacctgcaggaggagctgcccagcctgtggaacagccgggtgggcttctacgtgaacaccttccagagcattgctggcctggaggagaacttccacaaggagatgagcaagctgaaccagaacctgaatgatgtgctggtgggcctggagaagcagcacggcagcaacaccttcaccgtgaaggcccagcccagcgacaatgccccagccaagggcaacaagagccccagccccccagatggcagccctgctgccaccccagagatccgggtgaaccacgagcctgagcctgctgggggcgccacccctggggccaccctgcccaagagccccagccagagcagcctgcctgctgtggtggtggagaccttccctgccaccgtgaatggaacagtggagggcggcagcggggccggccgcctggacctgcccccaggcttcatgttcaaggtgcaggcccagcacgactacacagccacagacacagatgagctgcagctgaaggctggagatgtggtgctggtgatccccttccagaaccctgaggagcaggatgagggctggctgatgggcgtgaaggagagtgactggaaccagcacaaggagctggagaagtgccggggcgtcttccctgagaacttcacagagcgggtgccctag

SEQ ID NO: 238793 - DNA, 1230 bp, Artificial Sequence
  derived and/or modified sequence
atggccgagatgggcagcaagggcgtgaccgccggcaagatcgcctcaaatgtgcagaaaaagctgactcgggcccaggaaaaggtgttgcaaaaactgggcaaggccgacgagactaaggacgagcagttcgaacagtgtgtacagaacttcaataaacagctgactgagggcactcgcttgcaaaaagatctcaggacgtatctcgcgtccgtgaaagctatgcacgaggccagtaagaagctgaatgaatgcctccaggaagtttatgaacccgattggccgggcagagatgaagctaataagattgcggaaaacaacgacctcctttggatggactaccaccagaaactggtggaccaggccctgttgacgatggatacgtatctaggacagtttcccgacatcaaatcccgaattgccaaacgcggtaggaaactagtggattatgacagtgctagacaccactacgaatccctgcagactgccaagaagaaagacgaggccaaaatcgcaaaggcggaggaagaattaattaaagctcaaaaggtgtttgaggagatgaacgttgatctccaggaagagctgccctcgctctggaactcacgagtgggattctatgttaatactttccagagcattgccggtctggaggaaaacttccacaaagagatgtctaaacttaatcagaacctgaacgacgtgctcgtaggactggaaaagcaacatggcagtaacacctttactgtaaaggcacagcccagtgacaacgctcccgcaaagggaaacaaatctccaagcccacctgacggaagtccagctgctacccccgaaattagggtgaaccatgaacccgaacccgcaggcggggccactcccggagcaaccctgccaaaatcaccatctcagagcagtctgccagcagtcgtcgttgaaacctttcctgccactgtgaacggtactgtcgagggcggaagtggcgcaggcagactggatttaccacccggatttatgtttaaggttcaggcccagcacgattacaccgcaaccgatacggatgaactgcagctgaaagcaggagacgtggtgttggtcatccctttccagaatcctgaggagcaggacgaaggatggctcatgggagtgaaggagagcgactggaaccagcataaagagcttgagaagtgcaggggtgtgttccctgaaaatttcacagagcgagtgccttag

SEQ ID NO: 238794 - DNA, 1230 bp, Artificial Sequence
  derived and/or modified sequence
atggcggagatgggcagcaagggggtgaccgcaggcaaaatcgccagtaatgtgcagaaaaagctgacgcgcgctcaggaaaaggttctacagaaattaggtaaagctgatgaaacaaaggacgagcagtttgagcaatgtgttcaaaacttcaacaagcagttgaccgaaggcacccgactgcagaaggatttgcgtacttatctggctagcgtaaaggcgatgcatgaagcctcaaaaaagttgaacgagtgcctgcaggaggtgtacgaacctgattggcccggaagggacgaggcaaacaaaatagctgaaaacaatgatctgttatggatggactaccatcagaagctggtggaccaggcactactaacaatggacacttacttaggtcagttccctgacatcaagtcgcgcattgccaaacgaggcaggaagctggttgattatgattctgcccgacatcactacgaaagtctgcagacagctaaaaaaaaggacgaggccaaaatcgctaaagccgaggaagagcttattaaggcccagaaagtttttgaggaaatgaatgtggaccttcaggaagaactcccttccctgtggaatagccgggtcgggttctacgtgaacactttccaatccatcgccggtctcgaggagaattttcacaaggaaatgtcaaagctgaaccagaaccttaatgatgtgttagtcggattagagaaacagcacggatctaatacctttaccgtcaaggcacagccatccgataatgctcccgctaaaggaaataagtcacctagcccaccagacggcagccccgctgccaccccagaaatccgagtcaaccatgaacccgaaccagcaggtggagctactcctggcgcaacgctgccaaagtcgccctctcagagctccctacccgcagtcgtagtggagacattcccagccactgtgaatggtaccgtggagggcggaagcggtgcaggcaggctcgacctgccccctggttttatgtttaaggttcaggcgcagcatgattacacagctacagatacagacgaattgcagttaaaagccggagatgtggtcctagtgatcccctttcagaatcctgaagagcaggacgagggatggctgatgggcgtcaaggagagtgactggaatcagcacaaagagttggaaaagtgtagaggcgtattccctgagaactttactgagagagtgccatag

SEQ ID NO: 238795 - DNA, 2074 bp, Artificial Sequence
  derived and/or modified sequence
cgcgcccctccctcctcgcggacctggcggtgccggcgcccggagtggccctttaaaaggcagcttattgtccggagggggcgggcggggggcgccgaccgcggcctgaggcccggcccctcccctctccctccctctgtccccgcgtcgctcgctggctagctcgctggctcgctcgcccgtccggcgcacgctccgcctccgtcagttggctccgctgtcgggtgcgcggcgtggagcggcagccggtctggacgcgcggccggggctgggggctgggagcgcggcgcgcaagatctccccgcgcgagagcggcccctgccaccgggcgaggcctgcgccgcgatggcagagatgggcagtaaaggggtgacggcgggaaagatcgccagcaacgtgcagaagaagctcacccgcgcgcaggagaaggttctccagaagctggggaaggcagatgagaccaaggatgagcagtttgagcagtgcgtccagaatttcaacaagcagctgacggagggcacccggctgcagaaggatctccggacctacctggcctccgtcaaagccatgcacgaggcttccaagaagctgaatgagtgtctgcaggaggtgtatgagcccgattggcccggcagggatgaggcaaacaagatcgcagagaacaacgacctgctgtggatggattaccaccagaagctggtggaccaggcgctgctgaccatggacacgtacctgggccagttccccgacatcaagtcacgcattgccaagcgggggcgcaagctggtggactacgacagtgcccggcaccactacgagtcccttcaaactgccaaaaagaaggatgaagccaaaattgccaaggccgaggaggagctcatcaaagcccagaaggtgtttgaggagatgaatgtggatctgcaggaggagctgccgtccctgtggaacagccgcgtaggtttctacgtcaacacgttccagagcatcgcgggcctggaggaaaacttccacaaggagatgagcaagctcaaccagaacctcaatgatgtgctggtcggcctggagaagcaacacgggagcaacaccttcacggtcaaggcccagcccagtgacaacgcgcctgcaaaagggaacaagagcccttcgcctccagatggctcccctgccgccacccccgagatcagagtcaaccacgagccagagccggccggcggggccacgcccggggccaccctccccaagtccccatctcagagctctcttcctgctgtcgtggtggagaccttcccagcaactgtgaatggcaccgtggagggcggcagtggggccgggcgcttggacctgcccccaggtttcatgttcaaggtacaggcccagcacgactacacggccactgacacagacgagctgcagctcaaggctggtgatgtggtgctggtgatccccttccagaaccctgaagagcaggatgaaggctggctcatgggcgtgaaggagagcgactggaaccagcacaaggagctggagaagtgccgtggcgtcttccccgagaacttcactgagagggtcccatgacggcggggcccaggcagcctccgggcgtgtgaagaacacctcctcccgaaaaatgtgtggttcttttttttgttttgttttcgtttttcatcttttgaagagcaaagggaaatcaagaggagacccccaggcagaggggcgttctcccaaagattaggtcgttttccaaagagccgcgtcccggcaagtccggcggaattcaccagtgttcctgaagctgctgtgtcctctagttgagtttctggcgcccctgcctgtgcccgcatgtgtgcctggccgcagggcggggctgggggctgccgagccaccatgcttgcctgaagcttcggccgcgccacccgggcaagggtcctcttttcctggcagctgctgtgggtggggcccagacaccagcctagcctggctctgccccgcagacggtctgtgtgctgtttgaaaataaatcttagtgttcaaaacaaaatgaaacaaaaaaaaaatgataaaaactctcagaaaa

SEQ ID NO: 238796 - DNA, 1230 bp, Artificial Sequence
  derived and/or modified sequence
atggccgagatgggcagcaagggcgtgaccgccggcaagatcgccagcaacgtgcagaagaagctgaccagagcccaggagaaggtgctgcagaagctgggcaaggccgacgagaccaaggacgagcagttcgagcagtgcgtgcagaacttcaacaagcagctgaccgagggcaccagactgcagaaggacctgagaacctacctggccagcgtgaaggccatgcacgaggccagcaagaagctgaacgagtgcctgcaggaggtgtacgagcccgactggcccggcagagacgaggccaacaagatcgccgagaacaacgacctgctgtggatggactaccaccagaagctggtggaccaggccctgctgaccatggacacctacctgggccagttccccgacatcaagagcagaatcgccaagagaggcagaaagctggtggactacgacagcgccagacaccactacgagagcctgcagaccgccaagaagaaggacgaggccaagatcgccaaggccgaggaggagctgatcaaggcccagaaggtgttcgaggagatgaacgtggacctgcaggaggagctgcccagcctgtggaacagcagagtgggcttctacgtgaacaccttccagagcatcgccggcctggaggagaacttccacaaggagatgagcaagctgaaccagaacctgaacgacgtgctggtgggcctggagaagcagcacggcagcaacaccttcaccgtgaaggcccagcccagcgacaacgcccccgccaagggcaacaagagccccagcccccccgacggcagccccgccgccacccccgagatcagagtgaaccacgagcccgagcccgccggcggcgccacccccggcgccaccctgcccaagagccccagccagagcagcctgcccgccgtggtggtggagaccttccccgccaccgtgaacggcaccgtggagggcggcagcggcgccggcagactggacctgccccccggcttcatgttcaaggtgcaggcccagcacgactacaccgccaccgacaccgacgagctgcagctgaaggccggcgacgtggtgctggtgatccccttccagaaccccgaggagcaggacgagggctggctgatgggcgtgaaggagagcgactggaaccagcacaaggagctggagaagtgcagaggcgtgttccccgagaacttcaccgagagagtgccctag

SEQ ID NO: 238797 - protein, 775 aa, Artificial Sequence
  derived and/or modified sequence
MLPPLIDPWDPGLTARDLLFRGGCRYRKRPRVVLDVTEQISRFLLDHGDVAFAPLGKLMLENFKLEGAGSRTKKKTVVSVKKLLQDLGGHQPWGCPWAYLSNRQRRFSILGGPILGTSVASHLAELLHEELVLRWEQLLLDEACTGGALAWVPGRTPQFGQLVYPAGGAQDRLHFQEVVLTPGDNPQFLGKPGRIQLQGPVRQVVTCTVQGETLLAVRSDYHCAVWKFGKQWQPTLLQAMQVEKGATGISLSPHLPGELAICSRSGAVCLWSPEDGLRQIYRDPETLVFRDSSSWRWADFTAHPRVLTVGDRTGVKMLDTQGPPGCGLLLFRLGAEASCQKGERVLLTQYLGHSSPKCLPPTLHLVCTQFSLYLVDERLPLVPMLKWNHGLPSPLLLARLLPPPRPSCVQPLLLGGQGGQLQLLHLAEGASVPRLAGPPQSLPSRIDSLPAFPLLEPKIQWRLQERLKAPTIGLAAVVPPLPSAPTPGLVLFQLSAAGDVFYQQLRPQVDSSLRRDAGPPGDTQPDCHAPTASWTSQDTAGCSQWLKALLKVPLAPPVWTAPTFTHRQMLGSTELRREEEEGQRLGVLRKAMARGQLLLQRDLGSLPAAEPPPAPESGLEDKLSERLGEAWAGRGAAWWERQQGRTSEPGRQTRRPKRRTQLSSSFSLSGHVDPSEDTSSPHSPEWPPADALPLPPTTPPSQELTPDACAQGVPSEQRQMLRDYMAKLPPQRDTPGCATTPPHSQASSVRATRSQQHTPVLSSSQPLRKKPRMGF

SEQ ID NO: 238798 - protein, 392 aa, Artificial Sequence
  derived and/or modified sequence
MLKWNHGLPSPLLLARLLPPPRPSCVQPLLLGGQGGQLQLLHLAEGASVPRLAGPPQSLPSRIDSLPAFPLLEPKIQWRLQERLKAPTIGLAAVVPPLPSAPTPGLVLFQLSAAGDVFYQQLRPQVDSSLRRDAGPPGDTQPDCHAPTASWTSQDTAGCSQWLKALLKVPLAPPVWTAPTFTHRQMLGSTELRREEEEGQRLGVLRKAMARGQLLLQRDLGSLPAAEPPPAPESGLEDKLSERLGEAWAGRGAAWWERQQGRTSEPGRQTRRPKRRTQLSSSFSLSGHVDPSEDTSSPHSPEWPPADALPLPPTTPPSQELTPDACAQGVPSEQRQMLRDYMAKLPPQRDTPGCATTPPHSQASSVRATRSQQHTPVLSSSQPLRKKPRMGF

SEQ ID NO: 238799 - DNA, 2328 bp, Artificial Sequence
  derived and/or modified sequence
atgctgccccccctgatcgacccctgggaccccggcctgaccgccagagacctgctgttcagaggcggctgcagatacagaaagagacccagagtggtgctggacgtgaccgagcagatcagcagattcctgctggaccacggcgacgtggccttcgcccccctgggcaagctgatgctggagaacttcaagctggagggcgccggcagcagaaccaagaagaagaccgtggtgagcgtgaagaagctgctgcaggacctgggcggccaccagccctggggctgcccctgggcctacctgagcaacagacagagaagattcagcatcctgggcggccccatcctgggcaccagcgtggccagccacctggccgagctgctgcacgaggagctggtgctgagatgggagcagctgctgctggacgaggcctgcaccggcggcgccctggcctgggtgcccggcagaaccccccagttcggccagctggtgtaccccgccggcggcgcccaggacagactgcacttccaggaggtggtgctgacccccggcgacaacccccagttcctgggcaagcccggcagaatccagctgcagggccccgtgagacaggtggtgacctgcaccgtgcagggcgagaccctgctggccgtgagaagcgactaccactgcgccgtgtggaagttcggcaagcagtggcagcccaccctgctgcaggccatgcaggtggagaagggcgccaccggcatcagcctgagcccccacctgcccggcgagctggccatctgcagcagaagcggcgccgtgtgcctgtggagccccgaggacggcctgagacagatctacagagaccccgagaccctggtgttcagagacagcagcagctggagatgggccgacttcaccgcccaccccagagtgctgaccgtgggcgacagaaccggcgtgaagatgctggacacccagggcccccccggctgcggcctgctgctgttcagactgggcgccgaggccagctgccagaagggcgagagagtgctgctgacccagtacctgggccacagcagccccaagtgcctgccccccaccctgcacctggtgtgcacccagttcagcctgtacctggtggacgagagactgcccctggtgcccatgctgaagtggaaccacggcctgcccagccccctgctgctggccagactgctgcccccccccagacccagctgcgtgcagcccctgctgctgggcggccagggcggccagctgcagctgctgcacctggccgagggcgccagcgtgcccagactggccggccccccccagagcctgcccagcagaatcgacagcctgcccgccttccccctgctggagcccaagatccagtggagactgcaggagagactgaaggcccccaccatcggcctggccgccgtggtgccccccctgcccagcgcccccacccccggcctggtgctgttccagctgagcgccgccggcgacgtgttctaccagcagctgagaccccaggtggacagcagcctgagaagagacgccggcccccccggcgacacccagcccgactgccacgcccccaccgccagctggaccagccaggacaccgccggctgcagccagtggctgaaggccctgctgaaggtgcccctggccccccccgtgtggaccgcccccaccttcacccacagacagatgctgggcagcaccgagctgagaagagaggaggaggagggccagagactgggcgtgctgagaaaggccatggccagaggccagctgctgctgcagagagacctgggcagcctgcccgccgccgagcccccccccgcccccgagagcggcctggaggacaagctgagcgagagactgggcgaggcctgggccggcagaggcgccgcctggtgggagagacagcagggcagaaccagcgagcccggcagacagaccagaagacccaagagaagaacccagctgagcagcagcttcagcctgagcggccacgtggaccccagcgaggacaccagcagcccccacagccccgagtggccccccgccgacgccctgcccctgccccccaccaccccccccagccaggagctgacccccgacgcctgcgcccagggcgtgcccagcgagcagagacagatgctgagagactacatggccaagctgcccccccagagagacacccccggctgcgccaccacccccccccacagccaggccagcagcgtgagagccaccagaagccagcagcacacccccgtgctgagcagcagccagcccctgagaaagaagcccagaatgggcttctag

SEQ ID NO: 238800 - DNA, 2328 bp, Artificial Sequence
  derived and/or modified sequence
atgctccctcccctgattgacccatgggacccaggtctgactgcgcgggacttgctgtttaggggtggctgccggtataggaagcgtcctcgcgtggtgctggacgtgaccgagcagatatcccgatttttattagaccacggtgacgtagccttcgcgcccttaggaaaattgatgttggaaaatttcaaactcgaaggggccggaagtcgtacaaaaaaaaaaacagtggtcagtgtgaagaagcttcttcaagatctcggcggacatcagccttggggatgcccctgggcctatctttctaaccggcagcgccgtttctcaattctgggcggacccattctcgggacgtctgtcgcaagccatttggctgagctgttgcacgaagagctggtgctcagatgggagcagctcttgctagatgaggcctgtaccggcggagcgctggcctgggtgccggggagaacaccccagtttggacagctggtctatccagcagggggcgcacaagaccgtctgcactttcaagaggtagttctgacccccggagacaatccccaatttctaggcaaaccagggcgcattcagctccaaggccctgtgcgccaagttgttacttgcaccgtgcagggcgagacgctactggcggttcggtcagactaccactgtgcggtgtggaaattcgggaaacagtggcagcccaccttactccaagcgatgcaggtggagaagggggccactggtattagtttgtcaccacacctgccaggagaacttgctatctgttcccgaagcggcgccgtgtgcctctggtctccggaggatggactccgacagatctatagagatcccgaaactttggtgttccgggattcctctagttggcggtgggcagattttacagcccatccccgcgtgctgacagtgggggataggacaggtgtgaaaatgctggacactcaagggccacctggctgtggcctgcttttgtttagactaggagctgaggcatcctgtcaaaagggtgagagggtgctactcacccagtatctcggccacagcagccccaagtgtttgccacctacgctgcaccttgtgtgcacacagttctcactgtatctggtggacgagagattacccctcgtgcccatgctgaagtggaatcatggattaccatcacccctcctcctggcccggctgcttcccccaccacggccatcctgtgttcagcctttgttgctggggggacaggggggccaactccagcttctgcatctggccgagggggcttctgtgccgcggcttgccgggccaccgcaaagtctcccgtcccggatcgactcactgcctgcttttccactgctggaacctaagatccagtggagactccaagagcgtttgaaagccccaacgatcggattagccgccgtggtgcctcccctgcccagcgcccctacacccggactagtcctcttccagctgtcagccgccggcgacgttttctaccagcagcttcgcccgcaggtcgacagctcactgaggcgtgacgcaggtcctccaggcgacacacaacccgactgccacgccccaacggcttcttggacttctcaggacacagccggctgctcacagtggctgaaggcgctgctaaaggtgccactggcacccccagtttggacggctcccacttttacacataggcaaatgttggggtccaccgagctgcggagggaggaggaagagggccagcgcttaggggtgcttcggaaggcgatggcgagaggccagcttctcctgcagagagatctgggttcattgccagctgcagagccacctcctgccccagagtccggtctggaagacaagctgagcgaaaggctcggggaagcatgggcgggcaggggggctgcatggtgggaacgccaacaggggcgaacaagcgagccaggccgacaaactagaaggccaaaacggcgtacccagctctctagcagcttttccctgagcggacatgtcgacccgagcgaggacacgagcagcccccacagcccagagtggcccccggccgacgcccttccccttccacctaccacgcctccctctcaggagcttacaccagatgcctgtgcacaaggagtgccttcagaacaaaggcagatgctgcgggactatatggctaaactccctcctcaacgcgacacaccagggtgcgccacaacacccccacattcccaagcctccagcgtgagagctacccggtcccagcagcatacgcctgttttaagtagcagtcagccacttaggaagaagccgcgtatgggcttctag

SEQ ID NO: 238801 - DNA, 2328 bp, Artificial Sequence
  derived and/or modified sequence
atgctgccccccctgattgacccctgggaccccggcctgacagcccgggacctgctcttccggggcggctgccgctacaggaagaggccccgggtggtgctggatgtgacagagcagatcagccgcttcctgctggaccatggagatgtggcctttgcccccctgggcaagctgatgctggagaacttcaagctggagggcgccggcagcaggaccaagaagaagacagtggtgtctgtgaagaagctgctgcaggacctgggcggccaccagccctggggctgcccctgggcctacctgagcaaccggcagaggcgcttcagcatcctgggcggccccatcctgggcacctctgtggccagccacctggccgagctgctgcacgaggagctggtgctgcgctgggagcagctgctgctggatgaggcctgcacaggaggagccctggcctgggtgcccggccgcaccccccagtttggccagctggtgtacccagctgggggcgcccaggaccggctgcacttccaggaggtggtgctgacccctggggacaacccccagttcctgggcaagccaggccgcatccagctgcagggccctgtgcggcaggtggtgacctgcaccgtgcagggcgagaccctgctggccgtgcggagtgactaccactgtgctgtgtggaagtttgggaagcagtggcagcccaccctgctgcaggccatgcaggtggagaagggggccaccggcatcagcctgagcccccacctgcccggggagctggccatctgcagccgctctggagctgtgtgcctgtggagcccagaagatggcctgcggcagatctacagagatcctgagaccctggtgttccgggacagcagctcctggcgctgggccgacttcaccgcccacccccgggtgctgactgtgggggacagaactggagtgaagatgctggacacccagggccccccaggctgcggcctgctgctcttccggctgggcgctgaggccagctgccagaagggggagcgggtgctgctgacccagtacctgggccacagcagccccaagtgcctgccccccaccctgcacctggtgtgcacccagttcagcctgtacctggtggatgagcggctgcccctggtgcccatgctgaagtggaaccacggcctgcccagccccctgctgctggcccggctgctgcccccaccccggcccagctgtgtgcagcccctgctgctgggcggccagggcggccagctgcagctgctgcacctggccgagggcgcctctgtgccccggctggccggccccccccagagcctgcccagcagaattgacagcctgcctgccttccccctgctggagcccaagatccagtggaggctgcaggagcggctgaaggcccccaccatcggcctggccgctgtggtgccccccctgcccagcgcccccaccccaggcctggtgctcttccagctgtctgctgctggagatgtgttctaccagcagctgcggccccaggtggacagcagcctgcggagagatgctggccccccaggggacacccagcctgactgccacgcccccacagcctcctggaccagccaggacacagctggctgcagccagtggctgaaggccctgctgaaggtgcccctggcccctcctgtgtggacagcccccaccttcacccaccggcagatgctgggcagcacagagctgcggcgggaggaggaggagggccagaggctgggcgtgctgaggaaggccatggcccggggccagctgctgctgcagagggacctgggcagcctgcctgctgctgagcccccaccagcccctgagagcggcctggaggacaagctgtctgagcggctgggggaggcctgggccggccgcggggccgcctggtgggagcggcagcagggccgcaccagcgagcccggccggcagacccggcggcccaagaggaggacccagctgagcagcagcttcagcctgagcggccacgtggaccccagcgaggacaccagcagcccccacagccctgagtggcccccagcagatgccctgcccctgccccccaccaccccacccagccaggagctgaccccagatgcctgtgcccagggcgtgcccagcgagcagaggcagatgctgcgggactacatggccaagctgcccccccagagggacaccccaggctgtgccaccaccccaccccacagccaggccagctctgtgcgggccaccaggagccagcagcacacccctgtgctgagcagcagccagcccctgaggaagaagcccaggatgggcttctag

SEQ ID NO: 238802 - DNA, 2328 bp, Artificial Sequence
  derived and/or modified sequence
atgctgccccccctgatcgacccctgggaccccggcctgaccgcccgtgacctattattccggggcggctgtagatatcgcaaacgccctagagtcgtgcttgatgtgactgagcaaatatctcgatttctcctcgaccatggtgatgtggcctttgcccctcttggaaagctgatgctcgaaaacttcaagcttgaaggtgccggatctagaacaaagaagaagaccgtagtgtctgtgaaaaagctgctccaggacctaggcggtcatcagccttgggggtgtccttgggcttacctctccaatcgccagcggaggttttctatattaggggggcccatactggggacatcagtggcgtcccacttggccgaattgctgcatgaggagctcgtgttgcggtgggaacaactgctgctagatgaagcctgcaccggaggcgccctggcgtgggtgccaggccggacgccgcagttcggacagctggtctatcccgcgggcggcgctcaggatagactgcacttccaagaagtggtgctgacccctggagacaatccccagtttttggggaagcccggccggatccagctccagggaccagtcagacaggtggttacatgtacagtgcaaggtgagactctactggcagtgcgcagtgactatcactgtgcagtctggaaattcggcaaacagtggcagcctaccctgttgcaggctatgcaggtagaaaagggggccactggtatttcgctttctccccatctccctggagagctggctatctgctctcgctccggagcggtctgtctctggagtcctgaagacggactgcgccagatctatcgtgacccagaaactctcgtttttagggactcttcttcctggcgttgggccgactttactgcccatcctcgcgtgctaacggtgggcgatcgaaccggtgtcaaaatgctcgatactcagggtcctcctggttgcggattgctgcttttccggctcggggccgaggcttcctgccagaagggcgaacgtgtgctgctgacccagtaccttggccattcctcccccaaatgcttaccccccaccctgcatctggtttgcacccaattttctttatatctagtcgatgaacgcctgcctctggtcccgatgctaaagtggaaccacggcttgcccagtccgctcctgctggcccggttgctcccaccacctaggccgtcatgcgtgcagcccctgctcttgggaggacaaggcggtcagctgcagctgctgcacctcgcggagggtgcctctgtgccaaggttggcgggaccccctcagtctttaccatcacgaattgatagcctgcctgcatttcccctcctcgaacccaaaatccaatggagactgcaggagcggctcaaagcgcccaccataggactggccgccgtcgtccccccccttccgagtgcaccaacacccggactggtgctgtttcaactttccgccgcaggggacgttttttaccaacagctgagacctcaagtggacagttctctgagacgagacgccggaccacccggcgatacacaacctgactgtcacgcgcccactgcttcctggacatctcaggacaccgcgggatgttcacagtggcttaaggccttgttgaaagtgccactcgcaccccctgtctggactgcaccgacctttacacatagacagatgctcggctccacggagctgagaagagaagaagaagaaggtcagagacttggagtgctgagaaaagccatggcacgtggccagttattgctccaaagggacctaggaagcctacccgccgcagaacctccgcctgcaccagagtctggactcgaagataagctttctgaacggctaggagaggcctgggctggacgtggggcagcctggtgggaaagacagcaaggtagaacctctgaaccgggcagacagacccgccgccctaaacggcgcacacagttgagtagtagcttttccctgtcaggccacgttgatccctccgaggacacctccagcccccactctcccgaatggcctcctgctgacgctctgcctctgccgccaaccaccccgccgagccaagagctgacgccagacgcctgtgcgcagggcgttccctctgaacagcgccagatgcttagagattacatggccaagctgcctccgcagagagacacccccgggtgtgccacaaccccaccgcactctcaggcctctagcgttagggcaacacgttcccagcagcatacgcccgtcctgtcctcctcacaaccgctcagaaaaaaaccccggatgggattctag

SEQ ID NO: 238803 - DNA, 2328 bp, Artificial Sequence
  derived and/or modified sequence
atgctgcccccactgatcgacccctgggatcccggactgaccgcacgggatctgctgtttagaggcggatgccgttaccgaaagcgccctagagtggttctggatgtgacggagcaaatctctcggttcctgctagaccacggtgacgtcgcgttcgcccctctcggaaagctcatgcttgaaaattttaagctagagggggctggctccaggacaaaaaagaaaaccgtggtgtctgtaaaaaagttgctgcaggatctcggaggacaccaaccatgggggtgcccttgggcatacctgagtaatagacaaaggagatttagcatcttggggggacctattctgggtacatctgtggcctcacacctcgccgagcttctgcacgaagagctcgttctgcggtgggagcagctgttactcgacgaagcatgcacgggcggtgccttagcttgggttcccggtagaaccccccagttcgggcagctagtgtatccagctggaggtgcccaggaccgcctgcactttcaggaagtcgtcctgacacccggagataacccacaatttctcggtaaacccggaagaatccagttacaaggtcccgtcagacaggtagtaacatgcactgtccagggagagactcttctggctgtacgaagtgactaccactgtgccgtatggaaattcgggaagcagtggcagcctactctactgcaagcaatgcaggttgagaaaggtgctacaggaatttctctgagtccccatcttcccggtgaacttgccatctgctcccggtctggcgcagtttgcctgtggtcacctgaagacggactgcggcaaatttatcgcgaccccgaaaccttggtcttccgtgacagctcatcatggcgctgggccgattttaccgctcatccacgcgtcctcaccgtaggcgaccgtaccggtgtcaaaatgttagacacgcagggccctccgggatgtggactgcttttgtttcggcttggcgcagaagcctcttgccagaaaggtgagcgagtgctcctgacacagtatttaggacattcttccccgaagtgcctcccaccgacacttcacctggtgtgcacacagttcagtttgtatctggtcgacgagcgactgcctctggtgccaatgctaaaatggaaccacgggttgccctccccgttactcctagctcgtctgctacctccgccaaggccctcttgcgtgcagcctctcctgttggggggacaagggggtcaattacagctgctccacctggcagagggggcatcagtaccccgattggctggacctccgcagtctctacctagcaggatcgatagtctgccggcttttccccttctcgagcccaagattcagtggagactgcaggagcgattaaaggcacccaccattggcctggcggcagtggtgcccccattgcctagcgcacccacccccggtcttgttctctttcagctctctgcagcaggagacgttttctatcagcagctgcgaccccaagtggatagctcattacgacgcgatgcaggccctccgggtgacacccaacccgattgccacgcacctaccgcaagttggacttcccaggataccgccggttgttctcagtggctgaaggccttgcttaaggtgccgctcgcacccccagtgtggaccgcccctaccttcacgcataggcagatgttgggctctaccgagcttcgccgagaggaggaagagggacagcgcctcggcgtgcttcggaaagccatggcacgcggacaattactcctgcagagggatctggggtcactcccagcagcagagccaccacccgctcccgagagcgggctggaagacaagctgagtgagcgtttgggcgaagcttgggccggtcgcggagccgcttggtgggaacgacaacagggcagaacctctgaacctggacggcagacacggagaccaaagagacggactcagctgtcctcatcatttagtctgagcggacatgtggatccatctgaggacacttcttcccctcactccccagaatggccacctgcggacgccctcccgctgccccctaccaccccaccgtctcaggagttaacccctgacgcttgtgcacagggggtgcctagtgagcaaaggcagatgctgagagactacatggcaaaactgcctccccaaagggatacaccaggctgtgcaaccacaccaccacacagccaggcttcatccgtgcgggctactcggtcacagcagcatacacctgtcctgagctcaagtcagcctctcaggaagaagcccagaatgggcttctag

SEQ ID NO: 238804 - protein, 466 aa, Artificial Sequence
  derived and/or modified sequence
MPTRRWAPGTQCITKCEHTRPKPGELAFRKGDVVTILEACENKSWYRVKHHTSGQEGLLAAGALREREALSADPKLSLMPWFHGKISGQEAVQQLQPPEDGLFLVRESARHPGDYVLCVSFGRDVIHYRVLHRDGHLTIDEAVFFCNLMDMVEHYSKDKGAICTKLVRPKRKHGTKSAEEELARAGWLLNLQHLTLGAQIGEGEFGAVLQGEYLGQKVAVKNIKCDVTAQAFLDETAVMTKMQHENLVRLLGVILHQGLYIVMEHVSKGNLVNFLRTRGRALVNTAQLLQFSLHVAEGMEYLESKKLVHRDLAARNILVSEDLVAKVSDFGLAKAERKGLDSSRLPVKWTAPEALKHGKFTSKSDVWSFGVLLWEVFSYGRAPYPKMSLKEVSEAVEKGYRMEPPEGCPGPVHVLMSSCWEAEPARRPPFRKLAEKLARELRSAGAPASVSGQDADGSTSPRSQEP

SEQ ID NO: 238805 - protein, 1198 aa, Artificial Sequence
  derived and/or modified sequence
MPVIPALWEVEMGRSQGQEIETILANRSHSDSTPLPNFLSGSHRPECCTCRLLTASGAQDSLPFGRRLYSGPWRSCEEVCHVSVLSVLSTSCGLSLSLPIFPGWMEWLSPDIALPRRDEWTQTSPARKRITHAKVQGAGQLRLSIDAQDRVLLLHIIEGKGLISKQPGTCDPYVKISLIPEDSRLRHQKTQTVPDCRDPAFHEHFFFPVQEEDDQKRLLVTVWNRASQSRQSGLIGCMSFGVKSLLTPDKEISGWYYLLGEHLGRTKHLKVARRRLRPLRDPLLRMPGGGDTENGKKLKITIPRGKDGFGFTICCDSPVRVQAVDSGGPAERAGLQQLDTVLQLNERPVEHWKCVELAHEIRSCPSEIILLVWRMVPQVKPGPDGGVLRRASCKSTHDLQSPPNKREKNCTHGVQARPEQRHSCHLVCDSSDGLLLGGWERYTEVAKRGGQHTLPALSRATAPTDPNYIILAPLNPGSQLLRPVYQEDTIPEESGSPSKGKSYTGLGKKSRLMKTVQTMKGHGNYQNCPVVRPHATHSSYGTYVTLAPKVLVFPVFVQPLDLCNPARTLLLSEELLLYEGRNKAAEVTLFAYSDLLLFTKEDEPGRCDVLRNPLYLQSVKLQEGSSEDLKFCVLYLAEKAECLFTLEAHSQEQKKRVCWCLSENIAKQQQLAASPPDSKMFETEADEKREMALEEGKGPGAEDSPPSKEPSPGQELPPGQDLPPNKDSPSGQEPAPSQEPLSSKDSATSEGSPPGPDAPPSKDVPPCQEPPPAQDLSPCQDLPAGQEPLPHQDPLLTKDLPAIQESPTRDLPPCQDLPPSQVSLPAKALTEDTMSSGDLLAATGDPPAAPRPAFVIPEVRLDSTYSQKAGAEQGCSGDEEDAEEAEEVEEGEEGEEDEDEDTSDDNYGERSEAKRSSMIETGQGAEGGLSLRVQNSLRRRTHSEGSLLQEPRGPCFASDTTLHCSDGEGAASTWGMPSPSTLKKELGRNGGSMHHLSLFFTGHRKMSGADTVGDDDEASRKRKSKNLAKDMKNKLGIFRRRNESPGAPPAGKADKMMKSFKPTSEEALKWGESLEKLLVHKYGLAVFQAFLRTEFSEENLEFWLACEDFKKVKSQSKMASKAKKIFAEYIAIQACKEVNLDSYTREHTKDNLQSVTRGCFDLAQKRIFGLMEKDSYPRFLRSDLYLDLINQKKMSPPL

SEQ ID NO: 238806 - DNA, 3597 bp, Artificial Sequence
  derived and/or modified sequence
atgcctgtgattcccgctctttgggaggtcgagatgggaagaagtcagggccaggagattgagactattctcgcgaatcgaagtcacagcgattccacccctttaccaaacttcttgagcggctcccaccggcctgaatgttgcacgtgccggctgttgaccgcctctggggctcaagactctcttccatttggaagacgtttgtattctggcccctggaggagctgtgaggaggtgtgtcatgtctctgtgctgtccgtcctgtccactagttgcggactgagcctttctttaccaatctttcccggttggatggaatggctaagccccgacattgcccttccgcgacgagatgaatggactcagacttcccctgctcgcaagcgcattacacacgcaaaagtccaaggcgccggacagcttaggctttctatcgatgcccaggacagagttctcctactgcatattatagagggaaagggactgatttcaaagcaaccaggcacatgcgacccctacgtgaagatttccctgatccccgaggactcgcggcttcgtcaccagaagacacagacagtaccagactgccgagatcctgctttccatgagcactttttcttccctgtacaggaggaggacgaccagaagaggcttctggtgaccgtgtggaatcgcgccagtcagagccgtcaatctggactcattggatgtatgtcgttcggggtgaagtcattgcttacccccgataaagagatatctggatggtactatttgctaggtgagcatttgggaagaaccaagcacctgaaagtcgcaaggcgcaggctgagacccctgagggatcccctgctgcgaatgcctggaggcggtgacaccgaaaatggcaaaaagctcaagatcactatcccacgcggaaaggacggctttggctttaccatctgctgcgactcacccgtgagagtgcaggctgttgactctggagggccagctgaaagagccggactgcagcagcttgacactgtgctgcagctcaacgaacggcccgtcgagcactggaaatgcgttgagttggcccacgaaatccgttcctgtcccagtgaaattattctcttggtctggaggatggtgccgcaggttaagccagggcccgacggcggggttcttcgtcgtgcaagctgcaaaagcacgcatgacttacagtctcctcctaacaagcgcgagaaaaactgcacgcatggggtccaggccaggcccgagcagaggcatagttgccatctggtttgtgattccagtgacggcctcctgcttggtggatgggagaggtacaccgaagtggcaaagcggggcggccagcacacgctccctgcactgtctcgcgccactgctcctactgaccccaactatattatcctcgcaccacttaatcccgggtcacagctcctacgcccagtgtaccaagaagacaccatccctgaagagagtggcagccccagcaaggggaaatcctacactggattgggtaagaaaagcaggctgatgaaaacggttcaaaccatgaagggccacggcaattatcagaattgcccggttgtccgccctcatgccacccacagcagctacggaacctacgtcacgctcgcccctaaagtgcttgtcttcccagtatttgtgcagccactggacctctgtaaccctgcccgaactctgttactcagtgaagaattgcttctgtacgagggacggaacaaggcagccgaagttacgctgtttgcctattcagatctgctgttattcaccaaggaggacgaacccggacgctgtgacgtgctccgaaacccgctctacctgcaatccgtgaagctccaggagggtagctccgaagacctaaagttttgtgtgctttacctggccgaaaaggctgagtgtctgtttaccctcgaagctcactcacaggagcagaagaaacgcgtgtgttggtgcctctcagaaaacatcgcaaagcaacaacagctggccgcatcaccgccggacagcaagatgtttgaaacagaggcagacgaaaagagggaaatggccttggaggagggaaagggcccgggtgccgaggattcccctcccagtaaagaaccttctcctggtcaggaactgccgcctggacaggatctgcccccaaataaagattcaccaagtggacaggaaccagcaccctctcaagagccattatcgtcaaaggactcagccacatccgagggctccccgcccgggccagacgcacccccgagtaaagacgtacccccttgccaggaaccgcctcccgcgcaggacttgtctccgtgccaggatctgcccgccgggcaggagccactgcctcaccaagatccccttctgaccaaggacctgcctgcgattcaagagtcccctactcgggacctgcctccctgccaagacctccctccgtctcaagtgtccctgcctgcgaaggcgttgactgaggatacaatgtcttccggcgatctgctagccgctacaggagatccccccgcagctccaaggcctgcatttgtcattcccgaggtccggcttgattctacctactcccaaaaggccggcgcagaacaaggatgttcgggtgatgaagaagacgccgaggaagccgaggaggtggaagagggggaggaaggggaagaggatgaagatgaggatacatccgacgacaattatggggaacggtctgaagctaaacgtagttccatgatcgagacaggtcagggcgccgaggggggtctgagtttaagggtccaaaattctttgcgtaggcgcacccactctgaagggtccctgttacaggaaccccgcggcccatgtttcgcatcggacactacactgcattgcagcgatggagagggggccgcttcgacatggggcatgccttctccctccacactgaagaaagagctgggacggaacggcggcagcatgcaccatctgtccctgtttttcaccgggcataggaagatgagtggagcagatacagtgggagacgacgacgaggcctcccgtaaacgcaagtcaaagaaccttgctaaggacatgaaaaacaaactcgggatattccgcagaaggaacgagagccctggcgctccacctgcagggaaggccgataagatgatgaagagcttcaaacccacctccgaggaggccttgaaatggggtgagagccttgagaaactactggtgcacaaatacggactcgcggtcttccaggcattcctacggacagaattctcagaggagaatttggagttttggttggcctgtgaggactttaagaaggtgaagtcccaaagtaaaatggcatctaaagcaaaaaaaatcttcgctgagtatattgctattcaagcatgcaaggaggttaaccttgatagttacactcgcgaacatacgaaagacaatcttcagtcggtcactcgcggctgtttcgatcttgctcagaagcgtatcttcggcctaatggagaaagatagttatccaagatttttgaggagcgacctttaccttgaccttatcaaccagaagaagatgtctcctccgttgtag

SEQ ID NO: 238807 - DNA, 3597 bp, Artificial Sequence
  derived and/or modified sequence
atgccagtgatcccagccctgtgggaggtggagatgggaagatcccaaggacaggagatcgagacaatcttggctaacaggtctcacagcgactccacaccccttccaaacttcctgagcggctctcacaggcctgaatgctgcacttgtaggctgctaacagcctcgggagcccaggacagcctcccctttgggaggcggttgtactccggaccatggagatcttgtgaagaggtgtgtcacgtttcagttctgagtgtcttatctactagctgtgggctgtcactgtctttgccaattttccctggttggatggagtggctttctccagacatagcattgccacggagagacgagtggacgcagacttcacccgcgcggaagcgcataactcatgctaaagtgcaaggagcgggtcagctacggctcagtatcgatgcgcaggatagggtcctgcttctgcatatcattgaggggaagggcctgatctcgaagcagcccggcacttgtgatccttacgtcaaaatcagcctcattccagaggactcgcgactgcggcaccagaagacacagacagttcctgattgccgcgacccagcatttcacgagcatttcttcttccctgtccaggaagaagacgaccagaaaagactgttggtaaccgtgtggaacagagctagccagtcaaggcagagcggcctgattggctgcatgtccttcggcgtgaagagccttcttactcccgataaagaaatatctggatggtactatctgcttggcgaacatctcggccgtaccaagcacctgaaggtagccaggcgaagactgaggcctcttcgggacccccttttaaggatgcctgggggcggagataccgagaatggcaagaagctgaagattacaattcctagggggaaggacggtttcggctttacaatatgttgcgactctcctgtgagagtgcaggccgtggatagtggtggccctgccgaaagggcgggcttgcagcagctcgatacagtgctacagttgaacgagaggcccgtggagcattggaaatgcgtggagctcgctcacgaaattaggtcgtgcccaagcgaaattatcctgctagtgtggagaatggtgccccaagtgaaacctggacctgacggcggagtactgcgtcgggccagttgcaagtcaacacacgacctccaatcaccaccgaacaaacgtgagaaaaactgtacccacggtgtgcaagcaaggccagaacaaaggcatagttgccacctggtgtgtgactcgtcagacggacttctcctgggtgggtgggagaggtacactgaagtcgcaaaacgcggcggacagcataccttgcccgctttaagcagggctactgctccaaccgatcccaattacatcatcctcgcccccctgaatccaggatctcagttgctgcgccccgtataccaggaggacaccattccagaggaatctggaagcccctctaagggcaaatcctatactggcctgggaaagaagagtagattaatgaaaaccgtgcaaaccatgaagggccacggcaattatcaaaattgcccagttgtgcgtccgcacgccactcatagctcctacggaacctacgtcacattagcgccaaaggtgctggttttcccagttttcgtccaaccactcgacctgtgcaatccagcaaggaccctgctcctgagcgaggaactcctattgtacgagggccgcaacaaggctgccgaagttactctgtttgcctactccgaccttctcctgtttactaaggaagatgagcccggccggtgcgacgtattgagaaatcccctgtatctacagtcagtgaagctgcaggaagggtcttctgaggacctgaagttttgcgttctttacctggctgaaaaggctgagtgcctttttactctggaggcgcacagccaggaacagaaaaaaagggtgtgttggtgtctctctgagaatattgctaagcagcaacaactcgctgcctcacctcctgattccaagatgtttgaaactgaggcagacgagaagagggagatggccctggaggaaggcaaagggcccggagctgaggatagcccaccaagtaaagagcccagcccagggcaagagcttccccctggccaggatcttcctcctaacaaagactcgccgtccgggcaggaaccagccccatcccaggagcctctttcttccaaagactcagctacctctgagggctcgccccctggacctgatgctcccccaagcaaagatgtgccgccgtgccaggaacctcccccggcccaggatctttctccatgtcaggaccttccagctggtcaagagcccctgccgcaccaggaccctttgttaaccaaggacctgcccgccattcaggagagtccaacccgggatctgcccccatgtcaagatttgccaccaagccaggtgtctctgccagctaaggctttaacagaggacaccatgtcatcaggtgacctactagctgccacaggggaccctcccgccgcaccccgccctgctttcgtgatcccggaagtgcgcttggactccacatattctcagaaggcaggcgccgagcagggatgctccggcgacgaggaggacgccgaagaggccgaggaagtggaggaaggtgaagagggcgaggaggatgaagacgaggacacctccgacgataactatggcgagcgcagtgaagccaagcgttcttctatgattgagacagggcaaggtgcagagggaggactctctctgagggtgcaaaattctctgaggcgacggactcattcggagggctcactactgcaagagccccgggggccttgcttcgccagcgacactactttacactgttcagatggagaaggtgcggcctctacctgggggatgccaagcccctccacacttaaaaaagagctgggtcgaaacggtggcagcatgcatcatctttcattgttttttaccggacatagaaagatgtccggtgctgatacagtgggagacgatgatgaagcttcacgcaagagaaagagcaaaaaccttgccaaagatatgaagaacaagctgggaattttccgcaggcgcaacgagagtcccggcgctcccccagccggcaaagcagataagatgatgaaatccttcaaacccacttccgaggaggcgctgaaatggggggagtctctggagaagcttctggtacataaatatggactggcagtttttcaggcattcctgaggacagagttttcggaggaaaacctcgaattttggctggcctgtgaagatttcaaaaaagtaaaatctcagtctaaaatggcaagcaaggccaagaagatcttcgctgaatatattgccattcaggcctgcaaggaggtgaatctggatagctataccagggagcacacaaaggataacctccaatcggtgactaggggttgtttcgacctagcgcagaagaggattttcggacttatggagaaggattcctatccccggttcctccgcagtgatctctacctagatctgatcaaccagaaaaagatgagtccccctctgtag

SEQ ID NO: 238808 - DNA, 3597 bp, Artificial Sequence
  derived and/or modified sequence
atgcctgtgatcccagccctgtgggaggtggagatgggccgcagccagggccaggagattgagaccatcctggccaacagaagccacagcgacagcacccccctgcccaacttcctgagcggcagccacaggcctgagtgctgcacctgccgcctgctgacagccagcggggcccaggacagcctgcccttcggccggcggctgtacagcggcccctggaggagctgtgaggaggtgtgccacgtgtctgtgctgtctgtgctgagcaccagctgtggcctgagcctgagcctgcccatcttccctggctggatggagtggctgagcccagacatcgccctgcccaggagagatgagtggacccagaccagccctgccaggaagaggatcacccacgccaaggtgcagggcgccggccagctgcggctgagcattgatgcccaggacagagtgctgctgctgcacatcatcgagggcaagggcctcatcagcaagcagcccggcacctgtgacccctacgtgaagatcagcctcatccctgaggacagccggctgcggcaccagaagacccagacagtgcctgactgccgggaccctgccttccacgagcacttcttcttccctgtgcaggaggaggatgaccagaagaggctgctggtgacagtgtggaacagagccagccagagccggcagagcggcctgattggctgcatgagctttggagtgaagagcctgctgaccccagacaaggagatcagcggctggtactacctgctgggggagcacctgggccgcaccaagcacctgaaggtggcccggcggcggctgcggcccctgcgggaccccctgctgaggatgcctgggggcggggacacagaaaatggcaagaagctgaagatcaccatcccccggggcaaggatggcttcggcttcaccatctgctgtgacagccctgtgcgggtgcaggccgtggacagcggcggccctgctgagagagctggcctgcagcagctggacacagtgctgcagctgaatgaaagacctgtggagcactggaagtgtgtggagctggcccacgagatccgcagctgccccagcgagatcatcctgctggtgtggaggatggtgccccaggtgaagccaggcccagatggcggcgtgctgcggcgggccagctgcaagagcacccatgacctgcagagcccccccaacaagcgggagaagaactgcacccacggcgtgcaggcccggcctgagcagaggcacagctgccacctggtgtgtgacagcagtgatggcctgctgctgggcggctgggagcgctacacagaggtggccaagagaggaggccagcacaccctgcctgccctgagccgggccacagcccccacagaccccaactacatcatcctggcccccctgaaccctggcagccagctgctgcggcctgtgtaccaggaggacaccatccctgaggagagcggcagccccagcaagggcaagagctacacaggcctgggcaagaagagccggctgatgaagacagtgcagaccatgaagggccacggcaactaccagaactgccctgtggtgcggccccacgccacccacagcagctatggcacctacgtgaccctggcccccaaggtgctggtgtttcctgtgtttgtgcagcccctggacctgtgcaacccagcccggaccctgctgctgtctgaggagctgctgctgtatgagggcaggaacaaggctgctgaggtgaccctgtttgcctacagcgacctgctgctcttcaccaaggaggatgagcccggccgctgtgatgtgctgaggaaccccctgtacctgcagagcgtgaagctgcaggagggcagcagcgaggacctgaagttctgtgtgctgtacctggccgagaaggcagaatgtctcttcaccctggaggcccacagccaggagcagaagaagagggtgtgctggtgcctgtctgaaaatattgccaagcagcagcagctggccgccagccccccagacagcaagatgtttgaaacagaagcagatgagaagcgggagatggccctggaggagggcaaaggacctggagctgaggacagcccccccagcaaggagcccagccctggccaggagctgcccccaggccaggacctgccccccaacaaggacagccccagcggccaggagcccgcccccagccaggagcccctgagcagcaaggacagcgccaccagcgagggcagccccccaggcccagatgccccacccagcaaggatgtgcccccctgccaggagcccccaccagcccaggacctgagcccctgccaggacctgcctgctggccaggagcccctgccccaccaggaccccctgctgaccaaggacctgcctgccatccaggagagccccacccgggacctgcccccctgccaggacctgccccccagccaggtgtccctgcctgccaaggccctgacagaggacaccatgagcagcggggacctgctggccgccactggagaccccccagctgcccccaggcctgccttcgtcatccctgaggtgcggctggacagcacctacagccagaaggccggggctgagcagggctgcagcggagatgaggaggatgctgaggaggccgaggaggtggaggagggggaggagggggaggaggatgaagatgaggacaccagtgatgacaactatggagagaggtctgaggccaagaggagctccatgattgaaacaggccagggcgctgagggcggcctgagcctgcgggtgcagaacagcctgcggcggaggacccacagcgagggcagcctgctgcaggagccccggggcccctgctttgccagtgacaccaccctgcactgcagtgatggagagggcgccgccagcacctggggcatgcccagccccagcaccctgaagaaggagctgggcagaaatggaggctccatgcaccacctgagcctcttcttcaccggccacaggaagatgtctggagctgacacagtgggagatgatgatgaggccagcaggaagaggaagagcaagaacctggccaaggacatgaagaacaagctgggcatcttcagaagaagaaatgaaagccctggggcccccccagctgggaaggctgacaagatgatgaagagcttcaagcccaccagcgaggaggccctgaagtggggcgagagcctggagaagctgctggtgcacaagtatggcctggccgtgttccaggccttcctgaggacagagttcagcgaggagaacctggagttctggctggcctgtgaggacttcaagaaggtgaagagccagagcaagatggccagcaaggccaagaagatctttgctgagtacatcgccatccaggcctgcaaggaggtgaacctggacagctacacccgggagcacaccaaggacaacctgcagagcgtgacccggggctgctttgacctggcccagaagaggatcttcggcctgatggagaaggacagctacccccgcttcctgcggagtgacctgtacctggacctgatcaaccagaagaagatgagcccccccctgtag

SEQ ID NO: 238809 - DNA, 3597 bp, Artificial Sequence
  derived and/or modified sequence
atgcccgtgatccccgccctgtgggaggtggagatgggccggagccaaggacaggagattgagactatcttggcaaaccggtctcactcagattcaacccccctacctaatttcctgtctggatcccaccgccctgaatgttgtacctgccgacttttgactgccagcggcgcccaggatagcttgccatttggaaggcgcctgtacagcggtccttggcggtcttgtgaggaggtatgtcatgtgagtgtcctctccgtgctgagtactagttgcggacttagcctatcccttcctatctttcctggatggatggaatggctgagccccgacattgcactccctaggcgagacgagtggacccagacgtcccccgcaagaaaacgaattactcacgccaaagtccagggggcggggcaactccgcttaagtatcgacgctcaagaccgagtcctgcttttgcacattatagagggaaaggggctgatctccaagcagccagggacctgcgatccctatgtgaaaatttccctcattccagaagacagcaggttgaggcatcagaaaacgcagacagtacccgattgtagggaccccgcattccatgagcactttttttttcctgtccaggaggaggatgatcagaagaggcttctggtaacagtttggaatcgggcctcccagtccagacagagtggactcattggctgcatgagttttggggtaaaatctttgcttacaccagataaggagattagtggttggtactatttgctgggcgagcatcttggccgcactaaacacctgaaagtggcacggcgaagactacggccccttcgcgaccctctcctacgcatgccgggaggtggtgatacagaaaatggcaagaaactcaaaatcacaatcccgcgtgggaaagacgggtttggatttaccatctgctgcgactcccccgtgagagttcaggctgtggactcgggtggccccgctgaaagagcagggttgcagcagttggacacagtgctgcaattaaacgaacgacctgttgagcactggaaatgtgtggagctggctcacgaaatccggtcctgcccgtccgagatcatccttctggtctggcgtatggtgccccaggttaagccagggccagatgggggcgtgctgaggcgggccagttgcaagtctactcacgatctccagtcaccaccgaacaagagagaaaaaaattgcacccatggggtgcaggcccgccccgagcagaggcatagttgtcacttggtatgtgattcttctgacggtcttttgctggggggttgggagaggtatactgaagtggcaaagcgcggcggtcaacacacccttccagctctcagccgcgcaaccgcaccaaccgatcccaattacataatcctagcccctctgaaccctggatctcaactgctgaggcccgtctaccaggaggacactattcccgaggaaagtggttccccgagcaaaggcaagtcgtataccggactcggaaaaaaatcaagactaatgaaaacggttcagactatgaaaggccacggaaactaccaaaattgtcccgtcgtccgaccccatgcaactcatagcagttacggcacgtatgtgacactggctcccaaggtcttggtcttcccggttttcgtccaacccttagacctgtgtaatcccgccagaacgctcctgctttctgaggagctgctgttatacgaaggcaggaacaaagccgccgaggttactctgttcgcttattccgatctgctcctgtttacaaaagaggatgagcccgggcgctgcgacgtcctccggaatcctctatatttgcaatccgtgaagctgcaagagggcagttcagaagacttgaagttctgcgtgctgtatttagcggaaaaggccgagtgcctgttcaccttagaggcccattcacaggagcaaaaaaagagagtctgttggtgcctgtctgagaacatcgctaaacagcagcaattggccgcctcacctccagactccaagatgttcgagacagaagccgatgaaaagcgcgagatggccttagaagagggcaaaggcccaggcgccgaagactcccctcccagtaaggagccctcccctgggcaggagctgcctcccggacaggacctgccaccaaataaggatagcccatccggtcaggagcctgctccgtcccaggaacctctctcatcaaaagacagtgctacgagtgaggggagtcctcctgggccagatgccccaccgtcaaaagatgtgcccccgtgccaggagcccccccctgcccaagatctctcaccctgccaggacctgcctgccgggcaggagccactcccccatcaggatccactgcttacgaaggatctgccagctatccaagagtcacctactagggatctgcctccgtgccaagatctgccccctagtcaagtgtcccttccagctaaggctctcactgaagataccatgtccagcggagatctgctggcggctaccggagaccccccggctgcacctagacctgcgtttgtcatccctgaggtacgtctggactccacttacagtcagaaagctggggccgaacagggatgttccggcgatgaggaagatgccgaggaggcagaagaagtagaagagggagaggagggcgaggaggatgaagacgaggacacttctgacgacaactatggtgagcggtcggaagccaagcgaagcagcatgatcgagactggccaaggtgcagaaggcggactgagtcttcgcgttcagaacagtctgcgccgcaggacgcactccgagggttctctgttgcaggagccccggggcccatgctttgcctctgatacaaccctccactgcagtgacggtgagggtgccgcgagtacatgggggatgccatccccttcaacactgaagaaagagttggggcgaaatggcggatccatgcaccacctgtcactatttttcaccggacatagaaagatgtctggagcagacacagtgggggacgatgatgaggccagtaggaaacgcaagtcaaagaacctggctaaggacatgaaaaataagctggggatcttccgaagaaggaacgaatcacccggagctcctcctgccggaaaagctgataagatgatgaaatccttcaaaccaacaagcgaagaggccttaaagtggggagagtccctcgagaagcttttggtccacaagtacggccttgcagtctttcaggccttcctcagaactgaatttagcgaagaaaacctggagttttggttagcttgtgaggatttcaagaaagtgaagagccagagcaagatggcctcaaaggccaagaagatattcgccgagtacattgccatccaagcctgtaaggaagtgaacctggatagctatactcgcgagcatacgaaggacaatctccagagtgttactcggggctgtttcgatctcgcacaaaagagaatcttcggattaatggagaaagacagctacccccgttttttacgcagtgatctgtatcttgatttgatcaaccagaaaaaaatgtctcctccactgtag

SEQ ID NO: 238810 - DNA, 3597 bp, Artificial Sequence
  derived and/or modified sequence
atgcccgtgatccccgccctgtgggaggtggagatgggccggagccagggccaagaaattgaaacaatcttagccaatcgctcccatagcgacagcactccactgccaaattttctgtcaggaagtcaccggccggagtgttgtacttgccggctgctgacagccagcggcgctcaggactccctaccctttgggaggagactttactccggaccatggaggtcgtgcgaggaggtttgccacgtctccgtgttgagtgtgctgagcactagctgcggcctaagtttgagcctgccaattttccctggctggatggagtggcttagtcccgacatcgctctcccccgccgcgacgaatggacccagacgagcccagccaggaagaggatcacccacgcaaaggtccagggcgccggtcagctccgcctaagcatcgatgctcaggacagggtcctgctactgcatataatcgagggcaagggtctcatttccaagcagcccggtacatgcgacccttatgtcaagatctccctcatccctgaagatagtcgactgaggcatcaaaagacacagacggtaccagattgcagggatccggcctttcacgagcattttttcttcccagtccaagaagaagatgatcagaaaagactgctggtgactgtttggaatcgtgctagtcagtctcggcagtctggattgattggatgcatgagttttggcgtgaagtccctgctgactcccgataaggaaatctcaggttggtactatttgctgggggagcatctggggagaacaaagcaccttaaggtcgcgaggcgaagattgcggccactacgggaccccctgttacgtatgcctggaggtggggacactgagaatggaaagaaactcaagatcacgattcccaggggaaaagatgggtttgggtttacaatctgctgtgactcacccgtgcgtgtccaggccgtggactctggaggccccgccgagcgagctgggctgcaacagctcgacacggtgctgcagctgaacgaacgccccgttgaacactggaaatgcgtggagctggctcatgagattcggtcctgcccaagtgagattatcctgcttgtgtggcggatggtaccacaggttaagccaggacccgacgggggcgtactgcgccgagccagttgcaagagcacacatgacctgcagtctccccccaacaagcgtgagaaaaactgtacacacggggtgcaggctcgccctgagcagcgccactcgtgtcatctggtgtgtgattccagtgatggacttctcctgggaggatgggagcgctacactgaagtggccaagcggggagggcagcatacgctcccagcacttagcagagccactgcacctaccgaccccaattacatcatcttagctccactgaatcccggctcccagcttctgcggccagtatatcaagaggacacgattcccgaagaatcaggaagccccagcaaaggcaaatcctatacaggactcggtaagaaatcccgcctaatgaagacagttcagacaatgaaaggtcatggcaactaccagaactgcccagttgtgcggccacacgctacacacagctcatacgggacatacgtaacacttgcacccaaagtgttggtgtttcccgtgttcgtacagccactcgatctgtgcaacccagctcgtacactgctgttgtcagaagaactgctgctgtacgagggtagaaacaaagccgccgaagttaccttattcgcttattccgacctcctgctcttcactaaagaggacgagcccggcagatgcgacgtgttgaggaacccactgtacctccagagcgttaaattacaggagggatcaagtgaggatttaaagttttgtgttctgtatctagccgagaaggctgagtgcctgttcacccttgaggcacattcccaggaacaaaagaagagagtttgttggtgtctgagcgaaaatatcgcaaaacagcagcagctagctgcatcacctcccgacagcaagatgttcgagacagaggccgacgaaaagagggaaatggcgctcgaagaggggaaggggcctggcgctgaggactctcctccgtctaaagagcccagccctgggcaagagctcccacccggacaggacttgcccccaaacaaagactcgccaagtggccaggagccagcaccgtctcaggagcctttatcgtccaaagatagcgcgacttccgagggctccccaccggggccagatgctccaccctccaaagatgtgcctccttgccaggaaccaccgcccgcacaggacctttctccctgtcaagatcttcctgcgggtcaggagccattgccccatcaggatcccttactcaccaaagacctccccgcaatccaagaatcccccacgagggatctccctccttgccaagacttacccccttctcaggtatccctcccggccaaagcgcttaccgaggatacaatgagctccggagacctgctggctgccactggagaccctcctgccgcccccagaccagcttttgtgatcccagaagttaggttggattccacttactctcagaaggctggtgcagagcaggggtgtagtggagatgaggaggatgccgaagaggctgaggaggtggaagaaggggaggagggtgaggaagacgaggacgaggacacatctgatgacaactatggcgagcggagcgaagccaaacgttcctctatgattgagaccggtcaaggtgctgagggcgggctctcccttagagtgcagaattcactgaggcgccgaacacactcagaggggagcctcctccaggaacctcggggtccttgtttcgctagcgacacgacactgcactgtagcgatggagagggcgccgcctccacctggggaatgccgagcccctcgaccttgaaaaaggagctgggcagaaacgggggctcaatgcatcacttgtcactattcttcaccggccaccgcaaaatgtccggggccgacaccgtgggcgatgacgatgaagcgtctcggaagcgcaaatctaaaaatttagcaaaagacatgaaaaacaaattagggatcttcaggaggagaaatgaatcccccggagcacctcccgccgggaaggcagataagatgatgaagtcattcaaacccacttcagaagaggctctcaagtggggcgaatcgctggagaagctcctcgtgcacaaatatggtctggcagttttccaggcctttctgcggacagaattctcagaagagaacctcgaattctggctggcgtgcgaggatttcaagaaggtgaagagccagagcaaaatggcctcgaaagccaagaaaatcttcgccgaatatatcgcgatccaagcatgcaaagaggtgaacctagatagttacacccgcgagcacacaaaggataacttacagagcgtcacacgcgggtgtttcgacttggcacagaagagaatcttcggtctcatggagaaagactcatacccaaggtttttacgctccgacttgtatctggatctcattaaccaaaagaaaatgagtcctccactgtag

SEQ ID NO: 238811 - DNA, 3597 bp, Artificial Sequence
  derived and/or modified sequence
atgcccgttatccccgcactttgggaggtggagatgggtagaagccagggacaggaaatcgaaaccatcctggctaacagatcacactctgactctacccccctgccaaattttctaagtggcagccatagaccagagtgctgcacttgtagactgctcactgcatcaggggcacaggatagcctgccctttggcagacgtctttacagtggcccttggagatcctgtgaagaagtctgtcatgtgtcggtcctctcagtactctcgaccagctgtggtttgtctctcagcctcccaatattccccggatggatggagtggctgagcccagacattgcgctgcccagaagagatgaatggactcagacatcaccagcccgtaagcggataacgcacgccaaagtccagggagctggtcagctcaggctgagcatagatgctcaggacagagtcctactcctgcacataatcgagggtaaaggtctgatctccaagcagccgggaacgtgtgacccttacgtgaagatatccctaatccctgaagactcccggctacgtcaccagaagacacagaccgtgccggattgtagggatccggcatttcatgagcatttcttcttcccggtccaggaggaggacgatcagaaacggctgcttgtgaccgtttggaatcgtgcctcccaatcgcgccagtctggcctgattggctgcatgtcctttggcgttaaatccttactgactcctgacaaggaaatttcgggatggtactacctcttgggcgagcacctgggacgcaccaagcatttaaaagtcgcacgccgtagactgagacccctgagagaccccctcctgcggatgcccggtggcggagatactgagaacggcaaaaagctgaagattaccattcccaggggaaaggatgggttcggctttactatttgttgcgatagcccagttagagtacaagcggtggatagtggcggtccagcggagcgagctggattacaacaactggatacagtcctgcagctaaacgagagaccggtagagcattggaagtgtgttgagttagctcatgagatcaggtcatgtccaagcgagatcatcctgttggtctggcgcatggtcccacaggttaaaccgggaccagatggcggtgttctgagaagggcaagttgtaagtccactcatgacctccagagtccgcctaacaaaagagagaaaaactgcacccacggcgtgcaggcacgtcctgagcagaggcattcatgtcatctggtatgcgattcatctgatggactgttgttgggtgggtgggagaggtacacggaggtcgcaaagaggggcggacagcacacactgccggctttgagtcgggctactgcacctaccgatccaaactatattatactggccccacttaatcccggaagccaactgctgcgcccagtgtatcaagaagacaccatcccggaagaaagcggctcccctagcaagggcaaatcatacactggacttggcaaaaagagtaggttgatgaaaacagtgcagaccatgaaaggacacggaaactaccaaaattgcccggtggtccgacctcacgcaacccactcctcctatggcacctatgttaccctggctcccaaggtcctcgtgttccctgtgtttgtgcagcccttggacctgtgcaatcccgctcgcacactgctgctcagcgaggagttgctgctctatgagggacgcaacaaggcagccgaggtgacattgttcgcttattccgacctgctgctgtttacaaaggaggatgaacccggaaggtgtgacgtgctgcggaaccctttgtatttgcagtcagtcaagttacaagaaggatccagcgaggacctaaaattttgtgtgctctacttagcggagaaggctgaatgcctcttcaccctggaggcacattcgcaggaacagaagaagcgggtgtgctggtgtctgtcggaaaacatcgccaagcagcagcagctggccgcaagtccccctgactccaaaatgttcgaaactgaggccgacgagaagcgcgaaatggccctggaagagggcaagggcccaggcgctgaagattctcccccttcaaaagagcccagtccaggccaggaattgcctccaggtcaggatctgccgccaaataaggattccccgtccggccaggaacccgcacctagccaggagccactgtctagcaaagactccgctacgagcgagggctctccccctggccctgatgcacccccatcaaaagacgtgcccccatgtcaggagccaccccctgcccaagatctctcaccttgccaggacctccctgcgggacaggagcccctgccacaccaagacccactgctgactaaagaccttcctgccatccaggaatcgccgacccgcgacttgccaccatgccaggacctgccacccagccaagtgtcccttccagcaaaggcccttacagaggatacaatgtcttcgggcgatctgctcgcagccaccggcgatcccccagcggctcctcgaccggcttttgttatccccgaggtccgtcttgattctacttacagccagaaggctggcgcagagcagggctgttccggcgatgaagaggacgccgaggaagctgaagaagtcgaggaaggtgaagaaggggaagaagacgaggatgaggatacctccgacgacaactatggggagaggtcggaagccaagaggagtagcatgatcgagaccgggcagggggctgaaggcggtttgagccttcgggtacaaaactccctgcgcaggcgaacacactctgaaggcagcctcctccaggagcctcgcggaccatgctttgccagtgataccacccttcattgttcagatggagagggggctgcctccacatggggcatgcctagccctagcaccctcaaaaaagagctgggtcgcaatgggggaagcatgcatcacctgtctttgtttttcaccggtcataggaagatgtcaggcgctgatactgtgggcgacgatgacgaggcctcccgtaaacgcaagtcgaaaaatctggcgaaggacatgaaaaataagctgggcatatttcgcaggagaaatgagtcacccggagcccctcctgctggtaaagcggataagatgatgaaaagcttcaaacctacatctgaagaagccttgaagtggggtgagagccttgaaaaacttctcgtgcataagtacggccttgcagtctttcaggcctttctgaggaccgaattctccgaggaaaacttggaattttggctcgcctgtgaggactttaagaaggtgaagtctcagtccaagatggcctctaaggccaaaaaaatcttcgcagaatacattgcaattcaagcctgtaaagaggttaatctggacagctatactcgtgagcacaccaaggacaacctgcagagcgttacaagggggtgcttcgacctagcccaaaaaagaatatttggcctgatggagaaggattcctatccaagatttttacgcagtgatctttacttggacttgataaaccagaagaagatgtccccgccattatag

SEQ ID NO: 238812 - DNA, 3597 bp, Artificial Sequence
  derived and/or modified sequence
atgccagtgatccccgcactgtgggaggtcgaaatggggaggtcacaaggacaggaaatcgagaccatactcgctaacaggtcacatagcgattcaacaccattaccaaacttcctgtctggctctcaccgacctgagtgttgcacatgtcgcctgctgacagcttcaggggcacaggactctctgcccttcggacggagactttacagcggcccttggcggtcctgtgaggaggtatgccatgttagcgtgttgtcagtgttgagtacctcgtgtggattaagtctaagtctccccattttccctggctggatggagtggctttcaccagacattgcccttccaaggagagacgaatggacccagacatcccctgcccgaaagcggattacccatgctaaggtccagggggctggacagttgaggctgagtatcgacgcccaggaccgcgtgcttttgctgcacatcatcgagggcaaaggattgatctcaaaacagccgggaacctgcgacccctatgtgaaaatatcccttatccccgaggattcccgactgcggcaccaaaagacgcagaccgtgccagattgcagagatccagcctttcatgaacatttcttcttccctgtgcaagaagaagacgaccaaaaaaggctcctagttactgtatggaacagagcctcacagagccgccagtccgggctgattggctgtatgtccttcggagtcaagagcctgctgacgccagacaaagagatctcaggctggtactacctgttgggagagcacctgggccgtactaaacacctgaaggtggcacgcagacgcttgaggccgttgagagatccgcttttgcggatgcctgggggtggggacactgaaaatggaaaaaagctcaagataaccattcctcgaggcaaagacgggttcggcttcaccatttgctgtgactcccccgttagagtgcaggctgttgattcgggagggcctgcagagagagcagggctgcagcaactcgacaccgtacttcagctgaacgaacgcccagtggagcactggaaatgcgtcgagcttgcccacgaaatcagatcatgcccgagcgagattatcctgctcgtatggcggatggtgccacaggtaaagcctggacccgacggaggggtgctcaggcgtgcatcctgtaagtctacccacgacctccagtcaccccctaacaaaagggagaaaaattgtacgcacggtgtccaagccagacccgagcaaagacactcttgtcacctggtgtgcgactctagtgatggtctactactgggcggttgggaaagatacaccgaagtggccaagagaggtggccagcacaccctgcccgcattaagccgcgcaactgccccaacagaccctaactacattatcctggccccactgaacccgggtagtcagctccttaggccggtttatcaggaggataccattccagaggaatcaggctcaccttccaaagggaaatcctacaccggtttaggcaaaaagtcgcgcctcatgaaaacagttcaaaccatgaaagggcacggcaactatcagaattgcccggtggtgcgtccccatgccacacatagcagttacggcacatatgtaaccctggctccaaaggtgttggtgttccctgtctttgtgcaaccacttgacctatgtaaccctgcgagaacccttctgctttccgaggaactgttactgtacgaagggagaaataaggcagccgaggttacattattcgcctactcagaccttcttttgtttaccaaagaggatgagcctggaaggtgtgacgtccttcggaaccctctgtatctgcagtcagtgaagctgcaggaagggagttcagaagacctcaaattttgcgtactttacctagccgaaaaggcagaatgcctgtttactctggaagcgcattctcaggagcagaagaaacgggtctgctggtgtctcagcgagaatatcgctaaacagcagcagcttgccgctagtccccctgacagcaagatgtttgaaacagaggccgatgagaagagagagatggcactggaagaagggaagggtcccggagccgaggatagtccgccatctaaagagccgtcccccggtcaagagcttccacccggtcaggatctgccccctaataaagattcaccatctggccaagaacctgccccttcacaggaaccgctgtcttccaaggactcagctacaagtgaggggagtccgcctggccctgatgcccctccttcgaaagacgtgccaccatgccaagagcccccaccagcccaagacctcagcccctgccaggatctgcccgcaggacaggaacctctgcctcatcaggaccccttactcacaaaggacctgccagcgattcaggaatcccccacccgggatctgcccccatgtcaggatctgcccccatctcaggtatccctgcctgctaaagcacttaccgaagacacgatgagttccggggatctccttgcggcaaccggtgacccacccgctgcgcctcgaccagcatttgtcatacctgaggtgagactggactccacttacagtcaaaaggccggtgccgagcaagggtgttctggggacgaagaggatgccgaggaggcagaagaagtggaagagggagaagaaggtgaagaggacgaggacgaggatacctccgacgacaattacggggaaagatcagaggcaaagcgtagctccatgatcgaaacagggcagggagcggagggcggtttaagcctccgagtgcaaaattccctgcgcagacgcacccactccgaagggtcattgttgcaggagccgaggggaccgtgttttgcatcggacaccactctgcactgtagcgacggagaaggtgctgcctctacgtggggcatgccatcgccttctacactgaaaaaggagctgggtaggaacgggggtagtatgcatcatttgagtctcttttttacagggcacaggaagatgagtggggcagacaccgtaggggatgatgacgaggcctcaagaaagcgtaagtctaaaaatctcgccaaggatatgaagaacaagttgggcatcttcaggagacgcaacgagtcccccggagccccacccgcaggcaaagctgataagatgatgaaaagctttaaacctacctccgaggaggctttgaagtggggtgagagccttgaaaaactgctcgtccataagtacggattggcggtgtttcaggccttcctccgaactgaattttctgaagagaacctggaattctggttagcatgcgaggactttaagaaggtgaaaagtcaatccaaaatggcctctaaggctaagaagatctttgctgaatatattgctattcaggcttgcaaagaagttaacctggactcttatactcgcgaacacaccaaagacaatttacagtccgtgacccgtggctgctttgatcttgctcagaagaggatctttggtctcatggagaaggacagttacccacgcttcctgcggtcggacttgtaccttgacctgatcaatcagaagaagatgtctccgcctctgtag

SEQ ID NO: 238813 - DNA, 4398 bp, Artificial Sequence
  derived and/or modified sequence
gccaggcgcagtggctcatgcctgtaatcccagcactttgggaggttgagatgggcagatcgcaaggtcaggagatcgagaccatcctggctaacaggtcacattcagacagcacacctttgcccaattttctttctggatctcaccgtcctgagtgttgtacctgcaggttgctcacagcctctggagcccaagatagtctcccctttgggaggaggctctacagtggtccctggcgaagttgtgaagaggtctgccacgtctctgtgctcagtgtcctctctacatcctgtggcttgagcctgagcttgcccatattccctggctggatggagtggctaagccctgatatcgctctgcccagaagagatgagtggactcaaacttctccagccaggaagaggatcacgcatgccaaagtccagggtgcaggtcagctgaggctgtccattgatgcccaggaccgggttctgctgcttcacattatagaaggtaaaggcctgatcagcaaacagcctggcacctgtgatccgtatgtgaagatttctttgatccctgaagatagtagactacgccaccagaagacgcagaccgttccagactgcagagacccggctttccacgagcacttcttctttcctgtccaagaggaggatgatcagaagcgtctcttggttactgtgtggaacagggccagccagtccagacagagtggactcattggctgcatgagctttggggtgaagtctctcctgactccagacaaggagatcagtggttggtactacctcctaggggagcacctgggccggaccaagcacttgaaggtggccaggcggcgactgcggccgctgagagacccgctgctgagaatgccaggaggtggggacactgagaatgggaagaaactaaagatcaccatcccgaggggaaaggacggctttggcttcaccatctgctgcgactctccagttcgagtccaggccgtggattccgggggtccggcggaacgggcagggctgcagcagctggacacggtgctgcagctgaatgagaggcctgtggagcactggaaatgtgtggagctggcccacgagatccggagctgccccagtgagatcatcctactcgtgtggcgcatggtcccccaggtcaagccaggaccagatggcggggtcctgcggcgggcctcctgcaagtcgacacatgacctccagtcaccccccaacaaacgggagaagaactgcacccatggggtccaggcacggcctgagcagcgccacagctgccacctggtatgtgacagctctgatgggctgctgctcggcggctgggagcgctacaccgaggtggccaagcgcgggggccagcacaccctgcctgcactgtcccgtgccactgcccccaccgaccccaactacatcatcctggccccgctgaatcctgggagccagctgctccggcctgtgtaccaggaggataccatccccgaagaatcagggagtcccagtaaagggaagtcctacacaggcctggggaagaagtcccggctgatgaagacagtgcagaccatgaagggccacgggaactaccaaaactgcccggttgtgaggccgcatgccacgcactcaagctatggcacctacgtcaccctggcccccaaagtcctggtgttccctgtctttgttcagcctctagatctctgtaatcctgcccggaccctcctgctgtcagaggagctgctgctgtatgaagggaggaacaaggctgccgaggtgacactgtttgcctattcggacctgctgctcttcaccaaggaggacgagcctggccgctgcgacgtcctgaggaaccccctctacctccagagtgtgaagctgcaggaaggttcttcagaagacctgaaattctgcgtgctctatctagcagagaaggcagagtgcttattcactttggaagcgcactcgcaggagcagaagaagagagtgtgctggtgcctgtcggagaacatcgccaagcagcaacagctggcagcatcacccccggacagcaagatgtttgagacggaggcagatgagaagagggagatggccttggaggaagggaaggggcctggtgccgaggattccccacccagcaaggagccctctcctggccaggagcttcctccaggacaagaccttccacccaacaaggactccccttctgggcaggaacccgctcccagccaagaaccactgtccagcaaagactcagctacctctgaaggatcccctccaggcccagatgctccgcccagcaaggatgtgccaccatgccaggaaccccctccagcccaagacctctcaccctgccaggacctacctgctggtcaagaacccctgcctcaccaggaccctctactcaccaaagacctccctgccatccaggaatcccccacccgggaccttccaccctgtcaagatctgcctcctagccaggtctccctgccagccaaggcccttactgaggacaccatgagctccggggacctactagcagctactggggacccacctgcggcccccaggccagccttcgtgatccctgaggtccggctggatagcacctacagccagaaggcaggggcagagcagggctgctcgggagatgaggaggatgcagaagaggccgaggaggtggaggagggggaggaaggggaggaggacgaggatgaggacaccagcgatgacaactacggagagcgcagtgaggccaagcgcagcagcatgatcgagacgggccagggggctgagggtggcctctcactgcgtgtgcagaactcgctgcggcgccggacgcacagcgagggcagcctgctgcaggagccccgagggccctgctttgcctccgacaccaccttgcactgctcagacggtgagggcgccgcctccacctggggcatgccttcgcccagcaccctcaagaaagagctgggccgcaatggtggctccatgcaccacctttccctcttcttcacaggacacaggaagatgagcggggctgacaccgttggggatgatgacgaagcctcccggaagagaaagagcaaaaacctagccaaggacatgaagaacaagctggggatcttcagacggcggaatgagtcccctggagcccctcccgcgggcaaggcagacaaaatgatgaagtcattcaagcccacctcagaggaagccctcaagtggggcgagtccttggagaagctgctggttcacaaatacgggttagcagtgttccaagccttccttcgcactgagttcagtgaggagaatctggagttctggttggcttgtgaggacttcaagaaggtcaagtcacagtccaagatggcatccaaggccaagaagatctttgctgaatacatcgcgatccaggcatgcaaggaggtcaacctggactcctacacgcgggagcacaccaaggacaacctgcagagcgtcacgcggggctgcttcgacctggcacagaagcgcatcttcgggctcatggaaaaggactcgtaccctcgctttctccgttctgacctctacctggaccttattaaccagaagaagatgagtcccccgctttaggggccactggagtcgagctcagcgttcacaccaggcgggctgggtcccctgcccacctgcctccctgccccctgtgacggagggggcaagcaagcccccagaggctgtgtctctggacagacggatagacatacggaagcgaggcctggaccaagagaggcccaggctactggaggagtagaaggatgggccccgtggggtccccactgccccggtacgagggggcccaagaccctggcaggtcaggggccctggccaagccagatctggagctgctgctccctgctgcggagaccgcggaggcttcgcgttgaccaagttccttaaagaactggctgatggggcaggaggtccaggcctgggctctcgggccctcctagagggccattggagcttgcagctcagacccccactttgagttttatttatttaaatagtagttggatgcttggcacgtcgtcctgtaataggaaacccttgcctcatcagttttcctgatttacaagtgcaatattttagccaatgccttgggagaagctgccatgcaaaggtggacaccattctccagcttcaggggatatgctcgtcccgggcaccggtggcaggcagctggccttctggactaaggcagcctggggggacactgcagtctggctacacacagagatctggcaccccctgggtggagtgtccctcgggggctttgggaaagcatggcaccctcagaccacacagtagccaagttctggagcaaataaaaggcctgtgttatttcttgttcttg

SEQ ID NO: 238814 - DNA, 4591 bp, Artificial Sequence
  derived and/or modified sequence
aactttggctcagcctgtcttcatccactgtatcctgacacctctcctactccttctctttaatgtacagctgagactgggatacccttagactgaaaggaaggacacggctatgtagaaaagaattgactgaaggggaggagtactcgtgaaccccttgcttcagcctcccaatgttctgagagaggaggagccaggcgcagtggctcatgcctgtaatcccagcactttgggaggttgagatgggcagatcgcaaggtcaggagatcgagaccatcctggctaacaggtcacattcagacagcacacctttgcccaattttctttctggatctcaccgtcctgagtgttgtacctgcaggttgctcacagcctctggagcccaagatagtctcccctttgggaggaggctctacagtggtccctggcgaagttgtgaagaggtctgccacgtctctgtgctcagtgtcctctctacatcctgtggcttgagcctgagcttgcccatattccctggctggatggagtggctaagccctgatatcgctctgcccagaagagatgagtggactcaaacttctccagccaggaagaggatcacgcatgccaaagtccagggtgcaggtcagctgaggctgtccattgatgcccaggaccgggttctgctgcttcacattatagaaggtaaaggcctgatcagcaaacagcctggcacctgtgatccgtatgtgaagatttctttgatccctgaagatagtagactacgccaccagaagacgcagaccgttccagactgcagagacccggctttccacgagcacttcttctttcctgtccaagaggaggatgatcagaagcgtctcttggttactgtgtggaacagggccagccagtccagacagagtggactcattggctgcatgagctttggggtgaagtctctcctgactccagacaaggagatcagtggttggtactacctcctaggggagcacctgggccggaccaagcacttgaaggtggccaggcggcgactgcggccgctgagagacccgctgctgagaatgccaggaggtggggacactgagaatgggaagaaactaaagatcaccatcccgaggggaaaggacggctttggcttcaccatctgctgcgactctccagttcgagtccaggccgtggattccgggggtccggcggaacgggcagggctgcagcagctggacacggtgctgcagctgaatgagaggcctgtggagcactggaaatgtgtggagctggcccacgagatccggagctgccccagtgagatcatcctactcgtgtggcgcatggtcccccaggtcaagccaggaccagatggcggggtcctgcggcgggcctcctgcaagtcgacacatgacctccagtcaccccccaacaaacgggagaagaactgcacccatggggtccaggcacggcctgagcagcgccacagctgccacctggtatgtgacagctctgatgggctgctgctcggcggctgggagcgctacaccgaggtggccaagcgcgggggccagcacaccctgcctgcactgtcccgtgccactgcccccaccgaccccaactacatcatcctggccccgctgaatcctgggagccagctgctccggcctgtgtaccaggaggataccatccccgaagaatcagggagtcccagtaaagggaagtcctacacaggcctggggaagaagtcccggctgatgaagacagtgcagaccatgaagggccacgggaactaccaaaactgcccggttgtgaggccgcatgccacgcactcaagctatggcacctacgtcaccctggcccccaaagtcctggtgttccctgtctttgttcagcctctagatctctgtaatcctgcccggaccctcctgctgtcagaggagctgctgctgtatgaagggaggaacaaggctgccgaggtgacactgtttgcctattcggacctgctgctcttcaccaaggaggacgagcctggccgctgcgacgtcctgaggaaccccctctacctccagagtgtgaagctgcaggaaggttcttcagaagacctgaaattctgcgtgctctatctagcagagaaggcagagtgcttattcactttggaagcgcactcgcaggagcagaagaagagagtgtgctggtgcctgtcggagaacatcgccaagcagcaacagctggcagcatcacccccggacagcaagatgtttgagacggaggcagatgagaagagggagatggccttggaggaagggaaggggcctggtgccgaggattccccacccagcaaggagccctctcctggccaggagcttcctccaggacaagaccttccacccaacaaggactccccttctgggcaggaacccgctcccagccaagaaccactgtccagcaaagactcagctacctctgaaggatcccctccaggcccagatgctccgcccagcaaggatgtgccaccatgccaggaaccccctccagcccaagacctctcaccctgccaggacctacctgctggtcaagaacccctgcctcaccaggaccctctactcaccaaagacctccctgccatccaggaatcccccacccgggaccttccaccctgtcaagatctgcctcctagccaggtctccctgccagccaaggcccttactgaggacaccatgagctccggggacctactagcagctactggggacccacctgcggcccccaggccagccttcgtgatccctgaggtccggctggatagcacctacagccagaaggcaggggcagagcagggctgctcgggagatgaggaggatgcagaagaggccgaggaggtggaggagggggaggaaggggaggaggacgaggatgaggacaccagcgatgacaactacggagagcgcagtgaggccaagcgcagcagcatgatcgagacgggccagggggctgagggtggcctctcactgcgtgtgcagaactcgctgcggcgccggacgcacagcgagggcagcctgctgcaggagccccgagggccctgctttgcctccgacaccaccttgcactgctcagacggtgagggcgccgcctccacctggggcatgccttcgcccagcaccctcaagaaagagctgggccgcaatggtggctccatgcaccacctttccctcttcttcacaggacacaggaagatgagcggggctgacaccgttggggatgatgacgaagcctcccggaagagaaagagcaaaaacctagccaaggacatgaagaacaagctggggatcttcagacggcggaatgagtcccctggagcccctcccgcgggcaaggcagacaaaatgatgaagtcattcaagcccacctcagaggaagccctcaagtggggcgagtccttggagaagctgctggttcacaaatacgggttagcagtgttccaagccttccttcgcactgagttcagtgaggagaatctggagttctggttggcttgtgaggacttcaagaaggtcaagtcacagtccaagatggcatccaaggccaagaagatctttgctgaatacatcgcgatccaggcatgcaaggaggtcaacctggactcctacacgcgggagcacaccaaggacaacctgcagagcgtcacgcggggctgcttcgacctggcacagaagcgcatcttcgggctcatggaaaaggactcgtaccctcgctttctccgttctgacctctacctggaccttattaaccagaagaagatgagtcccccgctttaggggccactggagtcgagctcagcgttcacaccaggcgggctgggtcccctgcccacctgcctccctgccccctgtgacggagggggcaagcaagcccccagaggctgtgtctctggacagacggatagacatacggaagcgaggcctggaccaagagaggcccaggctactggaggagtagaaggatgggccccgtggggtccccactgccccggtacgagggggcccaagaccctggcaggtcaggggccctggccaagccagatctggagctgctgctccctgctgcggagaccgcggaggcttcgcgttgaccaagttccttaaagaactggctgatggggcaggaggtccaggcctgggctctcgggccctcctagagggccattggagcttgcagctcagacccccactttgagttttatttatttaaatagtagttggatgcttggcacgtcgtcctgtaataggaaacccttgcctcatcagttttcctgatttacaagtgcaatattttagccaatgccttgggagaagctgccatgcaaaggtggacaccattctccagcttcaggggatatgctcgtcccgggcaccggtggcaggcagctggccttctggactaaggcagcctggggggacactgcagtctggctacacacagagatctggcaccccctgggtggagtgtccctcgggggctttgggaaagcatggcaccctcagaccacacagtagccaagttctggagcaaataaaaggcctgtgttatttcttgttcttga

SEQ ID NO: 238815 - DNA, 3597 bp, Artificial Sequence
  derived and/or modified sequence
atgcccgtgatccccgccctgtgggaggtggagatgggcagaagccagggccaggagatcgagaccatcctggccaacagaagccacagcgacagcacccccctgcccaacttcctgagcggcagccacagacccgagtgctgcacctgcagactgctgaccgccagcggcgcccaggacagcctgcccttcggcagaagactgtacagcggcccctggagaagctgcgaggaggtgtgccacgtgagcgtgctgagcgtgctgagcaccagctgcggcctgagcctgagcctgcccatcttccccggctggatggagtggctgagccccgacatcgccctgcccagaagagacgagtggacccagaccagccccgccagaaagagaatcacccacgccaaggtgcagggcgccggccagctgagactgagcatcgacgcccaggacagagtgctgctgctgcacatcatcgagggcaagggcctgatcagcaagcagcccggcacctgcgacccctacgtgaagatcagcctgatccccgaggacagcagactgagacaccagaagacccagaccgtgcccgactgcagagaccccgccttccacgagcacttcttcttccccgtgcaggaggaggacgaccagaagagactgctggtgaccgtgtggaacagagccagccagagcagacagagcggcctgatcggctgcatgagcttcggcgtgaagagcctgctgacccccgacaaggagatcagcggctggtactacctgctgggcgagcacctgggcagaaccaagcacctgaaggtggccagaagaagactgagacccctgagagaccccctgctgagaatgcccggcggcggcgacaccgagaacggcaagaagctgaagatcaccatccccagaggcaaggacggcttcggcttcaccatctgctgcgacagccccgtgagagtgcaggccgtggacagcggcggccccgccgagagagccggcctgcagcagctggacaccgtgctgcagctgaacgagagacccgtggagcactggaagtgcgtggagctggcccacgagatcagaagctgccccagcgagatcatcctgctggtgtggagaatggtgccccaggtgaagcccggccccgacggcggcgtgctgagaagagccagctgcaagagcacccacgacctgcagagcccccccaacaagagagagaagaactgcacccacggcgtgcaggccagacccgagcagagacacagctgccacctggtgtgcgacagcagcgacggcctgctgctgggcggctgggagagatacaccgaggtggccaagagaggcggccagcacaccctgcccgccctgagcagagccaccgcccccaccgaccccaactacatcatcctggcccccctgaaccccggcagccagctgctgagacccgtgtaccaggaggacaccatccccgaggagagcggcagccccagcaagggcaagagctacaccggcctgggcaagaagagcagactgatgaagaccgtgcagaccatgaagggccacggcaactaccagaactgccccgtggtgagaccccacgccacccacagcagctacggcacctacgtgaccctggcccccaaggtgctggtgttccccgtgttcgtgcagcccctggacctgtgcaaccccgccagaaccctgctgctgagcgaggagctgctgctgtacgagggcagaaacaaggccgccgaggtgaccctgttcgcctacagcgacctgctgctgttcaccaaggaggacgagcccggcagatgcgacgtgctgagaaaccccctgtacctgcagagcgtgaagctgcaggagggcagcagcgaggacctgaagttctgcgtgctgtacctggccgagaaggccgagtgcctgttcaccctggaggcccacagccaggagcagaagaagagagtgtgctggtgcctgagcgagaacatcgccaagcagcagcagctggccgccagcccccccgacagcaagatgttcgagaccgaggccgacgagaagagagagatggccctggaggagggcaagggccccggcgccgaggacagcccccccagcaaggagcccagccccggccaggagctgccccccggccaggacctgccccccaacaaggacagccccagcggccaggagcccgcccccagccaggagcccctgagcagcaaggacagcgccaccagcgagggcagcccccccggccccgacgccccccccagcaaggacgtgcccccctgccaggagcccccccccgcccaggacctgagcccctgccaggacctgcccgccggccaggagcccctgccccaccaggaccccctgctgaccaaggacctgcccgccatccaggagagccccaccagagacctgcccccctgccaggacctgccccccagccaggtgagcctgcccgccaaggccctgaccgaggacaccatgagcagcggcgacctgctggccgccaccggcgacccccccgccgcccccagacccgccttcgtgatccccgaggtgagactggacagcacctacagccagaaggccggcgccgagcagggctgcagcggcgacgaggaggacgccgaggaggccgaggaggtggaggagggcgaggagggcgaggaggacgaggacgaggacaccagcgacgacaactacggcgagagaagcgaggccaagagaagcagcatgatcgagaccggccagggcgccgagggcggcctgagcctgagagtgcagaacagcctgagaagaagaacccacagcgagggcagcctgctgcaggagcccagaggcccctgcttcgccagcgacaccaccctgcactgcagcgacggcgagggcgccgccagcacctggggcatgcccagccccagcaccctgaagaaggagctgggcagaaacggcggcagcatgcaccacctgagcctgttcttcaccggccacagaaagatgagcggcgccgacaccgtgggcgacgacgacgaggccagcagaaagagaaagagcaagaacctggccaaggacatgaagaacaagctgggcatcttcagaagaagaaacgagagccccggcgccccccccgccggcaaggccgacaagatgatgaagagcttcaagcccaccagcgaggaggccctgaagtggggcgagagcctggagaagctgctggtgcacaagtacggcctggccgtgttccaggccttcctgagaaccgagttcagcgaggagaacctggagttctggctggcctgcgaggacttcaagaaggtgaagagccagagcaagatggccagcaaggccaagaagatcttcgccgagtacatcgccatccaggcctgcaaggaggtgaacctggacagctacaccagagagcacaccaaggacaacctgcagagcgtgaccagaggctgcttcgacctggcccagaagagaatcttcggcctgatggagaaggacagctaccccagattcctgagaagcgacctgtacctggacctgatcaaccagaagaagatgagcccccccctgtag

SEQ ID NO: 238816 - protein, 311 aa, Artificial Sequence
  derived and/or modified sequence
MVTRRPVTNSWDWLPAGAAPEAVPCRHMPLSRLPLRVGQKEFFFPLPLLVPPISWLLLSESQPRLVPGSPVIRPGFQRACVAAACTVAARCPGRGVGDRSQSGASYRPICGPKVGGPTEMLRGMYLTRNGNLQRRHTMKEAKDMKNKLGIFRRRNESPGAPPAGKADKMMKSFKPTSEEALKWGESLEKLLVHKYGLAVFQAFLRTEFSEENLEFWLACEDFKKVKSQSKMASKAKKIFAEYIAIQACKEVNLDSYTREHTKDNLQSVTRGCFDLAQKRIFGLMEKDSYPRFLRSDLYLDLINQKKMSPPL

SEQ ID NO: 238817 - DNA, 936 bp, Artificial Sequence
  derived and/or modified sequence
atggtcacccgccgaccagtcacaaacagctgggactggctgccggccggcgctgcgccagaggctgtgccttgccgtcatatgcccctctcccggttacccttgcgcgtggggcagaaagaattcttcttccctctgcctcttctggtccctcctatctcctggttgttgttgtcagagagccaaccgcgcttggtccccggatccccagttatccggcccggctttcagcgcgcttgtgtcgctgccgcgtgcacagtggctgcgcggtgtcccggcaggggcgtcggagaccggtcccagtctggagcctcttatcggcctatctgtggccccaaagtgggcggcccaactgagatgcttcggggaatgtatctgaccaggaatggaaatttgcagcgtcgacacaccatgaaagaagccaaagacatgaagaacaaacttggaattttccggaggcggaacgagtcaccaggggcaccccccgccggaaaagccgacaaaatgatgaagtccttcaaaccaacctcggaggaggcattgaagtggggagagtcactcgagaagttgttggtccacaaatatggactggccgtgtttcaagcgttcttacggacagagttctctgaggagaatctcgaattctggttggcatgcgaagacttcaaaaaagtcaagagccagtcaaaaatggcatctaaggctaaaaaaattttcgccgagtacatagccattcaagcctgcaaggaagttaatctcgatagctatacccgggagcacacaaaggacaatctgcagtctgtcactagggggtgtttcgacttagcccagaaacgaatctttggactgatggaaaaagacagctatccacggtttttgcggtccgatctgtatttagaccttataaatcagaagaaaatgtcccctcctctttag

SEQ ID NO: 238818 - DNA, 936 bp, Artificial Sequence
  derived and/or modified sequence
atggtgacccggcggcctgtgaccaacagctgggactggctgcctgctggggccgcccctgaggccgtgccctgccgccacatgcccctgagccggctgcccctgcgggtgggccagaaggagttcttcttccccctgcccctgctggtgccccccatctcctggctgctgctgtctgagagccagccccggctggtgcccggcagccctgtgatccggcccggcttccagagggcctgtgtggccgccgcctgcaccgtggccgcccgctgccccggccggggcgtgggggacaggagccagagcggggccagctaccggcccatctgtggccccaaggtgggcggccccacagagatgctgcggggcatgtacctgaccagaaatggaaacctgcagaggaggcacaccatgaaggaggccaaggacatgaagaacaagctgggcatcttcagaagaagaaatgaaagccctggggcccctcctgctgggaaggctgacaagatgatgaagagcttcaagcccaccagcgaggaggccctgaagtggggcgagagcctggagaagctgctggtgcacaagtatggcctggccgtgttccaggccttcctgaggacagagttcagcgaggagaacctggagttctggctggcctgtgaggacttcaagaaggtgaagagccagagcaagatggccagcaaggccaagaagatctttgctgagtacatcgccatccaggcctgcaaggaggtgaacctggacagctacacccgggagcacaccaaggacaacctgcagagcgtgacccggggctgctttgacctggcccagaagaggatcttcggcctgatggagaaggacagctacccccgcttcctgcggagtgacctgtacctggacctgatcaaccagaagaagatgagcccccccctgtag

SEQ ID NO: 238819 - DNA, 936 bp, Artificial Sequence
  derived and/or modified sequence
atggtgacccggcggcccgtgaccaacagctgggactggctgcccgccggagcagctccagaggccgtgccctgtcgccacatgccgctgagcaggctgccactgcgagtaggacagaaggagttcttctttccattaccgctgctggtgccccccatttcatggctgcttctcagtgagtcacagcccagactggtgccaggttccccagtgatccggccaggctttcagcgggcctgtgtagcagcggcctgcactgtcgccgccagatgccccgggcgcggcgtgggtgatagaagtcagagtggggcctcctaccgccctatttgcggacccaaggtgggggggcctactgagatgctacgcggcatgtatctcacacgtaacggcaatctacagcgcagacacacgatgaaggaggcaaaggatatgaagaataagttagggatctttcgtcgcagaaatgagtcccccggagctccaccagccgggaaagcagacaaaatgatgaaatcctttaagccaacatcggaagaggccctaaaatggggagagagcctcgagaaactcctggttcacaagtacggtctggcagtgttccaggcatttctgaggaccgaattcagtgaggagaatttggagttctggctggcatgtgaggattttaaaaaagttaagtctcagtcgaagatggcctctaaggccaagaaaattttcgccgagtatatcgcaatccaggcttgcaaggaggtgaatctggattcttataccagagagcatactaaggataacctgcaaagcgtgacaaggggatgctttgacttggcgcagaaacgaatctttgggctgatggagaaggacagttatccccggtttctgcggagtgatttatacctggatctgattaaccagaaaaaaatgtctcccccactttag

SEQ ID NO: 238820 - DNA, 936 bp, Artificial Sequence
  derived and/or modified sequence
atggtcactaggcggcctgtgactaattcctgggactggctgccagccggtgccgctcctgaagccgtcccctgtcgccacatgcctttaagtagactgccactgcgggttggacagaaagaatttttttttcccctgccacttctggtgccgcctataagttggctcctgttatctgagtcccagccccgattagtacctgggtcgcctgtgatcaggcctggtttccagagggcgtgtgtggccgctgcctgtacagttgctgccagatgtccagggaggggggtgggtgaccgctcacaaagtggagcatcctaccgccctatatgcgggccaaaagtcggaggcccaactgaaatgctacgcggaatgtacttgactagaaacggaaacctccagaggcggcatacaatgaaagaggccaaggatatgaagaataagcttggaatctttaggcgaaggaacgagagcccgggagctccccctgcagggaaagcagataagatgatgaaatcatttaagcccacatccgaggaagctctaaagtggggtgagtccttagagaaattgttagtccacaagtacggcctcgcagtgtttcaggcatttctacgaactgaattcagcgaagaaaacctagagttctggctggcgtgtgaagattttaaaaaggttaagtcacagagtaagatggcttctaaagcaaagaagattttcgctgaatacatcgccatccaggcttgtaaagaggttaatctggactcatatacacgtgagcatacaaaagacaacctgcagagtgtaacgagggggtgtttcgatctggctcaaaagagaatctttggacttatggagaaggatagttaccccaggtttcttcgcagcgatctgtacctggaccttataaatcagaagaaaatgagtccgcctctttag

SEQ ID NO: 238821 - DNA, 1582 bp, Artificial Sequence
  derived and/or modified sequence
ggatggacgcctctcccccggagcagcactttggggccagcttgggccctggggatgagccacaggggacccacagcctatgcgtgtgagcatgtaacccgggagccagctgggcccctcgcggggtgggcagaaggacgggctggcccaggaccctcttctttgagacatcccggactccatctcggatgaaagtgctttgagaaaccacagagttttctgtttaatggaagaaagaaatccagcctctctccagagtggcggtggccggctagacaggagccaaggacatgaagaacaagctggggatcttcagacggcggaatgagtcccctggagcccctcccgcgggcaaggcagacaaaatgatgaagtcattcaagcccacctcagaggaagccctcaagtggggcgagtccttggagaagctgctggttcacaaatacgggttagcagtgttccaagccttccttcgcactgagttcagtgaggagaatctggagttctggttggcttgtgaggacttcaagaaggtcaagtcacagtccaagatggcatccaaggccaagaagatctttgctgaatacatcgcgatccaggcatgcaaggaggtcaacctggactcctacacgcgggagcacaccaaggacaacctgcagagcgtcacgcggggctgcttcgacctggcacagaagcgcatcttcgggctcatggaaaaggactcgtaccctcgctttctccgttctgacctctacctggaccttattaaccagaagaagatgagtcccccgctttaggggccactggagtcgagctcagcgttcacaccaggcgggctgggtcccctgcccacctgcctccctgccccctgtgacggagggggcaagcaagcccccagaggctgtgtctctggacagacggatagacatacggaagcgaggcctggaccaagagaggcccaggctactggaggagtagaaggatgggccccgtggggtccccactgccccggtacgagggggcccaagaccctggcaggtcaggggccctggccaagccagatctggagctgctgctccctgctgcggagaccgcggaggcttcgcgttgaccaagttccttaaagaactggctgatggggcaggaggtccaggcctgggctctcgggccctcctagagggccattggagcttgcagctcagacccccactttgagttttatttatttaaatagtagttggatgcttggcacgtcgtcctgtaataggaaacccttgcctcatcagttttcctgatttacaagtgcaatattttagccaatgccttgggagaagctgccatgcaaaggtggacaccattctccagcttcaggggatatgctcgtcccgggcaccggtggcaggcagctggccttctggactaaggcagcctggggggacactgcagtctggctacacacagagatctggcaccccctgggtggagtgtccctcgggggctttgggaaagcatggcaccctcagaccacacagtagccaagttctggagcaaataaaaggcctgtgttatttcttgttcttga

SEQ ID NO: 238822 - DNA, 2155 bp, Artificial Sequence
  derived and/or modified sequence
attaaataattaaactttaaaatggtgtttttgtaagtttataggacttgtacttctgaagttattcaggcttaaaactactaagatgttggggtcctgctgtatattcatgactggatgtcgccaatgcaggtgactgaggctgagaggccggctggcaggagccattctctgggaggtgccctgtacagggggtctagggaaaagaggggcgaacatgagcaagaggcatttaactcctttcttgccagcagtttcacccagtgctgaattctgctgcctccttggggaccggcaaggctaaaaatggttcttggctaaaaatagccagtcctgccaccccggtggtgggcagtgcctcccctggctccctccttccctttcagcaatttgctgacttgtcccccaccccccaccactgtctccctgctgccatggtaacgaggaggccagtcacaaatagctgggactggcttcctgccggggcggccccagaggctgtcccttgcagacacatgcccctttcacggctccctctcagggttggccagaaggaatttttttttccgctccccctcctggtccctcccatttcctggctcctcctgtctgagtcccagccccggcttgtgcctgggagtccagtcatcaggccaggattccagagagcgtgtgtggctgcagcctgcaccgttgctgcccgctgcccaggacgcggggtgggggacaggagccagagtggtgcctcctacagaccaatctgcggccccaaggtggggggccctacagagatgctccgaggcatgtacctcactcgcaacgggaacctgcagaggcgacacacgatgaaggaagccaaggacatgaagaacaagctggggatcttcagacggcggaatgagtcccctggagcccctcccgcgggcaaggcagacaaaatgatgaagtcattcaagcccacctcagaggaagccctcaagtggggcgagtccttggagaagctgctggttcacaaatacgggttagcagtgttccaagccttccttcgcactgagttcagtgaggagaatctggagttctggttggcttgtgaggacttcaagaaggtcaagtcacagtccaagatggcatccaaggccaagaagatctttgctgaatacatcgcgatccaggcatgcaaggaggtcaacctggactcctacacgcgggagcacaccaaggacaacctgcagagcgtcacgcggggctgcttcgacctggcacagaagcgcatcttcgggctcatggaaaaggactcgtaccctcgctttctccgttctgacctctacctggaccttattaaccagaagaagatgagtcccccgctttaggggccactggagtcgagctcagcgttcacaccaggcgggctgggtcccctgcccacctgcctccctgccccctgtgacggagggggcaagcaagcccccagaggctgtgtctctggacagacggatagacatacggaagcgaggcctggaccaagagaggcccaggctactggaggagtagaaggatgggccccgtggggtccccactgccccggtacgagggggcccaagaccctggcaggtcaggggccctggccaagccagatctggagctgctgctccctgctgcggagaccgcggaggcttcgcgttgaccaagttccttaaagaactggctgatggggcaggaggtccaggcctgggctctcgggccctcctagagggccattggagcttgcagctcagacccccactttgagttttatttatttaaatagtagttggatgcttggcacgtcgtcctgtaataggaaacccttgcctcatcagttttcctgatttacaagtgcaatattttagccaatgccttgggagaagctgccatgcaaaggtggacaccattctccagcttcaggggatatgctcgtcccgggcaccggtggcaggcagctggccttctggactaaggcagcctggggggacactgcagtctggctacacacagagatctggcaccccctgggtggagtgtccctcgggggctttgggaaagcatggcaccctcagaccacacagtagccaagttctggagcaaataaaaggcctgtgttatttcttgttcttga

SEQ ID NO: 238823 - DNA, 936 bp, Artificial Sequence
  derived and/or modified sequence
atggtgaccagaagacccgtgaccaacagctgggactggctgcccgccggcgccgcccccgaggccgtgccctgcagacacatgcccctgagcagactgcccctgagagtgggccagaaggagttcttcttccccctgcccctgctggtgccccccatcagctggctgctgctgagcgagagccagcccagactggtgcccggcagccccgtgatcagacccggcttccagagagcctgcgtggccgccgcctgcaccgtggccgccagatgccccggcagaggcgtgggcgacagaagccagagcggcgccagctacagacccatctgcggccccaaggtgggcggccccaccgagatgctgagaggcatgtacctgaccagaaacggcaacctgcagagaagacacaccatgaaggaggccaaggacatgaagaacaagctgggcatcttcagaagaagaaacgagagccccggcgccccccccgccggcaaggccgacaagatgatgaagagcttcaagcccaccagcgaggaggccctgaagtggggcgagagcctggagaagctgctggtgcacaagtacggcctggccgtgttccaggccttcctgagaaccgagttcagcgaggagaacctggagttctggctggcctgcgaggacttcaagaaggtgaagagccagagcaagatggccagcaaggccaagaagatcttcgccgagtacatcgccatccaggcctgcaaggaggtgaacctggacagctacaccagagagcacaccaaggacaacctgcagagcgtgaccagaggctgcttcgacctggcccagaagagaatcttcggcctgatggagaaggacagctaccccagattcctgagaagcgacctgtacctggacctgatcaaccagaagaagatgagcccccccctgtag

SEQ ID NO: 238824 - protein, 1684 aa, Artificial Sequence
  derived and/or modified sequence
MLGTITITVGQRDSEDVSKRDSDKEMATKSAVVHDITDDGQEETPEIIEQIPSSESNLEELTQPTESQANDIGFKKVFKFVGFKFTVKKDKTEKPDTVQLLTVKKDEGEGAAGAGDHKDPSLGAGEAASKESEPKQSTEKPEETLKREQSHAEISPPAESGQAVEECKEEGEEKQEKEPSKSAESPTSPVTSETGSTFKKFFTQGWAGWRKKTSFRKPKEDEVEASEKKKEQEPEKVDTEEDGKAEVASEKLTASEQAHPQEPAESAHEPRLSAEYEKVELPSEEQVSGSQGPSEEKPAPLATEVFDEKIEVHQEEVVAEVHVSTVEERTEEQKTEVEETAGSVPAEELVEMDAEPQEAEPAKELVKLKETCVSGEDPTQGADLSPDEKVLSKPPEGVVSEVEMLSSQERMKVQGSPLKKLFTSTGLKKLSGKKQKGKRGGGDEESGEHTQVPADSPDSQEEQKGESSASSPEEPEEITCLEKGLAEVQQDGEAEEGATSDGEKKREGVTPWASFKKMVTPKKRVRRPSESDKEDELDKVKSATLSSTESTASEMQEEMKGSVEEPKPEEPKRKVDTSVSWEALICVGSSKKRARRGSSSDEEGGPKAMGGDHQKADEAGKDKETGTDGILAGSQEHDPGQGSSSPEQAGSPTEGEGVSTWESFKRLVTPRKKSKSKLEEKSEDSIAGSGVEHSTPDTEPGKEESWVSIKKFIPGRRKKRPDGKQEQAPVEDAGPTGANEDDSDVPAVVPLSEYDAVEREKMEAQQAQKSAEQPEQKAATEVSKELSESQVHMMAAAVADGTRAATIIEERSPSWISASVTEPLEQVEAEAALLTEEVLEREVIAEEEPPTVTEPLPENREARGDTVVSEAELTPEAVTAAETAGPLGAEEGTEASAAEETTEMVSAVSQLTDSPDTTEEATPVQEVEGGVPDIEEQERRTQEVLQAVAEKVKEESQLPGTGGPEDVLQPVQRAEAERPEEQAEASGLKKETDVVLKVDAQEAKTEPFTQGKVVGQTTPESFEKAPQVTESIESSELVTTCQAETLAGVKSQEMVMEQAIPPDSVETPTDSETDGSTPVADFDAPGTTQKDEIVEIHEENEVASGTQSGGTEAEAVPAQKERPPAPSSFVFQEETKEQSKMEDTLEHTDKEVSVETVSILSKTEGTQEADQYADEKTKDVPFFEGLEGSIDTGITVSREKVTEVALKGEGTEEAECKKDDALELQSHAKSPPSPVEREMVVQVEREKTEAEPTHVNEEKLEHETAVTVSEEVSKQLLQTVNVPIIDGAKEVSSLEGSPPPCLGQEEAVCTKIQVQSSEASFTLTAAAEEEKVLGETANILETGETLEPAGAHLVLEEKSSEKNEDFAAHPGEDAVPTGPDCQAKSTPVIVSATTKKGLSSDLEGEKTTSLKWKSDEVDEQVACQEVKVSVAIEDLEPENGILELETKSSKLVQNIIQTAVDQFVRTEETATEMLTSELQTQAHVIKADSQDAGQETEKEGEEPQASAQDETPITSAKEESESTAVGQAHSDISKDMSEASEKTMTVEVEGSTVNDQQLEEVVLPSEEEGGGAGTKSVPEDDGHALLAERIEKSLVEPKEDEKGDDVDDPENQNSALADTDASGGLTKESPDTNGPKQKEKEDAQEVELQEGKVHSESDKAITPQAQEELQKQERESAKSELTES

SEQ ID NO: 238825 - DNA, 5055 bp, Artificial Sequence
  derived and/or modified sequence
atgctgggcaccatcaccatcaccgtgggccagagagacagcgaggacgtgagcaagagagacagcgacaaggagatggccaccaagagcgccgtggtgcacgacatcaccgacgacggccaggaggagacccccgagatcatcgagcagatccccagcagcgagagcaacctggaggagctgacccagcccaccgagagccaggccaacgacatcggcttcaagaaggtgttcaagttcgtgggcttcaagttcaccgtgaagaaggacaagaccgagaagcccgacaccgtgcagctgctgaccgtgaagaaggacgagggcgagggcgccgccggcgccggcgaccacaaggaccccagcctgggcgccggcgaggccgccagcaaggagagcgagcccaagcagagcaccgagaagcccgaggagaccctgaagagagagcagagccacgccgagatcagcccccccgccgagagcggccaggccgtggaggagtgcaaggaggagggcgaggagaagcaggagaaggagcccagcaagagcgccgagagccccaccagccccgtgaccagcgagaccggcagcaccttcaagaagttcttcacccagggctgggccggctggagaaagaagaccagcttcagaaagcccaaggaggacgaggtggaggccagcgagaagaagaaggagcaggagcccgagaaggtggacaccgaggaggacggcaaggccgaggtggccagcgagaagctgaccgccagcgagcaggcccacccccaggagcccgccgagagcgcccacgagcccagactgagcgccgagtacgagaaggtggagctgcccagcgaggagcaggtgagcggcagccagggccccagcgaggagaagcccgcccccctggccaccgaggtgttcgacgagaagatcgaggtgcaccaggaggaggtggtggccgaggtgcacgtgagcaccgtggaggagagaaccgaggagcagaagaccgaggtggaggagaccgccggcagcgtgcccgccgaggagctggtggagatggacgccgagccccaggaggccgagcccgccaaggagctggtgaagctgaaggagacctgcgtgagcggcgaggaccccacccagggcgccgacctgagccccgacgagaaggtgctgagcaagccccccgagggcgtggtgagcgaggtggagatgctgagcagccaggagagaatgaaggtgcagggcagccccctgaagaagctgttcaccagcaccggcctgaagaagctgagcggcaagaagcagaagggcaagagaggcggcggcgacgaggagagcggcgagcacacccaggtgcccgccgacagccccgacagccaggaggagcagaagggcgagagcagcgccagcagccccgaggagcccgaggagatcacctgcctggagaagggcctggccgaggtgcagcaggacggcgaggccgaggagggcgccaccagcgacggcgagaagaagagagagggcgtgaccccctgggccagcttcaagaagatggtgacccccaagaagagagtgagaagacccagcgagagcgacaaggaggacgagctggacaaggtgaagagcgccaccctgagcagcaccgagagcaccgccagcgagatgcaggaggagatgaagggcagcgtggaggagcccaagcccgaggagcccaagagaaaggtggacaccagcgtgagctgggaggccctgatctgcgtgggcagcagcaagaagagagccagaagaggcagcagcagcgacgaggagggcggccccaaggccatgggcggcgaccaccagaaggccgacgaggccggcaaggacaaggagaccggcaccgacggcatcctggccggcagccaggagcacgaccccggccagggcagcagcagccccgagcaggccggcagccccaccgagggcgagggcgtgagcacctgggagagcttcaagagactggtgacccccagaaagaagagcaagagcaagctggaggagaagagcgaggacagcatcgccggcagcggcgtggagcacagcacccccgacaccgagcccggcaaggaggagagctgggtgagcatcaagaagttcatccccggcagaagaaagaagagacccgacggcaagcaggagcaggcccccgtggaggacgccggccccaccggcgccaacgaggacgacagcgacgtgcccgccgtggtgcccctgagcgagtacgacgccgtggagagagagaagatggaggcccagcaggcccagaagagcgccgagcagcccgagcagaaggccgccaccgaggtgagcaaggagctgagcgagagccaggtgcacatgatggccgccgccgtggccgacggcaccagagccgccaccatcatcgaggagagaagccccagctggatcagcgccagcgtgaccgagcccctggagcaggtggaggccgaggccgccctgctgaccgaggaggtgctggagagagaggtgatcgccgaggaggagccccccaccgtgaccgagcccctgcccgagaacagagaggccagaggcgacaccgtggtgagcgaggccgagctgacccccgaggccgtgaccgccgccgagaccgccggccccctgggcgccgaggagggcaccgaggccagcgccgccgaggagaccaccgagatggtgagcgccgtgagccagctgaccgacagccccgacaccaccgaggaggccacccccgtgcaggaggtggagggcggcgtgcccgacatcgaggagcaggagagaagaacccaggaggtgctgcaggccgtggccgagaaggtgaaggaggagagccagctgcccggcaccggcggccccgaggacgtgctgcagcccgtgcagagagccgaggccgagagacccgaggagcaggccgaggccagcggcctgaagaaggagaccgacgtggtgctgaaggtggacgcccaggaggccaagaccgagcccttcacccagggcaaggtggtgggccagaccacccccgagagcttcgagaaggccccccaggtgaccgagagcatcgagagcagcgagctggtgaccacctgccaggccgagaccctggccggcgtgaagagccaggagatggtgatggagcaggccatcccccccgacagcgtggagacccccaccgacagcgagaccgacggcagcacccccgtggccgacttcgacgcccccggcaccacccagaaggacgagatcgtggagatccacgaggagaacgaggtggccagcggcacccagagcggcggcaccgaggccgaggccgtgcccgcccagaaggagagaccccccgcccccagcagcttcgtgttccaggaggagaccaaggagcagagcaagatggaggacaccctggagcacaccgacaaggaggtgagcgtggagaccgtgagcatcctgagcaagaccgagggcacccaggaggccgaccagtacgccgacgagaagaccaaggacgtgcccttcttcgagggcctggagggcagcatcgacaccggcatcaccgtgagcagagagaaggtgaccgaggtggccctgaagggcgagggcaccgaggaggccgagtgcaagaaggacgacgccctggagctgcagagccacgccaagagcccccccagccccgtggagagagagatggtggtgcaggtggagagagagaagaccgaggccgagcccacccacgtgaacgaggagaagctggagcacgagaccgccgtgaccgtgagcgaggaggtgagcaagcagctgctgcagaccgtgaacgtgcccatcatcgacggcgccaaggaggtgagcagcctggagggcagcccccccccctgcctgggccaggaggaggccgtgtgcaccaagatccaggtgcagagcagcgaggccagcttcaccctgaccgccgccgccgaggaggagaaggtgctgggcgagaccgccaacatcctggagaccggcgagaccctggagcccgccggcgcccacctggtgctggaggagaagagcagcgagaagaacgaggacttcgccgcccaccccggcgaggacgccgtgcccaccggccccgactgccaggccaagagcacccccgtgatcgtgagcgccaccaccaagaagggcctgagcagcgacctggagggcgagaagaccaccagcctgaagtggaagagcgacgaggtggacgagcaggtggcctgccaggaggtgaaggtgagcgtggccatcgaggacctggagcccgagaacggcatcctggagctggagaccaagagcagcaagctggtgcagaacatcatccagaccgccgtggaccagttcgtgagaaccgaggagaccgccaccgagatgctgaccagcgagctgcagacccaggcccacgtgatcaaggccgacagccaggacgccggccaggagaccgagaaggagggcgaggagccccaggccagcgcccaggacgagacccccatcaccagcgccaaggaggagagcgagagcaccgccgtgggccaggcccacagcgacatcagcaaggacatgagcgaggccagcgagaagaccatgaccgtggaggtggagggcagcaccgtgaacgaccagcagctggaggaggtggtgctgcccagcgaggaggagggcggcggcgccggcaccaagagcgtgcccgaggacgacggccacgccctgctggccgagagaatcgagaagagcctggtggagcccaaggaggacgagaagggcgacgacgtggacgaccccgagaaccagaacagcgccctggccgacaccgacgccagcggcggcctgaccaaggagagccccgacaccaacggccccaagcagaaggagaaggaggacgcccaggaggtggagctgcaggagggcaaggtgcacagcgagagcgacaaggccatcaccccccaggcccaggaggagctgcagaagcaggagagagagagcgccaagagcgagctgaccgagagctag

SEQ ID NO: 238826 - DNA, 6287 bp, Artificial Sequence
  derived and/or modified sequence
ggcagctccgagggcacctccggttctcccccatcctccgggagtgtctgggcgctcagtccgctctgatcccgccgaaaccacctgcggttggcaggcaggagactaggcgtctgccggggagggcagggacccgctaagctgatctcctgtacagtagtgctacttaaaatatgctggggaccatcaccatcacagttggacagagagactctgaagatgtgagcaaaagagactccgataaagagatggctactaagtcagcggttgttcacgacatcacagatgatgggcaggaggagacacccgaaataatcgaacagattccttcttcagaaagcaatttagaagagctaacacaacccactgagtcccaggctaatgatattggatttaagaaggtgtttaagtttgttggctttaaattcactgtgaaaaaggataagacagagaagcctgacactgtccagctactcactgtgaagaaagatgaaggggagggagcagcaggggctggcgaccacaaggaccccagccttggggctggagaagcagcatccaaagaaagcgaacccaaacaatctacagagaaacccgaagagaccctgaagcgtgagcaaagccacgcagaaatttctcccccagccgaatctggccaagcagtggaggaatgcaaagaggaaggagaagagaaacaagaaaaagaacctagcaagtctgcagaatctccgactagtcccgtgaccagtgaaacaggatcaaccttcaaaaaattcttcactcaaggttgggccggctggcgcaaaaagaccagtttcaggaagccgaaggaggatgaagtggaagcttcagagaagaaaaaggaacaagagccagaaaaagtagacacagaagaagacggaaaggcagaggttgcctccgagaaactgaccgcctccgagcaagcccacccacaggagccggcagaaagtgcccacgagccccggttatcagctgaatatgagaaagttgagctgccctcagaggagcaagtcagtggctcgcagggaccttctgaagagaaacctgctccgttggcgacagaagtgtttgatgagaaaatagaagtccaccaagaagaggttgtggccgaagtccacgtcagcaccgtggaggagagaaccgaagagcagaaaacggaggtggaagaaacagcagggtctgtgccagctgaagaattggttgaaatggatgcagaacctcaggaagctgaacctgccaaggagctggtgaagctcaaagaaacgtgtgtttccggagaggaccctacacagggagctgacctcagtcctgatgagaaggtgctgtccaaaccccccgaaggcgttgtgagtgaggtggaaatgctgtcatcacaggagagaatgaaggtgcagggaagtccactaaagaagctttttaccagcactggcttaaaaaagctttctggaaagaaacagaaagggaaaagaggaggaggagacgaggaatcaggggagcacactcaggttccagccgattctccggacagccaggaggagcaaaagggcgagagctctgcctcatcccctgaggagcccgaggagatcacgtgtctggaaaagggcttagccgaggtgcagcaggatggggaagctgaagaaggagctacttccgatggagagaaaaaaagagaaggtgtcactccctgggcatcattcaaaaagatggtgacgcccaagaagcgtgttagacggccttcggaaagtgataaagaagatgagctggacaaggtcaagagcgctaccttgtcttccaccgagagcacagcctctgaaatgcaagaagaaatgaaagggagcgtggaagagccaaagccggaagaaccaaagcgcaaggtggatacctcagtatcttgggaagctttaatttgtgtgggatcatccaagaaaagagcaaggagagggtcctcttctgatgaggaagggggaccaaaagcaatgggaggagaccaccagaaagctgatgaggccggaaaagacaaagagacggggacagacgggatccttgctggttcccaagaacatgatccagggcagggaagttcctccccggagcaagctggaagccctaccgaaggggagggcgtttccacctgggagtcatttaaaaggttagtcacgccaagaaaaaaatcaaagtccaagctggaagagaaaagcgaagactccatagctgggtctggtgtagaacattccactccagacactgaacccggtaaagaagaatcctgggtctcaatcaagaagtttattcctggacgaaggaagaaaaggccagatgggaaacaagaacaagcccctgttgaagacgcagggccaacaggggccaacgaagatgactctgatgtcccggccgtggtccctctgtctgagtatgatgctgtagaaagggagaaaatggaggcacagcaagcccaaaaaagcgcagagcagcccgagcagaaggcagccactgaggtgtccaaggagctcagcgagagtcaggttcatatgatggcagcagctgtcgctgacgggacgagggcagctaccattattgaagaaaggtctccttcttggatatctgcttcagtgacagaacctcttgaacaagtagaagctgaagccgcactgttaactgaggaggtattggaaagagaagtaattgcagaagaagaaccccccacggttactgaacctctgccagagaacagagaggcccggggcgacacggtcgttagtgaggcggaattgacccccgaagctgtgacagctgcagaaactgcagggccattgggtgccgaagaaggaaccgaagcatctgctgctgaagagaccacagaaatggtgtcagcagtctcccagttaaccgactccccagacaccacagaggaggccactccggtgcaggaggtggaaggtggcgtacctgacatagaagagcaagagaggcggactcaagaggtcctccaggcagtggcagaaaaagtgaaagaggaatcccagctgcctggcaccggtgggccagaagatgtgcttcagcctgtgcagagagcagaggcagaaagaccagaagagcaggctgaagcgtcgggtctgaagaaagagacggatgtagtgttgaaagtagatgctcaggaggcaaaaactgagccttttacacaagggaaggtggtggggcagaccaccccagaaagctttgaaaaagctcctcaagtcacagagagcatagagtccagtgagcttgtaaccacttgtcaagccgaaaccttagctggggtaaaatcacaggagatggtgatggaacaggctatcccccctgactcggtggaaacccctacagacagtgagactgatggaagcacccccgtagccgactttgacgcaccaggcacaacccagaaagacgagattgtggaaatccatgaggagaatgaggtcgcatctggtacccagtcagggggcacagaagcagaggcagttcctgcacagaaagagaggcctccagcaccttccagttttgtgttccaggaagaaactaaagaacaatcaaagatggaagacactctagagcatacagataaagaggtgtcagtggaaactgtatccattctgtcaaagactgaggggactcaagaggctgaccagtatgctgatgagaaaaccaaagacgtaccatttttcgaaggacttgaggggtctatagacacaggcataacagtcagtcgggaaaaggtcactgaagttgcccttaaaggtgaagggacagaagaagctgaatgtaaaaaggatgatgctcttgaactgcagagtcacgctaagtctcctccatcccccgtggagagagagatggtagttcaagtcgaaagggagaaaacagaagcagagccaacccatgtgaatgaagagaagcttgagcacgaaacagctgttaccgtatctgaagaggtcagtaagcagctcctccagacagtgaatgtgcccatcatagatggggcaaaggaagtcagcagtttggaaggaagccctcctccctgcctaggtcaagaggaggcagtatgcaccaaaattcaagttcagagctctgaggcatcattcactctaacagcggctgcagaggaggaaaaggtcttaggagaaactgccaacattttagaaacaggtgaaacgttggagcctgcaggtgcacatttagttctggaagagaaatcctctgaaaaaaatgaagactttgccgctcatccaggggaagatgctgtgcccacagggcccgactgtcaggcaaaatcgacaccagtgatagtatctgctactaccaagaaaggcttaagttccgacctggaaggagagaaaaccacatcactgaagtggaagtcagatgaagtcgatgagcaggttgcttgccaggaggtcaaagtgagtgtagcaattgaggatttagagcctgaaaatgggattttggaacttgagaccaaaagcagtaaacttgtccaaaacatcatccagacagccgttgaccagtttgtacgtacagaagaaacagccaccgaaatgttgacgtctgagttacagacacaagctcacgtgataaaagctgacagccaggacgctggacaggaaacggagaaagaaggagaggaacctcaggcctctgcacaggatgaaacaccaattacttcagccaaagaggagtcagagtcaaccgcagtgggacaagcacattctgatatttccaaagacatgagtgaagcctcagaaaagaccatgactgttgaggtagaaggttccactgtaaatgatcagcagctggaagaggtcgtcctcccatctgaggaagagggaggtggagctggaacaaagtctgtgccagaagatgatggtcatgccttgttagcagaaagaatagagaagtcactagttgaaccgaaagaagatgaaaaaggtgatgatgttgatgaccctgaaaaccagaactcagccctggctgatactgatgcctcaggaggcttaaccaaagagtccccagatacaaatggaccaaaacaaaaagagaaggaggatgcccaggaagtagaattgcaggaaggaaaagtgcacagtgaatcagataaagcgatcacaccccaagcacaggaggagttacagaaacaagagagagaatctgcaaagtcagaacttacagaatcttaaaacatcatgcagttaaactcattgtctgtttggaagaccagaatgtgaagacaagtagtagaagaaaatgaatgctgctgctgagactgaagaccagtatttcagaactttgagaattggagagcaggcacatcaactgatctcatttctagagagcccctgacaatcctgaggcttcatcaggagctagagccatttaacatttcctctttccaagaccaacctacaattttcccttgataaccatataaattctgatttaaggtcctaaattcttaacctggaactggagttggcaatacctagttctgcttctgaaactggagtatcattctttacatatttatatgtatgttttaagtagtcctcctgtatctattgtatatttttttcttaatgtttaaggaaatgtgcaggatactacatgctttttgtatcacacagtatatgatggggcatgtgccatagtgcaggcttggggagctttaagcctcagttatataacccacgaaaaacagagcctcctagatgtaacattcctgatcaaggtacaattctttaaaattcactaatgattgaggtccatatttagtggtactctgaaattggtcactttcctattacacggagtgtgctaaaactaaaaagcattttgaaacatacagaatgttctattgtcattgggaaatttttctttctaacccagtggaggttagaaagaagttatattctggtagcaaattaactttacatcctttttcctacttgttatggttgtttggaccgataagtgtgcttaatcctgaggcaaagtagtgaatatgttttatatgttatgaagaaaagaattgttgtaagtttttgattctactcttatatgctggactgcattcacacatggcatgaaataagtcaggttctttacaaatggtattttgatagatactggattgtgtttgtgccatatttgtgccattcttttaagaacaatgttgcaacacattcatttggataagttgtgatttgacgactgatttaaataaaatatttgcttcactt

SEQ ID NO: 238827 - DNA, 5055 bp, Artificial Sequence
  derived and/or modified sequence
atgctcggaactattaccataacagtgggacagagagatagcgaggatgtgtctaaacgggactccgataaagagatggccaccaagtctgccgtcgtgcacgatattacagacgacggacaggaggaaaccccggaaattatcgagcagattccatctagcgaaagcaacctggaggaattgacacaaccgacagaaagccaagccaatgacatcggattcaaaaaggtgtttaagttcgtggggttcaagtttacagtcaagaaagacaaaacagagaagccagataccgtccagctgctgaccgttaagaaggacgaaggagaaggcgccgccggagcaggggaccataaggaccccagcttaggagccggcgaagcggcttctaaggaatcggagcccaagcagagtactgagaagcccgaagaaactctcaaaagggaacaaagtcatgccgagataagcccgccagccgagtccgggcaggccgtcgaggaatgcaaggaggaaggagaagaaaagcaggaaaaagagccaagtaagagcgcagagtcacccacctcccctgtcaccagcgagaccggatcaaccttcaaaaaattttttacacagggctgggcaggttggagaaagaaaacatctttcagaaagccaaaagaggacgaggttgaggctagcgaaaagaagaaggagcaagagcccgaaaaggttgacaccgaggaagacgggaaggctgaagtggcgtccgagaaattgaccgcttctgagcaggcccatccacaagaaccagccgaatcagcccacgagccacgcctctcagccgaatatgagaaggtagagctcccgtctgaagaacaggtcagtggaagccagggcccaagcgaagaaaaacctgcccctcttgccacagaagtatttgacgagaagatagaggtgcatcaggaagaagttgtggccgaggtgcacgtcagtacggttgaggagagaactgaggagcaaaaaaccgaggtggaagagaccgcggggagcgtgccagcggaggaacttgtcgaaatggacgcggagccccaggaagctgaaccggcaaaggagctagtaaagcttaaagaaacttgtgtctccggggaggacccaacacaaggagcagacctgagccctgacgaaaaggtgctgtcaaaaccccctgagggcgtggtctcggaagtggagatgttgagctcacaagagaggatgaaagttcaggggagtcccctcaaaaaactcttcacctccacggggcttaagaagctttctggaaaaaagcagaaaggcaagaggggcggtggcgacgaggaaagtggagagcacacgcaggtgcctgctgactcgccggacagccaggaggagcaaaaaggggagtccagtgcaagcagcccagaggagcctgaagaaattacgtgcttggagaaaggcttggcagaggtgcaacaggatggcgaagccgaagaaggggcaacatcggatggagaaaaaaagcgggagggtgtgactccctgggcttcattcaaaaaaatggtgaccccaaaaaagagggtccgcaggccctcagagagtgataaggaagatgaactcgataaggtgaaatcggcaaccctttcttccaccgagagcactgcttctgaaatgcaagaggagatgaagggcagcgttgaggagcccaagccagaagagcccaagagaaaggttgacacctcagtctcttgggaagcactaatctgcgtgggcagttccaaaaagcgcgccaggaggggaagcagttcggacgaggaagggggaccaaaagctatgggtggggaccaccagaaggcagacgaggcaggtaaggacaaggagactggcactgacggcatcctggccggatctcaggagcacgacccggggcagggttcaagctcccctgagcaagcaggatcgcctacggaaggtgagggagtgagtacctgggagagctttaaacgcctcgtcacccctaggaagaagagtaaaagtaaactggaagagaaatctgaggactcgattgctgggtctggggtggagcactctacccctgatacggaacccggcaaggaggagtcatgggtctcaataaagaaattcatccccggccggcggaagaaaaggcctgacgggaagcaggaacaagcccctgtggaagatgccggccctactggagccaatgaagacgattccgatgtgcccgctgtggtcccactgtctgaatatgacgccgtcgagagagaaaagatggaagcccaacaggcacagaagtcagctgaacagccagagcagaaggcagctacagaagtgtctaaggaactgtcagagagccaggtgcacatgatggcggctgcagtggccgacggaacccgggccgcaactataatagaggagagaagcccatcctggatcagcgccagtgttactgagcccctggagcaggtggaggctgaagcagccctcctgaccgaagaggtgctggagagggaagttatcgcagaggaggagcctccaacggtcaccgagcctctccctgagaaccgagaggctcgaggtgacactgtggtcagcgaggccgaattaacccccgaggctgttaccgctgccgagactgccggtccattgggcgctgaggaggggaccgaggctagcgcggcagaggaaaccacagagatggtgtcagcagtgtcccagctcactgactctcctgatacgaccgaagaagccacacctgtacaggaggtggaaggaggcgtgcctgatatagaagagcaggaacgcagaacacaagaggtgctgcaggctgtggcagaaaaggtgaaagaagaatctcagctcccaggaacagggggtccggaggacgtcctgcagcccgtgcagagagccgaggctgaacggcccgaagagcaggctgaagccagcgggctcaaaaaagagacggacgtggtcctgaaagtggatgcgcaagaagcaaagacagagccgttcactcaagggaaagtcgtgggtcagacaacccccgaatccttcgaaaaggccccccaggtcactgaatcaatcgaaagctccgagttggttaccacatgtcaggccgagaccctggctggggtcaagagtcaggagatggttatggagcaagcaattcctcctgatagcgtcgaaacccctacagactcagaaactgacggatctactcccgtcgccgactttgatgccccgggaaccacacaaaaagatgagatcgtcgagatccacgaggagaatgaagtggccagtggaacccagagtggtggaacagaggccgaggccgtgcctgctcagaaggagagacctccggctccatcatcctttgtattccaggaggaaacaaaggagcaatcgaagatggaagatactctcgagcacaccgacaaagaggtttccgtggaaaccgtatcgatactctcaaaaacagaggggacccaagaggcggaccaatacgccgacgagaaaaccaaggacgtgcctttcttcgaaggactagagggatccatcgacacaggcattactgtaagtcgggagaaggtgactgaagtggctttgaagggtgaaggcacggaggaagctgagtgtaagaaggacgacgccttagagctgcagtctcatgctaagtcaccaccaagccccgttgaacgggagatggttgttcaggtggagcgagagaaaacagaggctgagcccacccatgtgaacgaggaaaaattagaacacgagaccgccgtcacggtctccgaagaggtgtcaaagcaactgttacaaacagtcaatgttcccatcatcgatggggccaaagaagtttctagcctcgaggggagcccccccccatgtctcggacaggaagaggccgtgtgcaccaaaatccaggtgcaatcttcagaggcttccttcactctgaccgccgcagcagaagaggaaaaggtgctgggagagactgccaacatcctggagaccggagagactctcgagccagcgggggcccatctggtcttggaagaaaaatccagtgagaaaaatgaggactttgcggcccacccaggcgaggatgctgtaccaacaggcccggattgccaagctaaaagtacacctgtgattgtgagtgccactaccaagaagggcctgagtagtgatctagagggagaaaaaaccacgtccctcaagtggaaaagcgacgaggtggatgagcaggtagcgtgccaggaggtcaaagtgtcggtcgctatcgaggacctggagcccgagaatggaattctagagctcgaaactaagtcctccaagctcgttcaaaacataattcagacggcggttgatcaattcgtgagaactgaggagacagctaccgaaatgctgaccagcgaactgcagacccaggcacatgtgattaaagccgattcccaggacgccggtcaggagacagaaaaggaaggagaggaacctcaggcctctgcgcaggatgaaactccaatcacaagcgctaaagaagaatcagagtctacggcggtaggtcaggcccattctgacatctctaaagacatgtcagaggctagcgagaaaactatgaccgtggaggtcgagggttctaccgttaacgaccagcagctcgaggaggtggtactgccatcagaagaagaggggggtggcgccgggaccaaaagtgtccccgaggacgatgggcatgccttactcgctgagagaatcgaaaagtctctggtcgaacccaaggaggacgagaagggagatgatgtggatgacccagaaaaccagaatagtgcccttgccgatacggatgcgagcggcggacttacgaaggaatcacccgacacaaacggccccaaacagaaggaaaaggaagacgctcaggaagtcgagctgcaggagggtaaggttcactccgaatcagacaaagccattaccccccaggcacaagaggaacttcaaaagcaggagcgggagtctgccaaaagcgaattgaccgagtcttag

SEQ ID NO: 238828 - DNA, 5055 bp, Artificial Sequence
  derived and/or modified sequence
atgctgggcaccatcaccatcaccgtgggccagagggacagtgaagatgtgtccaagagggacagcgacaaggagatggccaccaagtctgctgtggtgcatgacatcacagatgatggccaggaggagaccccagagatcatcgagcagatccccagcagcgagagcaacctggaggagctgacccagcccacagagagccaggccaatgacatcggcttcaagaaggtgttcaagtttgtgggcttcaagttcaccgtgaagaaggacaagacagagaagccagacacagtgcagctgctgactgtgaagaaggatgaaggagagggcgccgccggggccggggaccacaaggaccccagcctgggcgctggggaggccgccagcaaggagagcgagcccaagcagagcacagagaagccagaggagaccctgaagcgggagcagagccacgccgagatcagccccccagctgagagcggccaggccgtggaggagtgcaaggaggagggggaggagaagcaggagaaggagcccagcaagtctgctgagagccccaccagccctgtgaccagcgagaccggcagcaccttcaagaagttcttcacccagggctgggccggctggaggaagaagaccagcttcaggaagcccaaggaggatgaggtggaggccagcgagaagaagaaggagcaggagcctgagaaggtggacacagaagaagatggcaaggccgaggtggccagcgagaagctgacagccagcgagcaggcccacccccaggagcctgctgagagcgcccacgagccccggctgtctgcagaatatgagaaggtggagctgcccagcgaggagcaggtgtctggcagccagggccccagcgaggagaagccagcccccctggccacagaggtgtttgatgagaagattgaggtgcaccaggaggaggtggtggccgaggtgcacgtgtccacagtggaggagaggacagaggagcagaagacagaggtggaggagacagctggctctgtgcctgctgaggagctggtggagatggatgctgagccccaggaggccgagcccgccaaggagctggtgaagctgaaggagacctgtgtgtctggagaggaccccacccagggcgctgacctgagcccagatgagaaggtgctgagcaagcccccagagggcgtggtgtctgaggtggagatgctgagcagccaggagaggatgaaggtgcagggcagccccctgaagaagctgttcaccagcacaggcctgaagaagctgagcggcaagaagcagaagggcaagaggggcggcggagatgaggagagcggggagcacacccaggtgcctgctgacagcccagacagccaggaggagcagaagggggagagcagcgccagcagccctgaggagcctgaggagatcacctgcctggagaagggcctggccgaggtgcagcaggatggagaggccgaggagggcgccaccagtgatggagagaagaagcgggagggcgtgaccccctgggccagcttcaagaagatggtgacccccaagaagagggtgcggcggcccagcgagagtgacaaggaggatgagctggacaaggtgaagagcgccaccctgagcagcacagagagcacagccagcgagatgcaggaggagatgaagggctctgtggaggagcccaagccagaggagcccaagaggaaggtggacacctctgtgtcctgggaggccctgatctgtgtgggcagcagcaagaagagggcccggcggggcagcagcagtgatgaggagggcggccccaaggccatgggcggggaccaccagaaggcagatgaagctgggaaggacaaggagactggaacagatggcatcctggccggcagccaggagcatgaccccggccagggcagcagcagccctgagcaggccggcagccccacagaaggagaaggagtgtccacctgggagagcttcaagaggctggtgacccccaggaagaagagcaagagcaagctggaggagaagtcagaagattccattgctggcagcggcgtggagcacagcaccccagacacagagcccgggaaggaggagagctgggtgtccatcaagaagttcatccctggccgcaggaagaagaggccagatggcaagcaggagcaggcccctgtggaggatgctggccccaccggggccaatgaagatgacagtgatgtgcctgctgtggtgcccctgtctgaatatgatgctgtggagcgggagaagatggaggcccagcaggcccagaagtctgctgagcagcctgagcagaaggccgccacagaggtgtccaaggagctgtctgagagccaggtgcacatgatggctgctgctgtggctgatggcacccgggccgccaccatcatcgaggagaggagccccagctggatcagcgcctctgtgacagagcccctggagcaggtggaggccgaggccgccctgctgacagaggaggtgctggagcgggaggtgattgctgaggaggagcccccaacagtgacagagcccctgcctgagaaccgggaggcccggggggacacagtggtgtctgaggccgagctgaccccagaggccgtgacagctgctgagacagctggccccctgggcgctgaggagggcacagaggccagcgctgctgaggagaccacagagatggtgtctgctgtgtcccagctgacagacagcccagacaccacagaggaggccacccctgtgcaggaggtggagggcggcgtgcctgacatcgaggagcaggagaggaggacccaggaggtgctgcaggccgtggccgagaaggtgaaggaggagagccagctgcccggcactggaggcccagaagatgtgctgcagcctgtgcagagagctgaggccgagaggcctgaggagcaggccgaggccagcggcctgaagaaggagacagatgtggtgctgaaggtggatgcccaggaggccaagacagagcccttcacccagggcaaggtggtgggccagaccaccccagagagctttgagaaggccccccaggtgacagagagcattgagagcagcgagctggtgaccacctgccaggccgagaccctggccggcgtgaagagccaggagatggtgatggagcaggccatccccccagacagcgtggagacccccacagattctgaaacagatggcagcacccctgtggccgactttgatgcccctggcaccacccagaaggatgaaattgtggagatccatgaagaaaatgaggtggccagcggcacccagagcggcggcacagaagctgaggccgtgcctgcccagaaggagcggcccccagcccccagcagctttgtgttccaggaggagaccaaggagcagagcaagatggaggacaccctggagcacacagacaaggaggtgtctgtggagaccgtgtccatcctgagcaagacagagggcacccaggaggccgaccagtatgcagatgagaagaccaaggatgtgcccttctttgagggcctggagggcagcattgacaccggcatcaccgtgtcccgggagaaggtgacagaggtggccctgaagggggagggcacagaggaggccgagtgcaagaaggatgatgccctggagctgcagagccacgccaagagcccccccagccctgtggagcgggagatggtggtgcaggtggagcgggagaagacagaggccgagcccacccacgtgaatgaggagaagctggagcacgagacagctgtgacagtgtctgaggaggtgtccaagcagctgctgcagacagtgaatgtgcccatcattgatggagccaaggaggtgagcagcctggagggcagccccccaccctgcctgggccaggaggaggccgtgtgcaccaagatccaggtgcagagcagcgaggccagcttcaccctgacagctgctgctgaggaggagaaggtgctgggggagacagccaacatcctggagaccggggagaccctggagcctgctggggcccacctggtgctggaggagaagagcagcgagaagaatgaagattttgctgcccaccctggagaagatgctgtgcccactggaccagactgccaggccaagagcacccctgtgattgtgtctgccaccaccaagaagggcctgagcagtgacctggagggggagaagaccaccagcctgaagtggaagagtgatgaggtggatgagcaggtggcctgccaggaggtgaaggtgtctgtggccatcgaggacctggagccagaaaatggcatcctggagctggagaccaagagcagcaagctggtgcagaacatcatccagacagctgtggaccagtttgtgaggacagaggagacagccacagagatgctgaccagcgagctgcagacccaggcccacgtgatcaaggctgacagccaggatgctggccaggagacagagaaggagggggaggagccccaggccagcgcccaggatgagacccccatcaccagcgccaaggaggagagcgagagcacagctgtgggccaggcccacagcgacatcagcaaggacatgtctgaggccagcgagaagaccatgacagtggaggtggagggcagcacagtgaatgaccagcagctggaggaggtggtgctgcccagcgaggaggagggcggcggggccggcaccaagtctgtgcctgaagatgatggccacgccctgctggccgagcgcatcgagaagagcctggtggagcccaaggaggatgagaagggagatgatgtggatgatcctgagaaccagaacagcgccctggccgacacagatgccagcggcggcctgaccaaggagagcccagacaccaacggccccaagcagaaggagaaggaggatgcccaggaggtggagctgcaggagggcaaggtgcacagcgagagtgacaaggccatcaccccccaggcccaggaggagctgcagaagcaggagcgggagagcgccaagtctgagctgacagagagctag

SEQ ID NO: 238829 - DNA, 5055 bp, Artificial Sequence
  derived and/or modified sequence
atgctgggcaccatcaccatcaccgtgggccagcgggacagcgaggacgtcagcaaaagagacagcgacaaagagatggcaactaagtcagctgtcgtgcatgacattactgatgacggacaggaagagaccccagagattatagaacagattccttctagtgaatccaatcttgaagaactgacgcagcccactgagagtcaagccaacgacatcggctttaaaaaggtctttaagttcgtcggttttaagttcaccgtcaaaaaggataaaacagaaaagcctgacacagtacagttactcacagtaaagaaggacgagggggaaggagccgcaggagctggagatcataaggaccctagtctgggggccggagaagctgccagtaaggaatccgagcctaagcaatccacagagaagccggaagaaactctaaagcgggagcagtcacatgcagaaatttccccccccgcagaatccggccaggctgtcgaagaatgtaaagaagagggggaagaaaaacaagagaaggaaccttccaagagcgctgaatctcctaccagccctgtcacatccgaaacgggatctacgttcaaaaaattttttacccagggatgggccggctggagaaagaagacaagttttcggaagccaaaggaggacgaagtggaggccagcgaaaaaaaaaaggaacaggaaccagagaaagtggacaccgaagaggacggcaaggccgaagtggcctcagaaaaactcaccgcctcggagcaagctcatccccaagagcccgccgaaagcgctcacgagccaagactgagcgcggaatacgagaaggtggaactgcccagcgaggaacaggtgtctgggtcccaggggccttcagaggaaaaaccggcgccactggctaccgaggtgttcgacgaaaagattgaggtgcaccaggaggaagtcgtggcggaagttcacgtgagtaccgtagaagagcgtaccgaggaacaaaaaacagaagtcgaggaaacagcagggtccgttcctgccgaagagctcgtggagatggacgcggaaccccaggaagctgagcctgctaaggaacttgtgaagttgaaggaaacctgcgttagtggcgaggatcccacccagggcgcagatctcagccctgacgaaaaggtcctatctaaacctccagagggggtggtgtcggaagtggagatgttaagtagccaggaacgtatgaaagtacaaggttctcctctcaaaaagctgttcacgtcaactggccttaagaagctatccggaaaaaagcagaagggaaagaggggcggaggtgacgaagagtctggggaacacacacaggtgcctgcagattcccccgactcacaggaggaacagaaaggagagtcctccgcaagttccccagaggaacctgaggagatcacatgccttgaaaaaggattggctgaggtgcagcaggatggggaggcggaggaaggagcaacttccgacggggagaagaaaagagagggcgtaacaccctgggccagtttcaaaaaaatggtgacaccaaagaagcgggtaaggcgcccctcagagagtgataaggaggatgaactcgataaagtgaaatctgccacactctctagtaccgagagcactgccagcgagatgcaggaggaaatgaaggggtctgtggaagaacccaagcctgaggagccaaagaggaaagtggatacatctgtgtcatgggaggctcttatttgcgtaggctctagcaaaaagagagcacggcgcggctcctctagtgatgaggaggggggccccaaagctatgggcggagatcatcagaaggccgacgaagccggtaaagacaaggaaactgggaccgatggcatcctggcaggctcccaggagcacgatccagggcaggggtcttcttcccctgagcaagctgggtctcccacagagggggagggcgtaagtacttgggagagttttaaaaggttagtgacgccacggaaaaagtcaaagtccaaactggaggagaagtcagaagattcaatcgcaggatccggcgtggaacacagtactcccgacacagagcctgggaaggaggagagttgggtttctattaaaaagttcatccctggccgtagaaaaaaacggccagacgggaaacaggaacaagcccccgtggaagatgcgggtcccacaggcgcaaacgaggacgactcagatgttccggccgtcgtacctctgtctgagtacgacgccgttgaacgagaaaagatggaagcccagcaggctcaaaaatccgcagagcagccagaacagaaggctgctacggaggtttccaaggaactttcagaatcccaggtccatatgatggctgctgccgtggccgacggaacacgggcggctaccatcatagaggagcgctctccatcctggatctcggcctctgttacagagcccctggaacaggtggaggctgaggccgccctgttgacggaagaggtactcgagagggaagtaatcgctgaggaggagcctccaacagtaacagaacccctgcccgagaatagggaagcacgaggcgatacagtggtctccgaagccgagcttaccccggaggcggtcaccgcagccgagaccgcgggtcccctgggggccgaagaaggcaccgaggccagtgccgccgaagagaccactgagatggtaagtgccgtgtctcagttgacagacagccccgacactactgaggaagccacccctgtgcaagaggtggaggggggggtaccagacattgaagagcaggagcggcgcacgcaagaagtcctgcaggcagtagccgagaaggtcaaggaggaaagccagcttcccggaactggcggacccgaggacgttctacagccagttcagcgggcagaggcagagcgcccagaagaacaggcagaagcatctggtttgaaaaaagagacggatgttgtactgaaagtggacgctcaggaagccaaaacggaaccctttacacagggtaaggtcgtaggccagacaacacctgaatcattcgagaaggctcctcaggtgacagaatccatagaaagctccgagcttgtaaccacgtgtcaggcagagacactcgcgggtgttaaaagccaagaaatggtaatggaacaggctattcctccggactccgtggaaacccccactgacagcgagaccgatggatcaacccccgtggccgacttcgatgctcccggcacgacccagaaagacgagattgtggaaattcatgaagaaaacgaagtggcgtcgggtacccaatccgggggcactgaggctgaggccgtccctgcccaaaaggagagaccacccgctccttcctcttttgtgttccaggaggagaccaaagagcaaagcaagatggaagatacgcttgaacatactgataaggaggtgagtgtcgagaccgtgagtattctcagcaaaacggagggtacccaggaggcggatcaatatgctgacgaaaaaactaaagacgtaccattctttgaggggctggaggggagcattgatacgggaattactgtttctcgcgagaaggttactgaggttgccctgaaaggcgagggaaccgaggaggccgagtgtaaaaaagatgacgcactggaactgcaaagccatgcaaagtcccctccatctccggtcgagagagaaatggtggtacaggttgaacgggagaagaccgaggcggagccgacccatgttaacgaggaaaagctggaacacgagacggcggtgacagttagcgaggaagtgagtaaacagctgttacagacggtgaatgtgcccataattgatggagccaaggaggtgagctctctcgaaggtagccccccaccttgccttgggcaggaggaagccgtgtgcaccaagattcaggtgcagtccagtgaggctagtttcactctcaccgctgcagccgaagaggaaaaagtgctcggcgagactgccaatattttagaaactggcgagacactagagcccgccggagcacacctggtgttggaagaaaaatcaagcgaaaaaaatgaggacttcgccgcccacccaggggaggacgctgtcccgacgggacctgactgtcaagctaagagcactccagtgattgtctccgccaccactaagaaagggcttagcagtgaccttgagggcgaaaagaccacgagcctgaaatggaaaagtgacgaggttgacgagcaggtagcatgtcaggaggtgaaggtgtcagttgccatcgaagacctggagcctgaaaatggaatcctggaactagagaccaagtcttccaaactagttcagaacattatccaaaccgccgtggaccagttcgtgcggacagaggagacagccaccgaaatgctgacttccgagctgcaaacccaggctcacgtgattaaggctgattcccaagacgcaggtcaggagaccgaaaaggagggagaggaaccacaggcgtcagctcaggacgagacacctattaccagcgccaaagaagaatctgaaagcaccgccgtcgggcaagctcattccgacatcagcaaagacatgtccgaagcctccgagaagaccatgacagttgaagttgagggcagtacagtgaacgatcagcaactagaagaagtggtcttaccctccgaggaagagggcggcggcgcagggactaagtctgtacctgaagacgatggacacgcattactggctgagaggatcgagaagtccctggttgagccgaaggaggatgagaagggagacgatgtagacgacccggagaatcagaactccgccctggctgacactgacgcctccggcggtctgaccaaggagtctcctgatacaaatggtccaaaacagaaggagaaggaagacgcgcaggaggttgagctgcaggagggcaaagtacattccgaaagcgacaaagccataacaccccaggcccaggaagagcttcagaagcaagagcgcgagtctgcaaagtccgaactgactgaatcttag

SEQ ID NO: 238830 - DNA, 5054 bp, Artificial Sequence
  derived and/or modified sequence
atgttgggaactataacaatcacagtcgggcaaagggacagcgaagatgttagcaagcgggattctgataaggaaatggccactaagtctgccgtcgttcacgacatcactgatgatggacaggaggagacccccgagatcatagaacagattccctccagcgagtcgaacctcgaagaattaacccagccgaccgagagccaggccaatgatatcgggttcaagaaggtctttaagttcgtgggctttaagtttactgtgaaaaaagataaaaccgaaaaaccggataccgttcagcttttgacggtcaagaaggatgagggggaaggggctgccggtgctggggatcataaagacccaagcttgggcgcaggcgaggcggcatccaaggaaagcgagcccaaacaatcaacagaaaaacccgaggaaactctaaagcgggaacagtcccacgcagagatttcacctcccgcagagtccggtcaggcagtggaagagtgcaaggaggagggggaagaaaagcaagaaaaggagccttccaagagtgcagaaagccccacttcacccgtgacttcagagaccggctcaaccttcaagaagttctttacgcaagggtgggctggatggcggaaaaagacatcatttagaaagccaaaagaggatgaggtggaagccagcgagaaaaaaaaggaacaggagccagagaaagtggataccgaagaggacggaaaggccgaggtggcctccgagaaattgaccgcctctgaacaggcccacccacaggaaccggcagagtcagcccatgaacctagactgtccgctgagtatgaaaaagtggagctgcctagcgaagaacaggtgtcgggcagtcagggaccatcggaagaaaaaccagccccacttgcgactgaagtctttgacgaaaagattgaagtacatcaagaagaagtggtcgccgaggtccatgtcagtacggtcgaagaacgcactgaagaacaaaaaacagaagtggaagaaactgccggtagtgttcccgctgaggaacttgtggagatggatgcagaaccccaggaggcggagcctgctaaagagctggtgaaattgaaggagacatgcgtgagtggtgaagaccccacacagggtgctgacctaagcccagacgagaaggtgctttctaaacccccagagggtgtagttagtgaggtggaaatgcttagttcccaggagcgaatgaaggttcagggctcccctcttaagaagctcttcacatccactggactgaaaaaactcagtggaaaaaaacagaagggcaaacgcggtgggggagatgaagagtctggtgagcatactcaagtccctgccgactcacctgattctcaggaagaacagaagggcgaaagctccgcttcgtcaccagaagagcctgaagaaatcacctgcctggaaaagggtctggccgaggtgcagcaggatggcgaggccgaagagggcgctacaagcgatggcgaaaaaaagagagagggcgtgactccgtgggcctcattcaaaaagatggtgacacctaagaagagagtccgtaggcccagcgagagcgataaggaggacgagctggataaggtcaagagcgccacccttagttcaactgagtcaactgcttccgagatgcaggaagaaatgaaaggatcagtcgaggaaccaaagccagaggagccaaagagaaaggttgacacctccgttagctgggaggcattaatttgcgtcgggtcatcgaaaaagagggcgaggagggggtcatccagcgacgaagagggcggacccaaggccatgggtggcgatcaccagaaagccgatgaggctggtaaagataaggaaactggcaccgacggaatattggccggatcccaagaacatgacccaggacagggctcatcatctccagagcaggccggatccccaactgaaggtgaaggcgtgtcaacctgggaatcttttaagagacttgttacacccaggaagaaatctaaaagcaaattagaagaaaaatcagaagactcgattgcagggtcgggcgtcgagcatagtactccagacacagaaccgggaaaggaggaatcctgggtctctatcaagaagtttataccaggaaggagaaagaagaggccagacgggaaacaagaacaggctcccgtggaggacgcaggccctaccggagcaaacgaggacgactcagacgtcccagcagtggtacctctgtccgaatacgacgcggtggaacgagagaagatggaggcccaacaggctcagaagagcgctgagcagccagagcagaaggctgccacggaggtcagcaaggagcttagcgagtcccaggtgcatatgatggccgcagcagtggcagacggcacccgcgctgccaccatcatcgaagagagatctcccagttggatttctgcttctgttaccgagcctctggagcaggtggaggctgaggccgctctcctaacagaagaagtgttggagagagaagtgatcgcagaggaggagcctcccacagtgaccgaacccctgcctgaaaatcgggaggctcgtggagacacggtggtcagtgaggcagagcttactcctgaggccgtgacagcggctgagacagctggtcccctgggtgccgaggagggcaccgaagcctcagccgcagaggagacaaccgagatggtgtccgcagtgagccagctcacggactcccccgatacgacggaggaggccacccccgtacaggaggtagaggggggtgttcccgatattgaggaacaggagcggaggacacaggaggttttacaggcagtggccgagaaggtcaaggaagagagccagctgcccggaaccggcggtcccgaggatgttctccagccggtgcagcgtgccgaggcagaacgacctgaggagcaggctgaggcatcagggttgaaaaaagaaactgatgtagtactgaaggtagatgctcaagaggcaaagacggaacccttcacccagggtaaggtcgtgggccagacaaccccagagtcttttgaaaaagccccacaggtgactgagtctattgaatcctcagagttagtgactacttgtcaggcggaaaccctcgccggagtgaaatcgcaagagatggtgatggaacaggctataccgccagactctgttgagacgcccaccgactctgagactgatggttccacacccgtggctgattttgatgcccctggcaccactcagaaggacgaaattgtcgagattcacgaggagaatgaggtggcctcagggacccagtccggcggaaccgaggccgaggctgtgcccgcacagaaagagcgcccaccagcgccttccagttttgtgttccaagaggagaccaaggagcagagtaaaatggaggatacactggagcataccgacaaagaagtgtccgtggaaaccgtgagcatcctgagcaaaacagaagggactcaggaggcagaccagtatgctgatgaaaagactaaagacgtgccattttttgaaggcctcgagggttccattgataccggcatcacagtgtcgagggagaaagtcactgaggtagccctcaagggcgagggaaccgaagaagcggaatgcaaaaaggacgacgctctggagctgcagagtcatgcgaagagccccccaagccctgtggagcgagaaatggtggtgcaagtcgagcgagagaagacagaggctgagccaacccacgttaacgaggagaaactggaacacgaaaccgcagttaccgtctctgaagaggtcagcaagcagttacttcagaccgtgaacgtgcctattatagacggcgcaaaagaggtatcatccttggaggggagccccccaccttgtcttggccaggaggaggccgtttgcaccaagatccaggtccaatcatcagaggcctcctttacccttactgctgcagcagaagaggagaaggtccttggggagactgcaaatatcctagagaccggggaaaccctggaacctgcgggagcacacctggtgctagaggagaaaagctctgaaaagaacgaggatttcgctgcgcacccaggggaagacgccgtgcctactggtcccgactgtcaagcgaagagcacccccgtgatcgttagcgccacgacaaaaaagggcctgagcagtgacttggaaggagagaaaactactagcttgaagtggaagagcgatgaagttgatgaacaggtcgcctgccaagaggtgaaagtctcggtcgctatagaagatttagaacctgaaaacgggatccttgagttagaaactaaatcttccaagctcgtgcagaacatcattcagaccgccgttgaccagttcgtccggacagaggaaaccgctacagagatgcttacaagtgaactacaaacacaggcacatgttatcaaggctgactcacaggacgctggccaagagacagagaaagagggggaggaaccacaagcctctgcacaggacgagacccctataactagcgctaaggaggagagtgagagtaccgctgtcggtcaagctcacagtgatatcagcaaggacatgtctgaagccagtgaaaagactatgacggtggaagttgaggggtcaaccgtgaacgaccagcaactggaggaggtggtgctaccgtcagaagaggaggggggtggtgctggcaccaagtcagtgccagaagacgatggacatgccctcctagctgagcggatcgagaaatcgcttgtagaacctaaggaggatgagaaaggtgatgacgtggacgatcccgagaaccagaatagcgccctggccgacaccgatgcctccggcggactgaccaaagagtcccccgataccaacgggcctaagcaaaaagaaaaggaagacgcccaggaagtggagttgcaggaaggcaaagttcacagcgagtcggacaaggccatcaccccccaggcccaggaggagcttcaaaagcaagaaagagagagcgccaaatctgagctcaccgaatctta

SEQ ID NO: 238831 - protein, 480 aa, Artificial Sequence
  derived and/or modified sequence
MNGEEEFFDAVTGFDSDNSSGEFSEANQKVTGMIDLDTSKNNRIGKTGERPSQENGIQKHRTSLPAPMFSRSDFSVWTILKKCVGLELSKITMPIAFNEPLSFLQRITEYMEHVYLIHRASCQPQPLERMQSVAAFAVSAVASQWERTGKPFNPLLGETYELIREDLGFRFISEQVSHHPPISAFHSEGLNHDFLFHGSIYPKLKFWGKSVEAEPRGTITLELLKHNEAYTWTNPTCCVHNVIIGKLWIEQYGTVEILNHRTGHKCVLHFKPCGLFGKELHKVEGHIQDKNKKKLFMIYGKWTECLWGIDPVSYESFKKQERRGDHLRKAKLDEDSGKADSDVADDVPVAQETVQVIPGSKLLWRINTRPPNSAQMYNFTSFTVSLNELETGMEKTLPPTDCRLRPDIRGMENGNMDLASQEKERLEEKQREARRERAKEEAEWQTRWFYPGNNPYTGTPDWLYAGDYFERNFSDCPDIY

SEQ ID NO: 238832 - protein, 112 aa, Artificial Sequence
  derived and/or modified sequence
SVAAFAVSAVASQWERTGKPFNPLLGETYELIREDLGFRFISEQVSHHPPISAFHSEGLNHDFLFHGSIYPKLKFWGKSVEAEPRGTITLELLNVNQRHLRAKHKSPTNAGR

SEQ ID NO: 238833 - DNA, 1443 bp, Artificial Sequence
  derived and/or modified sequence
atgaacggggaggaggagttctttgacgccgtcacaggcttcgactctgataacagcagcggagaattttccgaagctaatcagaaagtgaccggcatgatcgatctggacacatctaagaacaacaggatcggtaagaccggggagcgccccagccaggaaaatggcatccagaagcaccggacttctctccctgcccctatgttcagccgaagcgacttcagtgtgtggacaatcttgaaaaagtgtgtgggtctggagttgagtaagataaccatgcccatagcttttaacgaacccttaagtttcctgcagaggataacagagtatatggagcacgtctacttgatccatcgggccagctgtcagcctcagcccctggagagaatgcagtccgtcgctgccttcgccgtgtcagccgtggcgtctcagtgggagagaactggtaaacccttcaaccctctgctcggagagacatatgagctcattagggaagatctcggctttcgctttatcagcgaacaggtctctcaccatccaccaatatcagcttttcactctgaaggactgaatcacgatttcttatttcatggctcaatatatccgaagttgaagttctggggaaaatccgttgaggctgagccccgaggcaccataactctggaattgttgaagcacaacgaagcttacacatggacaaaccctacgtgctgtgtccataatgttattatcggcaaactgtggattgaacagtatgggaccgtggaaattcttaaccaccgcactggacataaatgcgttcttcacttcaagccatgtggattattcgggaaagagttacataaagtcgaagggcatatccaagacaaaaataaaaaaaagttgttcatgatttacggcaagtggaccgaatgtctctgggggatcgaccctgtctcatacgagagttttaaaaagcaggaacgtcgaggcgaccaccttcgtaaagccaagctagatgaagactctggaaaggcggatagcgacgtggccgacgatgtgcctgtcgcccaagagaccgtccaggtcattcctggaagcaagctcctgtggcggatcaacactagacccccgaactccgcccagatgtataatttcacgagcttcaccgtctctctcaacgaactggagaccgggatggagaaaacactccctcccactgattgtcggctgcgacctgacataagaggaatggaaaacggtaatatggacctggcttcccaggagaaggaaaggcttgaagaaaagcagagagaagctcggagagaacgtgccaaagaagaagcagagtggcaaaccagatggttctaccccggaaacaatccctataccggcacaccggattggctgtacgccggagactacttcgagcgaaacttttccgactgccctgacatctattag

SEQ ID NO: 238834 - DNA, 1443 bp, Artificial Sequence
  derived and/or modified sequence
atgaatggagaggaggagttctttgatgctgtgacaggctttgacagcgacaacagcagcggggagttcagcgaggccaaccagaaggtgacaggcatgattgacctggacaccagcaagaacaaccgcatcggcaagacaggagagcggcccagccaggagaatggcatccagaagcacaggaccagcctgcctgcccccatgttcagcagaagtgacttctctgtgtggaccatcctgaagaagtgtgtgggcctggagctgagcaagatcaccatgcccatcgccttcaatgagcccctgtccttcctgcagaggatcacagagtacatggagcacgtgtacctgatccaccgggccagctgccagccccagcccctggagaggatgcagagcgtggccgcctttgctgtgtctgctgtggccagccagtgggagaggacaggcaagcccttcaaccccctgctgggggagacctatgagctgatccgggaggacctgggcttccgcttcatcagcgagcaggtgagccaccacccccccatcagcgccttccacagcgagggcctgaaccacgacttcctgttccacggcagcatctaccccaagctgaagttctggggcaagtctgtggaggccgagccccggggcaccatcaccctggagctgctgaagcacaatgaggcctacacctggaccaaccccacctgctgcgtgcacaacgtcatcatcggcaagctgtggattgagcagtatggcaccgtggagatcctgaaccacaggacaggccacaagtgtgtgctgcacttcaagccctgtggcctgtttgggaaggagctgcacaaggtggagggccacatccaggacaagaacaagaagaagctgttcatgatctacggcaagtggacagagtgcctgtggggcattgatcctgtgtcctatgagagcttcaagaagcaggagcggcggggggaccacctgaggaaggccaagctggatgaggacagcggcaaggctgacagtgatgtggctgatgatgtgcctgtggcccaggagaccgtgcaggtgattcctggcagcaagctgctgtggaggatcaacacccggccccccaacagcgcccagatgtacaacttcaccagcttcaccgtgtccctgaatgagctggagaccggcatggagaagaccctgcccccaacagactgccgcctgcggccagacatccggggcatggagaatggaaacatggacctggccagccaggagaaggagcggctggaggagaagcagcgggaggcccggcgggagcgggccaaggaggaggccgagtggcagacccgctggttctacccaggcaacaacccctacacaggcaccccagactggctgtatgctggggactactttgaaagaaacttcagtgactgcccagacatctactag

SEQ ID NO: 238835 - DNA, 1443 bp, Artificial Sequence
  derived and/or modified sequence
atgaacggcgaggaggagttcttcgacgccgtgaccggcttcgactccgataatagttcaggcgagttctccgaggcaaaccagaaggttacaggaatgatcgacctggatactagcaagaataaccggattgggaagaccggcgagcgcccaagtcaagagaatgggatacagaagcataggacatccctgcccgccccaatgttcagcaggtctgacttctcagtctggacaattctgaaaaaatgcgtggggctcgagctatcaaaaatcacgatgcccatcgccttcaatgagccactttcatttctgcagcggataactgaatacatggaacatgtatacttgattcaccgagccagctgtcaaccgcaaccactggaacgcatgcagtctgttgccgccttcgccgtcagcgctgtcgcaagccagtgggagcgcacaggtaagcccttcaatccccttttgggtgagacatacgaactaattcgagaggaccttggctttaggttcattagtgagcaggtaagccatcaccctcctatatccgcgtttcattctgagggcctgaatcatgacttcctcttccacggctcaatctacccaaaactgaagttttgggggaaaagtgtagaagccgagccaaggggaacgattacccttgagctgctgaaacataacgaagcttatacttggacaaaccctacctgctgtgtgcataacgtcattattggtaagctttggattgaacagtacggcacggtggagatcctcaaccacagaacaggtcataagtgcgtgcttcacttcaagccttgtggcttgttcgggaaagagttacataaggtggagggccacatacaagataaaaacaagaagaaattattcatgatctatggaaagtggactgagtgcctttggggaatcgacccggtatcatatgaatcgttcaaaaagcaggaaagacgaggcgaccatttacgtaaggccaaattagatgaggacagtggaaaagcagactcagatgtggcggatgatgtgcctgtcgcacaagaaactgtgcaggtgataccaggtagcaaactgctttggaggattaacacacgccccccaaattctgctcaaatgtataacttcacatccttcacagtcagcttgaacgaactcgaaaccgggatggaaaagacattgccccccacagactgtaggttaagaccagatattcggggtatggaaaacggtaacatggatcttgcatctcaggaaaaagagaggctggaggaaaaacagcgggaagcccggagagaaagagctaaggaagaggctgagtggcagaccaggtggttttatccggggaataacccttatactggcacgcctgactggctgtacgcaggcgactacttcgaacgcaactttagcgactgtccagacatttattag

SEQ ID NO: 238836 - DNA, 877 bp, Artificial Sequence
  derived and/or modified sequence
gagggacccgcgtccagatcttcagtgtctattggatttttccaagagaaagtttgtaaaattccttacactgtagatgtggatcagatacgatgattcagtagaagagcacatgtcaggggcagtggaggctggctgctgaaggatgaacggagaggaagaattctttgatgccgtcacaggctttgattctgataactcttctggggaattttcagaggcaaatcagaaagtcacgggaatgattgacttagacaccagcaaaaataataggattgggaaaactggggagaggccctctcaagagaacggaattcagaaacacaggacatcgctgccggctcccatgttcagcagaagcgacttcagcgtgtggaccatcctgaagaagtgtgttggcctggagctgtccaagatcacgatgccaatcgccttcaacgagcctctgagcttcttgcagcggatcacggagtacatggagcacgtgtacctcatccacagggcctcctgccagccccagcccctggagaggatgcagtctgtggctgcttttgctgtttcggctgtggcttcccagtgggagaggaccggcaaaccatttaatccactcttgggagaaacgtatgaattaatcagggaagatttaggattcagatttatatcggaacaggtcagtcaccacccccccatcagtgcgttccactcggaaggtctcaaccatgacttcctgttccatggctccatctaccccaagctcaagttctggggcaaaagcgtggaggcggagccccgaggcaccatcaccctggagctgctcaatgtcaaccaaagacacctcagagcaaaacacaagtctccaacaaatgccggccgctaa

SEQ ID NO: 238837 - DNA, 3970 bp, Artificial Sequence
  derived and/or modified sequence
agtgggtcgcgggcctacggggcgggggcggggcggcagtgagctcggccggcaaccgagggacccgcgtccagatcttcagtgtctattggatttttccaagagaaagtttgtaaaattccttacactgtagatgtggatcagatacgatgattcagtagaagagcacatgtcaggggcagtggaggctggctgctgaaggatgaacggagaggaagaattctttgatgccgtcacaggctttgattctgataactcttctggggaattttcagaggcaaatcagaaagtcacgggaatgattgacttagacaccagcaaaaataataggattgggaaaactggggagaggccctctcaagagaacggaattcagaaacacaggacatcgctgccggctcccatgttcagcagaagcgacttcagcgtgtggaccatcctgaagaagtgtgttggcctggagctgtccaagatcacgatgccaatcgccttcaacgagcctctgagcttcttgcagcggatcacggagtacatggagcacgtgtacctcatccacagggcctcctgccagccccagcccctggagaggatgcagtctgtggctgcttttgctgtttcggctgtggcttcccagtgggagaggaccggcaaaccatttaatccactcttgggagaaacgtatgaattaatcagggaagatttaggattcagatttatatcggaacaggtcagtcaccacccccccatcagtgcgttccactcggaaggtctcaaccatgacttcctgttccatggctccatctaccccaagctcaagttctggggcaaaagcgtggaggcggagccccgaggcaccatcaccctggagctgctcaaacataatgaagcctacacctggaccaaccccacctgctgcgtccacaacgtcatcatcgggaagctgtggatagagcagtatgggacagtggagattttaaaccacagaactggacataagtgtgtgcttcactttaaaccgtgtggattatttggaaaagaacttcacaaggtggaaggacacattcaagacaaaaacaaaaagaagctctttatgatctatggcaaatggacggaatgtttgtggggcatagatcctgtttcgtatgaatccttcaagaagcaggagaggagaggtgaccacctgagaaaggccaagctggatgaagactccgggaaggctgacagcgacgtggctgacgacgtgcctgtggcccaggagaccgtgcaggtcattcctggcagcaagctgctctggaggatcaacacccggccccccaactctgcccagatgtataatttcaccagtttcactgtgagcctcaacgagctggagacaggcatggagaagaccctgccacccacggactgccgcctgcgccctgacatccgcggcatggagaatggcaacatggatctggccagccaggagaaggagcggctggaggagaagcagagagaagcacggagggagcgggccaaggaggaggcagagtggcagacgaggtggttctacccaggcaataacccctacactgggacccccgactggttgtatgcaggggattactttgagcggaatttctccgactgcccagatatctactgagggcctggaggggcctggggcccgggaccggaggctgacgaggctggacttcctcgagtggccactgtgagcctcgtcacagcagaaaccaacttttctaacgactgagttcgcggagatagcatcatccctgatcaaggatgtaattctaattaactgttgattgccaaacatttcactctgctgtgccgtctcttcataaagcttcacttgggatcatcgtcttcattaaggtttcaacagggaaattcttcacggcgcccttttatgtggcagaaatcagctggggcttgtttagcttccagcacactctcagtcatagcatgtgtagctaaaggaagtaatgggaaggggttcatgttctctttataatgcagtggcaaaaggttctgaaagccttttaaactcgaaccagtgggggaaagatggatcttgaagctaatcctgcagagagttttatagaggccagggattgccttctaaattatgataaaacagaagtgaagagtttcagagcatcagattgagtgaaaagttgtcagattctgtattttttaacaatcttcaataatgtaaagattacttttaaaatatttaagttaaaactacttgaatagtattttgctgaagagcaagatatgcattaatcaccggttttatactgtccaaaatgaagcatccccgtgacaaaccagagtgggcagaagcatcgagagcgtgacaggaaatcccaagactgcttccgcctcagaggcgtcccggctgcgattcgctgccctgttgtcagtgaggcctggctgtcaccgcacaccgcgtccgtgtctccagggggttcctttcttctcacacgtcgcgtgtacccatagcactcttgtgtttctgtttttcccagtatgcatgtttaaaatagaagtgacaagaatcacatccggttgtgtcctgtgggagggtcagaggcagaatctacttacagtggtgtaattaaagttatttaaccaaaaataggtatgtgtccatctcagcattcacctttatcaagtgactgatttttttttcttttctttccttttttttttttttttgagacggagtttcactcttgttgcccaggctggagtgcaatggcatgatctcggctcaccgcaacctccgcctcccgggttcaagcgattctcctgcctcagcctcccaagtagctgggattacaggcacgcgccaccacacctggctgattttgtatttttagtagacacgggttttcaccatgttggtcaggctggtctcaaactcccgacctcaagtagtctgcctgcctcaacctcccaaagtgctgggattacaggcgtgagccactgcgcctggccgtgactgattttttttcatgtagaattgtcaacacgagagatcacagtggagcactttgaaagaccgtcggttgtgtgcacgcacgcacacactcatgcacacgctgacacgcggttgcatggagtccaggttactcaggccggcacttctgagtgacaggtgccacctgcgtgtgtcttggcgtccacatcacacctgtgacggaagcacttctggaagtgaacactcgttttgaaagcttgattttgtagctttggaagctggaagcgatggtgtttggtgccgagtcctgtgtcatcctcggggcctatgagctccgtaccagccactcaaaagtgtctgaacagaaccgctccgtgactggtagctgggtctgaggattcaggattgtggcgttattcaaagaggagactttgaaattccccgatggctggaatgtggagcccaggtgcctctggtggagggtcatctgcttttccagactgtggttgtgaaccggctccttctccaagaaaggttgcaagctgagaacatccagaggtgagactcagacacattgaaagtgactgcatttagggaggtttaacgagttcttactgatcattccacttgttactggttaagataatttgcccacgggtttgtttccaagtcctcttctaggaccaggctcctggtatttcaggggctggttggctgcacagacagcccctcttctgctgtccttgaggacagacaccaaaccagaggtggaggaagaacggtaggaaggctgatggcaaaagcggctgtgtgtcgaggttattttaactttttactactttttgttactgtttctgcaaatgctaacacataaaccatgacctaacttttgtcaccttggatatctattgaatgttaaacatctctaataaagatggccaccacttaatgtgtggaaagtgatggccttctcgtggg

SEQ ID NO: 238838 - DNA, 1443 bp, Artificial Sequence
  derived and/or modified sequence
atgaacggagaggaggaattctttgacgcggtcaccggattcgactccgataatagttctggcgagttttctgaggcaaaccagaaagttactggaatgatagatttagataccagcaaaaacaatcggattgggaaaactggagagaggccttctcaagaaaacggaatacagaaacaccggacaagtctgcctgcccctatgttctcccggtctgacttcagcgtttggacaattctgaaaaagtgtgtcggcctggaactaagtaaaatcaccatgcctatcgctttcaacgagccactcagttttctccagagaatcacagaatatatggaacacgtttacctcatacacagggcctcatgccagcctcagccactagagcggatgcagtccgttgctgcattcgcagtgagcgctgtggcctcacagtgggagaggaccgggaaacctttcaatccactgctaggcgaaacctatgaactcatccgagaggacctcggtttcaggttcatctcggaacaggtttcccatcacccaccaatctcagcctttcatagcgaaggtctcaatcacgacttcctatttcacggcagtatctaccctaagctgaagttctggggaaagtcggtcgaagcagaacctcggggaacaatcacactcgagctgcttaagcacaatgaggcatatacttggacaaacccaacctgttgtgtgcataacgtaattatcggtaagctgtggatcgaacaatatgggaccgttgagatcttaaaccatcgcaccgggcataaatgcgtgctccatttcaaaccttgcggcctgtttggaaaggaacttcacaaagtagagggtcacatacaggacaaaaacaagaaaaaattgtttatgatctatggcaagtggaccgagtgcctgtggggtatcgaccccgtctcatatgaaagcttcaaaaagcaagaaaggcggggtgaccatctgcgcaaggcgaagttggacgaagattcgggcaaggccgatagcgacgtagctgacgatgtccccgttgcccaggaaacagtacaggtgatcccaggatcaaaactgctctggcgaataaacactagacccccaaacagcgctcagatgtacaatttcacgagttttactgtctccctgaacgagctggagacaggaatggagaagaccctcccacccaccgactgtagactgaggcctgacataagaggcatggagaacgggaacatggacttggcttcccaggagaaggagcgtctggaggagaagcagagggaggctcggagggagagagcaaaggaagaggccgaatggcagactcgctggttctaccccggaaataatccgtataccggtacacctgattggctgtatgcaggagactactttgagcggaactttagtgattgccctgacatttattag

SEQ ID NO: 238839 - DNA, 1443 bp, Artificial Sequence
  derived and/or modified sequence
atgaacggcgaggaggagttcttcgacgccgtgaccggcttcgacagcgacaacagcagcggcgagttcagcgaggccaaccagaaggtgaccggcatgatcgacctggacaccagcaagaacaacagaatcggcaagaccggcgagagacccagccaggagaacggcatccagaagcacagaaccagcctgcccgcccccatgttcagcagaagcgacttcagcgtgtggaccatcctgaagaagtgcgtgggcctggagctgagcaagatcaccatgcccatcgccttcaacgagcccctgagcttcctgcagagaatcaccgagtacatggagcacgtgtacctgatccacagagccagctgccagccccagcccctggagagaatgcagagcgtggccgccttcgccgtgagcgccgtggccagccagtgggagagaaccggcaagcccttcaaccccctgctgggcgagacctacgagctgatcagagaggacctgggcttcagattcatcagcgagcaggtgagccaccacccccccatcagcgccttccacagcgagggcctgaaccacgacttcctgttccacggcagcatctaccccaagctgaagttctggggcaagagcgtggaggccgagcccagaggcaccatcaccctggagctgctgaagcacaacgaggcctacacctggaccaaccccacctgctgcgtgcacaacgtgatcatcggcaagctgtggatcgagcagtacggcaccgtggagatcctgaaccacagaaccggccacaagtgcgtgctgcacttcaagccctgcggcctgttcggcaaggagctgcacaaggtggagggccacatccaggacaagaacaagaagaagctgttcatgatctacggcaagtggaccgagtgcctgtggggcatcgaccccgtgagctacgagagcttcaagaagcaggagagaagaggcgaccacctgagaaaggccaagctggacgaggacagcggcaaggccgacagcgacgtggccgacgacgtgcccgtggcccaggagaccgtgcaggtgatccccggcagcaagctgctgtggagaatcaacaccagaccccccaacagcgcccagatgtacaacttcaccagcttcaccgtgagcctgaacgagctggagaccggcatggagaagaccctgccccccaccgactgcagactgagacccgacatcagaggcatggagaacggcaacatggacctggccagccaggagaaggagagactggaggagaagcagagagaggccagaagagagagagccaaggaggaggccgagtggcagaccagatggttctaccccggcaacaacccctacaccggcacccccgactggctgtacgccggcgactacttcgagagaaacttcagcgactgccccgacatctactag

SEQ ID NO: 238840 - protein, 350 aa, Artificial Sequence
  derived and/or modified sequence
MGAGASAEEKHSRELEKKLKEDAEKDARTVKLLLLGAGESGKSTIVKQMKIIHQDGYSLEECLEFIAIIYGNTLQSILAIVRAMTTLNIQYGDSARQDDARKLMHMADTIEEGTMPKEMSDIIQRLWKDSGIQACFERASEYQLNDSAGYYLSDLERLVTPGYVPTEQDVLRSRVKTTGIIETQFSFKDLNFRMFDVGGQRSERKKWIHCFEGVTCIIFIAALSAYDMVLVEDDEVNRMHESLHLFNSICNHRYFATTSIVLFLNKKDVFFEKIKKAHLSICFPDYDGPNTYEDAGNYIKVQFLELNMRRDVKEIYSHMTCATDTQNVKFVFDAVTDIIIKENLKDCGLF

SEQ ID NO: 238841 - DNA, 1053 bp, Artificial Sequence
  derived and/or modified sequence
atgggcgccggcgccagcgccgaggagaagcacagcagagagctggagaagaagctgaaggaggacgccgagaaggacgccagaaccgtgaagctgctgctgctgggcgccggcgagagcggcaagagcaccatcgtgaagcagatgaagatcatccaccaggacggctacagcctggaggagtgcctggagttcatcgccatcatctacggcaacaccctgcagagcatcctggccatcgtgagagccatgaccaccctgaacatccagtacggcgacagcgccagacaggacgacgccagaaagctgatgcacatggccgacaccatcgaggagggcaccatgcccaaggagatgagcgacatcatccagagactgtggaaggacagcggcatccaggcctgcttcgagagagccagcgagtaccagctgaacgacagcgccggctactacctgagcgacctggagagactggtgacccccggctacgtgcccaccgagcaggacgtgctgagaagcagagtgaagaccaccggcatcatcgagacccagttcagcttcaaggacctgaacttcagaatgttcgacgtgggcggccagagaagcgagagaaagaagtggatccactgcttcgagggcgtgacctgcatcatcttcatcgccgccctgagcgcctacgacatggtgctggtggaggacgacgaggtgaacagaatgcacgagagcctgcacctgttcaacagcatctgcaaccacagatacttcgccaccaccagcatcgtgctgttcctgaacaagaaggacgtgttcttcgagaagatcaagaaggcccacctgagcatctgcttccccgactacgacggccccaacacctacgaggacgccggcaactacatcaaggtgcagttcctggagctgaacatgagaagagacgtgaaggagatctacagccacatgacctgcgccaccgacacccagaacgtgaagttcgtgttcgacgccgtgaccgacatcatcatcaaggagaacctgaaggactgcggcctgttctag

SEQ ID NO: 238842 - DNA, 1053 bp, Artificial Sequence
  derived and/or modified sequence
atgggagctggcgcatcagctgaggaaaagcacagcagagaattagaaaagaagctgaaagaggacgccgaaaaggacgcacgcactgtgaaacttctgctgctgggtgctggcgaatctggcaagtctaccatcgtgaaacagatgaaaatcattcaccaggatggatatagtctggaagaatgccttgagttcattgccataatttatggcaatacccttcagagtattttagctatagtgagggctatgacgactttgaatatccagtatggggatagcgcacgacaggatgacgccaggaagcttatgcacatggctgacaccatagaggaggggactatgccaaaggagatgtcagatatcattcagcgactttggaaggacagcggcatccaagcttgcttcgagcgggccagcgaataccagctgaatgatagtgccgggtactatttatcagacctagaaagacttgtgacacctggatacgtgcctacagagcaggacgtcctcagatcaagagtgaagactaccggtataatagagacacagttcagcttcaaggacttgaatttcaggatgttcgacgttgggggacaacgctcagagcggaagaagtggattcactgcttcgagggcgttacctgcatcatcttcattgcagctctctccgcatatgacatggtgctcgtggaagatgatgaagtaaaccgcatgcatgagtcattacacctcttcaacagcatctgtaatcacaggtattttgcgacaacatctatcgtcctttttctgaataagaaggacgtgttcttcgaaaaaatcaagaaggcacatctttcaatttgtttccccgactacgacggcccgaatacctacgaggatgctggcaattacatcaaagtacagttcctggagttaaatatgcgacgcgacgttaaagagatctattcccacatgacatgtgcaactgacacccagaatgtgaaatttgttttcgatgcagttacagatattatcattaaggagaacctgaaggattgcggcctcttttag

SEQ ID NO: 238843 - DNA, 1053 bp, Artificial Sequence
  derived and/or modified sequence
atgggcgctggggccagcgctgaggagaagcacagccgggagctggagaagaagctgaaggaggatgctgagaaggatgccaggacagtgaagctgctgctgctgggcgctggggagagcggcaagagcaccatcgtgaagcagatgaagatcatccaccaggacggctacagcctggaggagtgcctggagttcatcgccatcatctacggcaacaccctgcagagcatcctggccatcgtgcgggccatgaccaccctgaacatccagtatggagacagcgcccggcaggatgatgccaggaagctgatgcacatggctgacaccatcgaggagggcaccatgcccaaggagatgtctgacatcatccagaggctgtggaaggacagcggcatccaggcctgctttgagcgggccagcgagtaccagctgaatgattctgctggctactacctgagtgacctggagcggctggtgaccccaggctacgtgcccacagagcaggatgtgctgcggagccgggtgaagaccaccggcatcatcgagacccagttctccttcaaggacctgaacttcaggatgtttgatgtgggcggccagaggtctgagaggaagaagtggatccactgctttgaaggagtgacctgcatcatcttcatcgccgccctgagcgcctatgacatggtgctggtggaggatgatgaggtgaacaggatgcatgagagcctgcacctgttcaacagcatctgcaaccaccgctactttgccaccaccagcatcgtgctcttcctgaacaagaaggatgtgttctttgagaagatcaagaaggcccacctgagcatctgcttcccagactatgatggccccaacacctatgaagatgctggcaactacatcaaggtgcagttcctggagctgaacatgagaagagatgtgaaggagatctacagccacatgacctgtgccacagacacccagaatgtgaagtttgtgtttgatgctgtgacagacatcatcatcaaggagaacctgaaggactgtggcctcttctag

SEQ ID NO: 238844 - DNA, 1053 bp, Artificial Sequence
  derived and/or modified sequence
atgggcgccggcgccagcgccgaggagaagcacagccgggagctggagaaaaagctgaaggaggatgccgaaaaggacgccaggacggtgaaactgctactccttggtgctggcgaatctggcaaatctacaattgtgaaacagatgaaaatcatacaccaggatggctacagtctggaggagtgccttgaatttattgcgattatctacggcaatacactgcagtcaatcctggcaatcgtgagagccatgacaacattaaatatccagtacggcgactccgcccgccaggacgacgcaaggaagcttatgcacatggctgacaccatcgaggagggaaccatgcctaaggaaatgtccgatatcatccaacgcctgtggaaggattctggcattcaggcctgtttcgaaagggctagtgagtatcaactgaatgatagtgctggctattacctcagcgatctggagcgcctggtaactccggggtacgtgccaacggagcaagatgtgttacggagccgggtgaaaaccacaggcattatcgaaacccagtttagcttcaaggacctgaacttccgcatgttcgacgtggggggccagagatccgagcgcaagaagtggattcattgtttcgagggtgtaacatgtattatctttatcgctgcactgagcgcatacgacatggtgctcgtggaagacgatgaggttaatagaatgcatgagtcgctgcacctatttaatagcatctgtaaccatcgctacttcgcaacaactagcatagtgttgttcctgaataaaaaagacgtgtttttcgagaagatcaagaaggcccatctgagtatctgtttcccggactacgacgggcctaacacctacgaagatgctgggaattacatcaaggttcagttcctggaactgaatatgaggagggacgtcaaagagatctatagccacatgacctgtgcaaccgacacccagaacgtgaaattcgtgtttgacgccgtaactgacataatcataaaggagaacctgaaggactgtggactcttctag

SEQ ID NO: 238845 - DNA, 1053 bp, Artificial Sequence
  derived and/or modified sequence
atgggggctggtgcttcggctgaggaaaaacattctcgtgagcttgagaagaagctcaaagaggatgcagaaaaggacgctcggaccgtgaagctgctgctgcttggcgcaggcgaaagtggcaaatcaacaatcgtgaagcagatgaagattattcaccaggacggctacagcttggaggaatgtttggaatttatagcaataatctacgggaatactctccaaagcatcctggctatcgtgagggccatgactaccctaaatatccagtacggggactccgctagacaggatgacgcaagaaaattaatgcatatggcagatacgattgaggagggtactatgcctaaggagatgagcgacattattcagaggctgtggaaggattctgggattcaagcatgctttgagcgcgcaagtgaataccaactgaatgatagcgccggttactatctgtccgaccttgaaagactcgtcacaccgggatatgtgcccactgagcaagacgtcttgaggtcccgggtgaagaccaccggtatcattgaaacccagttttcctttaaagacctcaacttcagaatgtttgacgtgggcggtcagcgcagcgagaggaaaaagtggatccactgcttcgagggcgtgacatgcatcatcttcattgccgcactgagtgcctacgatatggttcttgtggaggacgatgaggtaaatcgcatgcatgaatctctgcacctgttcaattcaatttgtaatcacagatatttcgctacaacttcaatagtacttttcttaaacaaaaaagatgttttttttgagaagataaagaaagcacacctgagcatctgcttccctgactacgacgggcctaatacatacgaagatgccggaaactacatcaaggtgcaatttctagagcttaatatgcgccgagacgtaaaagaaatttactcacatatgacctgtgccacagacacgcagaatgtcaagtttgtgttcgacgctgtgacggacatcatcatcaaagagaatctcaaagactgcgggcttttctag

SEQ ID NO: 238846 - DNA, 1053 bp, Artificial Sequence
  derived and/or modified sequence
atgggagcaggtgcttcagcagaggagaagcacagtagagagcttgagaagaagctcaaagaggatgccgagaaagacgcccgcaccgtaaaacttctcctgcttggtgctggggagagcggcaaatctacaattgtgaagcagatgaaaatcatccatcaagacggctactctctagaggaatgcctcgagtttattgcaatcatctatgggaacacattacagtctattttagccatcgtccgcgctatgacaacactgaatattcagtacggcgactctgctcgacaggacgacgcccgtaagctcatgcacatggcagatacaattgaagaggggaccatgccaaaagagatgtctgacattatacagcggttgtggaaggatagtggcatccaggcctgctttgagcgtgctagcgaatatcagcttaatgactccgctggatactacttgagtgacttggagaggcttgtcacgccgggctacgttcctacagaacaagatgtccttagatcccgggtgaagactacagggataatcgagactcagtttagcttcaaagacctgaatttccggatgtttgacgtgggcggccagcggagcgaacggaagaagtggatccactgctttgaaggcgtgacttgcataatatttatcgctgctcttagcgcctatgatatggtgctcgtggaagacgacgaagtcaatcgaatgcatgaatcactccatctgttcaactcgatctgtaatcataggtatttcgctactacctcaatagttttattcctgaacaaaaaggatgtgtttttcgagaaaatcaagaaggctcacctttctatttgtttccctgattatgatggccccaacacctatgaggacgccggaaattacatcaaggtgcagttcttggagctgaatatgaggagagatgtgaaggagatttacagccacatgacctgtgccacagatacacagaatgtgaaatttgtgtttgatgccgtgacagatattattatcaaagagaacctgaaggactgcgggctcttctag

SEQ ID NO: 238847 - DNA, 2417 bp, Artificial Sequence
  derived and/or modified sequence
ttgattgcaggtcctcctggggccagaagggtgcctgggaggccaggttctggggatcccctccatccagaagaaccacctgctcactctgtcccttcgcctgctgctgggaccatgggggctggggccagtgctgaggagaagcactccagggagctggaaaagaagctgaaagaggacgctgagaaggatgctcgaaccgtgaagctgctgcttctgggtgccggtgagtccgggaagagcaccatcgtcaagcagatgaagattatccaccaggacgggtactcgctggaagagtgcctcgagtttatcgccatcatctacggcaacacgttgcagtccatcctggccatcgtacgcgccatgaccacactcaacatccagtacggagactctgcacgccaggacgacgcccggaagctgatgcacatggcagacactatcgaggagggcacgatgcccaaggagatgtcggacatcatccagcggctgtggaaggactccggtatccaggcctgttttgagcgcgcctcggagtaccagctcaacgactcggcgggctactacctctccgacctggagcgcctggtaaccccgggctacgtgcccaccgagcaggacgtgctgcgctcgcgagtcaagaccactggcatcatcgagacgcagttctccttcaaggatctcaacttccggatgttcgatgtgggcgggcagcgctcggagcgcaagaagtggatccactgcttcgagggcgtgacctgcatcatcttcatcgcggcgctgagcgcctacgacatggtgctagtggaggacgacgaagtgaaccgcatgcacgagagcctgcacctgttcaacagcatctgcaaccaccgctacttcgccacgacgtccatcgtgctcttccttaacaagaaggacgtcttcttcgagaagatcaagaaggcgcacctcagcatctgtttcccggactacgatggacccaacacctacgaggacgccggcaactacatcaaggtgcagttcctcgagctcaacatgcggcgcgacgtgaaggagatctattcccacatgacgtgcgccaccgacacgcagaacgtcaaatttgtcttcgacgctgtcaccgacatcatcatcaaggagaacctcaaagactgtggcctcttctgaggtgcctgaattcatgcgtgtcagtcaccctgagacctggtagccctagctgccttgcagccccaaaccccaggaccctatcagccccctgggactccctggccccaacctgccacctcaccaaagctctgagccctgctagccttgaggcgcggaccctcccccatacctcccacagtatcccagcgcctcatgcccccaaccccaagccctgcccttcaccgcccggctgcactggcctctaggactcacagcagccagccccagctaggaacgggcaggacttggggcagctgaagctcacggtgactcagcagtgcccaactgaccaatctcccgcagctctcctgcccctgggggcccacgactcacctggtgggcctgggctcagcaaacagccctccctcccagtatttcatcaaggacagggaatatccctcccacacacaggccagctgctcaccctgccacctccatgtgacaagtttgacacctgtctacccagagccagtgactgtccctcccagcagcctccaaagggtccaaagtccaagctagctctggcctgtgtggcccccacataaataaattagtggggagggggcagacctgggggcccttgggtgccagagtgagacacagcaggacccttccccaaatactaggctcagagcaacctccagccttctccagcaggatctgctccctgtgtccttggacagcagatccacacaccacttccccacccacacacagtaccctgggctggttggacaacaggatggtgtgttaaggggttaagggagggtactgttgacaccagctatggccaatagctgggctgtcctgaggggtggctggggacagagtccagctcccttggatcagcccagaggattcaggataggacaaaggccctggctgtgcccaaaagggtctacctcaggtggggttacaagcaaacctgggtgaccctcttgtccctaccagcagcttctcttgccccttccattcagggttccctggcaggggaagctgagagccatggctgaactatcagggacaaaggcccatgtccccacatccctgctccctccttcctcatccagcaccaaatctttgcttatgtccacaggccagggcctgtgctgcagtcggggacaaggagcttccgtctggcaaggccggggcacaatttgcactcccctcagctagacgcacagactcagcaataaacctttgcatcaggc

SEQ ID NO: 238848 - DNA, 1224 bp, Artificial Sequence
  derived and/or modified sequence
ccctccatccagaagaaccacctgctcactctgtcccttcgcctgctgctgggaccatgggggctggggccagtgctgaggagaagcactccagggagctggaaaagaagctgaaagaggacgctgagaaggatgctcgaaccgtgaagctgctgcttctgggtgccggtgagtccgggaagagcaccatcgtcaagcagatgaagattatccaccaggacgggtactcgctggaagagtgcctcgagtttatcgccatcatctacggcaacacgttgcagtccatcctggccatcgtacgcgccatgaccacactcaacatccagtacggagactctgcacgccaggacgacgcccggaagctgatgcacatggcagacactatcgaggagggcacgatgcccaaggagatgtcggacatcatccagcggctgtggaaggactccggtatccaggcctgttttgagcgcgcctcggagtaccagctcaacgactcggcgggctactacctctccgacctggagcgcctggtaaccccgggctacgtgcccaccgagcaggacgtgctgcgctcgcgagtcaagaccactggcatcatcgagacgcagttctccttcaaggatctcaacttccggatgttcgatgtgggcgggcagcgctcggagcgcaagaagtggatccactgcttcgagggcgtgacctgcatcatcttcatcgcggcgctgagcgcctacgacatggtgctagtggaggacgacgaagtgaaccgcatgcacgagagcctgcacctgttcaacagcatctgcaaccaccgctacttcgccacgacgtccatcgtgctcttccttaacaagaaggacgtcttcttcgagaagatcaagaaggcgcacctcagcatctgtttcccggactacgatggacccaacacctacgaggacgccggcaactacatcaaggtgcagttcctcgagctcaacatgcggcgcgacgtgaaggagatctattcccacatgacgtgcgccaccgacacgcagaacgtcaaatttgtcttcgacgctgtcaccgacatcatcatcaaggagaacctcaaagactgtggcctcttctgaggccagggcctgtgctgcagtcggggacaaggagcttccgtctggcaaggccggggcacaatttgcactcccctcagctagacgcacagactcagcaataaacctttgcatcagg

SEQ ID NO: 238849 - DNA, 1053 bp, Artificial Sequence
  derived and/or modified sequence
atgggcgccggcgccagcgccgaggagaagcacagccgggagctggaaaaaaagctcaaagaggacgctgagaaggatgcccgtaccgtgaagctactgctcctcggggcaggtgagtccgggaagagcactatcgtcaagcagatgaaaatcatccaccaggatgggtattccctggaagagtgcttggaattcatcgcaattatttacggtaatacactgcagagcatactggccatagtaagggccatgaccacgctgaacatccaatatggcgactccgccaggcaggacgacgccaggaagctgatgcatatggcagacacaatcgaggagggtacaatgccgaaggagatgagtgatatcatccagcgattatggaaggactcaggcattcaggcttgctttgaaagagcttccgaatatcagctgaacgatagcgctggatactatctttctgacttggaaagactggtgaccccggggtacgtgcccacggagcaggacgtgttgaggagtcgagtgaaaaccaccggcatcattgagacccagttttctttcaaagaccttaacttcagaatgttcgacgtgggtggacagaggtctgaaagaaagaagtggattcattgtttcgagggtgttacttgtataatctttatcgcagcccttagcgcttatgacatggtactggtcgaggacgatgaagtaaataggatgcatgaatctctgcacctcttcaacagcatctgcaatcaccggtatttcgctaccaccagcattgtgcttttcttgaacaagaaggacgttttcttcgagaaaatcaagaaagcccacctcagcatatgtttcccagactacgatggacctaacacctacgaggacgcaggcaactacattaaagttcaattccttgaacttaatatgcggagagacgtgaaggaaatttactcacatatgacgtgcgccaccgacacacagaacgtgaagtttgtgttcgacgccgtgaccgatatcatcataaaagaaaacttgaaggactgcggtctcttctag

SEQ ID NO: 238850 - DNA, 1053 bp, Artificial Sequence
  derived and/or modified sequence
atgggagcaggagctagcgcagaggagaaacacagtcgggagctggagaaaaaattgaaggaagacgccgagaaagatgcacgcacggtgaaattgttactcttgggagcaggtgaatccggcaagtctaccattgtcaagcaaatgaaaatcatacaccaggacgggtattctctagaggagtgtctagaattcatcgcaattatttatgggaacacgctccaatctattctcgccatagtccgggctatgaccactctcaacattcaatatggcgacagtgcacgacaggacgatgctcggaagctgatgcacatggctgacactattgaagaaggtacaatgcccaaggagatgagtgatattatacagcggctttggaaagactcagggatccaggcttgcttcgaacgggctagcgagtaccagctgaatgattccgcaggctactacctcagcgatttagagcgtctagtcacgccgggatatgtgcctacagagcaggacgtgctccgttcccgagtcaagaccaccggcattatcgagacacagtttagctttaaagatcttaattttagaatgttcgacgtcgggggacagagaagtgagcgtaagaaatggatccactgctttgagggcgtgacctgtattatcttcattgcggctttgtccgcttacgatatggtcctggtcgaagatgatgaagtcaacagaatgcatgagtccctacatctcttcaactctatttgcaatcaccggtacttcgctacaacttctattgttctttttctgaacaagaaggacgtattctttgagaagatcaagaaagcccatctgtccatatgctttccggattacgatgggccaaatacgtatgaggacgccggaaactacatcaaagtgcagtttctcgaactgaacatgagaagagacgtgaaggagatatattcccatatgacttgcgctacggacacccaaaacgttaaatttgtgttcgatgccgtcactgatataattattaaagaaaacctgaaggattgtggtttgttctag

SEQ ID NO: 238851 - protein, 305 aa, Artificial Sequence
  derived and/or modified sequence
MGRPRPRAAKTWMFLLLLGGAWAACGSLDLLTKLYAENLPCVHLNPQWPSQPSHCPRGWRSNPLPPAAGHSRAQEDKVLGGHECQPHSQPWQAALFQGQQLLCGGVLVGGNWVLTAAHCKKPKYTVRLGDHSLQNKDGPEQEIPVVQSIPHPCYNSSDVEDHNHDLMLLQLRDQASLGSKVKPISLADHCTQPGQKCTVSGWGTVTSPRENFPDTLNCAEVKIFPQKKCEDAYPGQITDGMVCAGSSKGADTCQGDSGGPLVCDGALQGITSWGSDPCGRSDKPGVYTNICRYLDWIKKIIGSKG

SEQ ID NO: 238852 - DNA, 918 bp, Artificial Sequence
  derived and/or modified sequence
atgggcagacctcggcccagggctgcaaaaacctggatgttcctgctactcctaggaggggcgtgggccgcatgtggcagtcttgacctcctcacaaagctttacgccgaaaacctcccctgcgtccatctgaacccccagtggcctagtcagccatctcattgccctcgtgggtggagaagtaatccactacctcctgctgccggccatagcagggcccaagaggacaaagtcctaggtggccacgagtgccaaccacactcacagccttggcaggcagccctgtttcagggacagcagctgctgtgtggaggcgttctggtgggtggcaactgggtgttgacagcagcgcactgtaagaaacctaaatataccgtgaggctgggcgaccactctctgcagaataaggacggacccgagcaggaaattccggtcgtgcagagcatcccccacccatgttacaactccagcgacgtagaggaccacaaccatgatttgatgctactccaactaagagaccaggcttccctcggatcgaaagttaagcccatttcactggccgatcattgcactcagcctgggcagaagtgtaccgtgtccggctgggggaccgtaacctccccacgagagaattttcctgatacactgaactgtgcagaggtaaaaatctttccccagaagaagtgtgaggacgcgtaccccggccagataacagatggaatggtctgcgcgggatcgtctaagggcgctgacacttgccaaggggacagcgggggaccactcgtgtgtgacggcgccctgcagggaattactagttgggggtcagacccttgcggcagaagcgacaaacctggcgtgtacacaaacatatgccgttacctcgactggattaaaaaaatcataggtagtaaagggtag

SEQ ID NO: 238853 - DNA, 1148 bp, Artificial Sequence
  derived and/or modified sequence
gttcccagaagctccccaggctctagtgcaggaggagaaggaggaggagcaggaggtggagattcccagttaaaaggctccagaatcgtgtaccaggcagagaactgaagtactggggcctcctccactgggtccgaatcagtaggtgaccccgcccctggattctggaagacctcaccatgggacgcccccgacctcgtgcggccaagacgtggatgttcctgctcttgctggggggagcctgggcagcgtgtggaagcctggacctcctcactaagttgtatgcggagaacttgccgtgtgtccatttgaacccacagtggccttcccagccctcgcactgccccagagggtggcgatccaaccctctccctcctgctgcaggacactccagggcacaggaggacaaggtgctggggggtcatgagtgccaaccccattcgcagccttggcaggcggccttgttccagggccagcaactactctgtggcggtgtccttgtaggtggcaactgggtccttacagctgcccactgtaaaaaaccgaaatacacagtacgcctgggagaccacagcctacagaataaagatggcccagagcaagaaatacctgtggttcagtccatcccacacccctgctacaacagcagcgatgtggaggaccacaaccatgatctgatgcttcttcaactgcgtgaccaggcatccctggggtccaaagtgaagcccatcagcctggcagatcattgcacccagcctggccagaagtgcaccgtctcaggctggggcactgtcaccagtccccgagagaattttcctgacactctcaactgtgcagaagtaaaaatctttccccagaagaagtgtgaggatgcttacccggggcagatcacagatggcatggtctgtgcaggcagcagcaaaggggctgacacgtgccagggcgattctggaggccccctggtgtgtgatggtgcactccagggcatcacatcctggggctcagacccctgtgggaggtccgacaaacctggcgtctataccaacatctgccgctacctggactggatcaagaagatcataggcagcaagggctgattctaggataagcactagatctcccttaataaactcacaactctctggttc

SEQ ID NO: 238854 - DNA, 918 bp, Artificial Sequence
  derived and/or modified sequence
atgggccggccccggccccgggccgccaagacctggatgttcctgctgctgctgggcggggcctgggccgcctgtggcagcctggacctgctgaccaagctgtatgcagagaacctgccctgtgtgcacctgaacccccagtggcccagccagcccagccactgcccccggggctggaggagcaaccccctgcccccagctgctggccacagccgggcccaggaggacaaggtgctgggcggccacgagtgccagccccacagccagccctggcaggccgccctcttccagggccagcagctgctgtgtggcggcgtgctggtgggcggcaactgggtgctgacagctgcccactgcaagaagcccaagtacacagtgcggctgggggaccacagcctgcagaacaaggatggccctgagcaggagatccctgtggtgcagagcatcccccacccctgctacaacagcagtgatgtggaggaccacaaccacgacctgatgctgctgcagctgcgggaccaggccagcctgggcagcaaggtgaagcccatcagcctggccgaccactgcacccagcccggccagaagtgcaccgtgtctggctggggcaccgtgaccagcccccgggagaacttcccagacaccctgaactgtgccgaggtgaagatcttcccccagaagaagtgtgaagatgcctacccaggccagatcacagatggcatggtgtgtgccggcagcagcaaaggagctgacacctgccagggcgacagcggcggccccctggtgtgtgatggagccctgcagggcatcacctcctggggcagtgacccctgtggccgcagtgacaagccaggagtgtacaccaacatctgccgctacctggactggatcaagaagatcatcggcagcaagggctag

SEQ ID NO: 238855 - DNA, 918 bp, Artificial Sequence
  derived and/or modified sequence
atgggccggccccggccccgggccgccaagacctggatgttcctgctgctccttggaggagcgtgggcagcctgcggttcgctggacctacttaccaaactctacgccgagaatctcccctgcgtccacttaaacccacagtggccgagccagccctctcactgccccagaggctggcgatctaacccactgccccccgcagcagggcacagtcgggcacaggaagataaggtgctgggggggcacgaatgtcagccacacagccagccatggcaagccgcactattccaaggccagcaactattatgcgggggggttctggtaggtgggaattgggttctgaccgccgctcattgtaaaaaaccaaaatacactgtgcggttaggagatcactccctccagaataaagatggcccagagcaagagatacccgtggttcaaagcattcctcacccatgttacaatagctctgatgtggaagaccacaaccatgacctcatgctcctccagctcagagatcaggcatcgcttggatctaaggtcaaaccaatctctctggccgatcactgtactcagccaggtcagaaatgtactgtgtcagggtggggaactgtaacaagcccacgtgagaatttccccgacactctcaactgcgcagaagtgaagatcttccctcagaagaagtgtgaggatgcttaccccgggcaaatcacagatggtatggtctgcgctggcagttctaaaggagccgacacctgccaaggtgactcagggggacccttagtgtgtgacggagctctccagggaatcacgagttggggcagcgacccatgtggcaggagcgacaaaccaggtgtgtatacaaacatttgtagatacctagactggatcaaaaagattatcggaagcaagggctag

SEQ ID NO: 238856 - DNA, 918 bp, Artificial Sequence
  derived and/or modified sequence
atgggacggcctcggcctagggctgccaaaacctggatgttcctgttactcctggggggagcgtgggccgcatgcggatccctggatctcttgacaaaattatatgctgagaatctgccttgcgtacacctgaatccacagtggcccagccagccgtctcattgccctcggggttggcgcagcaacccgttgcctccagctgccggtcattcgagagctcaagaggacaaagtcctcggagggcatgagtgtcagccccacagtcagccttggcaggccgcactgtttcagggccagcagttgctctgcggcggtgtgcttgttggcggaaattgggtcctgacggccgctcattgtaagaagccgaaatatactgtccgtctgggagatcatagtttacaaaataaagacggtcccgaacaggagatccctgtggttcaatcgattccgcacccttgctataactcttctgacgtcgaggaccacaaccatgatcttatgttgttacagctgcgagaccaagctagtctggggtcaaaggtcaagcccatcagcctggctgatcactgtacacagcccggtcagaagtgtactgttagcggttggggtacagtaacatcccccagggagaactttccagatactctcaattgtgctgaggtgaaaattttccctcagaaaaagtgcgaggacgcgtaccctggtcaaatcaccgacggaatggtttgtgctgggtcaagtaaaggcgctgatacctgccaaggcgatagcggcggacctctcgtgtgcgatggggctctacagggaatcacctcttggggaagcgacccatgcggcagatctgacaagcccggtgtgtacactaatatctgtcgctacctagactggattaaaaagatcatcggatcaaagggatag

SEQ ID NO: 238857 - DNA, 918 bp, Artificial Sequence
  derived and/or modified sequence
atgggcagacccagacccagagccgccaagacctggatgttcctgctgctgctgggcggcgcctgggccgcctgcggcagcctggacctgctgaccaagctgtacgccgagaacctgccctgcgtgcacctgaacccccagtggcccagccagcccagccactgccccagaggctggagaagcaaccccctgccccccgccgccggccacagcagagcccaggaggacaaggtgctgggcggccacgagtgccagccccacagccagccctggcaggccgccctgttccagggccagcagctgctgtgcggcggcgtgctggtgggcggcaactgggtgctgaccgccgcccactgcaagaagcccaagtacaccgtgagactgggcgaccacagcctgcagaacaaggacggccccgagcaggagatccccgtggtgcagagcatcccccacccctgctacaacagcagcgacgtggaggaccacaaccacgacctgatgctgctgcagctgagagaccaggccagcctgggcagcaaggtgaagcccatcagcctggccgaccactgcacccagcccggccagaagtgcaccgtgagcggctggggcaccgtgaccagccccagagagaacttccccgacaccctgaactgcgccgaggtgaagatcttcccccagaagaagtgcgaggacgcctaccccggccagatcaccgacggcatggtgtgcgccggcagcagcaagggcgccgacacctgccagggcgacagcggcggccccctggtgtgcgacggcgccctgcagggcatcaccagctggggcagcgacccctgcggcagaagcgacaagcccggcgtgtacaccaacatctgcagatacctggactggatcaagaagatcatcggcagcaagggctag

SEQ ID NO: 238858 - protein, 119 aa, Artificial Sequence
  derived and/or modified sequence
MGRPRPRAAKTWMFLLLLGGAWAENFPDTLNCAEVKIFPQKKCEDAYPGQITDGMVCAGSSKGADTCQGDSGGPLVCDGALQGITSWGSDPCGRSDKPGVYTNICRYLDWIKKIIGSKG

SEQ ID NO: 238859 - DNA, 360 bp, Artificial Sequence
  derived and/or modified sequence
atggggaggccaagaccacgggccgctaagacatggatgttccttctgctgctcggcggcgcgtgggcagagaacttcccggacaccttgaattgcgctgaggtgaagatcttccctcagaaaaagtgtgaggatgcctaccccgggcaaataacagacggtatggtgtgcgcgggtagctccaaaggggctgacacttgtcaaggggatagcggcgggcccctcgtttgtgatggtgccctgcaggggatcacatcttgggggtcagatccatgtggccgaagtgacaaacctggcgtgtatactaacatctgtcggtatctcgactggatcaaaaagatcattgggtcaaaggggtag

SEQ ID NO: 238860 - DNA, 456 bp, Artificial Sequence
  derived and/or modified sequence
gttcccagaagctccccaggctctagtgcaggaggagaaggaggaggagcaggaggtggagattcccagttaaaaggctccagaatcgtgtaccaggcagagaactgaagtactggggcctcctccactgggtccgaatcagtaggtgaccccgcccctggattctggaagacctcaccatgggacgcccccgacctcgtgcggccaagacgtggatgttcctgctcttgctggggggagcctgggcagggcgattctggaggccccctggtgtgtgatggtgcactccagggcatcacatcctggggctcagacccctgtgggaggtccgacaaacctggcgtctataccaacatctgccgctacctggactggatcaagaagatcataggcagcaagggctgattctaggataagcactagatctcccttaataaactcacaactctctggttc

SEQ ID NO: 238861 - DNA, 590 bp, Artificial Sequence
  derived and/or modified sequence
gttcccagaagctccccaggctctagtgcaggaggagaaggaggaggagcaggaggtggagattcccagttaaaaggctccagaatcgtgtaccaggcagagaactgaagtactggggcctcctccactgggtccgaatcagtaggtgaccccgcccctggattctggaagacctcaccatgggacgcccccgacctcgtgcggccaagacgtggatgttcctgctcttgctggggggagcctgggcagagaattttcctgacactctcaactgtgcagaagtaaaaatctttccccagaagaagtgtgaggatgcttacccggggcagatcacagatggcatggtctgtgcaggcagcagcaaaggggctgacacgtgccagggcgattctggaggccccctggtgtgtgatggtgcactccagggcatcacatcctggggctcagacccctgtgggaggtccgacaaacctggcgtctataccaacatctgccgctacctggactggatcaagaagatcataggcagcaagggctgattctaggataagcactagatctcccttaataaactcacaactctctggttc

SEQ ID NO: 238862 - DNA, 360 bp, Artificial Sequence
  derived and/or modified sequence
atgggccggccccggccccgggccgccaagacctggatgttcctgctgctgctgggcggggcctgggccgagaacttcccagacaccctgaactgtgccgaggtgaagatcttcccccagaagaagtgtgaagatgcctacccaggccagatcacagatggcatggtgtgtgccggcagcagcaaaggagctgacacctgccagggcgacagcggcggccccctggtgtgtgatggagccctgcagggcatcacctcctggggcagtgacccctgtggccgcagtgacaagccaggagtgtacaccaacatctgccgctacctggactggatcaagaagatcatcggcagcaagggctag

SEQ ID NO: 238863 - DNA, 360 bp, Artificial Sequence
  derived and/or modified sequence
atgggccggccccggccccgggccgccaagacctggatgttcctgttgttgctcggcggggcctgggccgagaatttccccgacactctcaattgtgcggaggttaaaatcttcccgcaaaaaaaatgcgaggatgcctatcctggccagattactgatggtatggtgtgcgccggaagctctaagggagcggacacctgccagggcgactctggggggccactggtgtgcgacggtgcccttcaaggaatcaccagttggggctctgacccatgcgggcgctccgataagcccggcgtgtataccaatatttgtcgttacctcgattggattaaaaaaatcatcggctctaagggttag

SEQ ID NO: 238864 - DNA, 360 bp, Artificial Sequence
  derived and/or modified sequence
atgggcaggccaaggcctcgcgcagctaagacttggatgttcctgttgttactgggtggggcttgggcggaaaactttcctgacactctaaactgcgcagaagttaagatcttcccgcagaagaagtgtgaggacgcataccccggtcagattacggacggaatggtgtgcgctggtagcagcaaaggagccgacacctgccagggagatagcggcggaccactggtctgtgatggtgcgctgcaggggatcaccagctggggctcggacccgtgcggtagaagcgacaagcctggagtttataccaacatatgtcgataccttgattggatcaaaaagattataggtagcaagggctag

SEQ ID NO: 238865 - DNA, 360 bp, Artificial Sequence
  derived and/or modified sequence
atgggcagacccagacccagagccgccaagacctggatgttcctgctgctgctgggcggcgcctgggccgagaacttccccgacaccctgaactgcgccgaggtgaagatcttcccccagaagaagtgcgaggacgcctaccccggccagatcaccgacggcatggtgtgcgccggcagcagcaagggcgccgacacctgccagggcgacagcggcggccccctggtgtgcgacggcgccctgcagggcatcaccagctggggcagcgacccctgcggcagaagcgacaagcccggcgtgtacaccaacatctgcagatacctggactggatcaagaagatcatcggcagcaagggctag

SEQ ID NO: 238866 - protein, 32 aa, Artificial Sequence
  derived and/or modified sequence
MGRPRPRAAKTWMFLLLLGGAWAGRFWRPPGV

SEQ ID NO: 238867 - DNA, 99 bp, Artificial Sequence
  derived and/or modified sequence
atggggcggcctaggccgcgcgccgccaagacctggatgttcctcctcctgctcggcggcgcgtgggccgggagattctggaggcctcccggagtctag

SEQ ID NO: 238868 - DNA, 99 bp, Artificial Sequence
  derived and/or modified sequence
atgggccggccccggccccgggccgccaagacctggatgttcctgctgctgctgggcggggcctgggccggccgcttctggaggcctcctggggtgtag

SEQ ID NO: 238869 - DNA, 99 bp, Artificial Sequence
  derived and/or modified sequence
atgggccggccccggccccgggccgccaagacctggatgttcctgctgctgcttggcggggcatgggctggccgcttctggcgcccccccggagtttag

SEQ ID NO: 238870 - DNA, 99 bp, Artificial Sequence
  derived and/or modified sequence
atgggacgaccccgtcccagggcagccaagacatggatgtttctgctgctcctgggcggagcctgggccggtagattttggcggccaccaggcgtgtag

SEQ ID NO: 238871 - DNA, 99 bp, Artificial Sequence
  derived and/or modified sequence
atgggcagacccagacccagagccgccaagacctggatgttcctgctgctgctgggcggcgcctgggccggcagattctggagaccccccggcgtgtag

SEQ ID NO: 238872 - protein, 2316 aa, Artificial Sequence
  derived and/or modified sequence
MDGVSSEANEENDNIERPVRRRHSSILKPPRSPLQDLRGGNERVQESNALRNKKNSRRVSFADTIKVFQTESHMKIVRKSEMEETETGENLLLIQNKKLEDNYCEITGMNTLLSAPIHTQMQQKEFSIIEHTRERKHANDQTVIFSDENQMDLTSSHTVMITKGLLDNPISEKSTKIDTTSFLANLKLHTEDSRMKKEVNFSVDQNTSSENKIDFNDFIKRLKTGKCSAFPDVPDKENFEIPIYSKEPNSASSTHQMHVSLKEDENNSNITRLFREKDDGMNFTQCHTANIQTLIPTSSETNSRESKGNDITIYGNDFMDLTFNHTLQILPATGNFSEIENQTQNAMDVTTGYGTKASGNKTVFKSKQNTAFQDLSINSADKIHITRSHIMGAETHIVSQTCNQDARILAMTPESIYSNPSIQGCKTVFYSSCNDAMEMTKCLSNMREEKNLLKHDSNYAKMYCNPDAMSSLTEKTIYSGEENMDITKSHTVAIDNQIFKQDQSNVQIAAAPTPEKEMMLQNLMTTSEDGKMNVNCNSVPHVSKERIQQSLSNPLSISLTDRKTELLSGENMDLTESHTSNLGSQVPLAAYNLAPESTSESHSQSKSSSDECEEITKSRNEPFQRSDIIAKNSLTDTWNKDKDWVLKILPYLDKDSPQSADCNQEIATSHNIVYCGGVLDKQITNRNTVSWEQSLFSTTKPLFSSGQFSMKNHDTAISSHTVKSVLGQNSKLAEPLRKSLSNPTPDYCHDKMIICSEEEQNMDLTKSHTVVIGFGPSELQELGKTNLEHTTGQLTTMNRQIAVKVEKCGKSPIEKSGVLKSNCIMDVLEDESVQKPKFPKEKQNVKIWGRKSVGGPKIDKTIVFSEDDKNDMDITKSYTIEINHRPLLEKRDCHLVPLAGTSETILYTCRQDDMEITRSHTTALECKTVSPDEITTRPMDKTVVFVDNHVELEMTESHTVFIDYQEKERTDRPNFELSQRKSLGTPTVICTPTEESVFFPGNGESDRLVANDSQLTPLEEWSNNRGPVEVADNMELSKSATCKNIKDVQSPGFLNEPLSSKSQRRKSLKLKNDKTIVFSENHKNDMDITQSCMVEIDNESALEDKEDFHLAGASKTILYSCGQDDMEITRSHTTALECKTLLPNEIAIRPMDKTVLFTDNYSDLEVTDSHTVFIDCQATEKILEENPKFGIGKGKNLGVSFPKDNSCVQEIAEKQALAVGNKIVLHTEQKQQLFAATNRTTNEIIKFHSAAMDEKVIGKVVDQACTLEKAQVESCQLNNRDRRNVDFTSSHATAVCGSSDNYSCLPNVISCTDNLEGSAMLLCDKDEEKANYCPVQNDLAYANDFASEYYLESEGQPLSAPCPLLEKEEVIQTSTKGQLDCVITLHKDQDLIKDPRNLLANQTLVYSQDLGEMTKLNSKRVSFKLPKDQMKVYVDDIYVIPQPHFSTDQPPLPKKGQSSINKEEVILSKAGNKSLNIIENSSAPICENKPKILNSEEWFAAACKKELKENIQTTNYNTALDFHSNSDVTKQVIQTHVNAGEAPDPVITSNVPCFHSIKPNLNNLNGKTGEFLAFQTVHLPPLPEQLLELGNKAHNDMHIVQATEIHNINIISSNAKDSRDEENKKSHNGAETTSLPPKTVFKDKVRRCSLGIFLPRLPNKRNCSVTGIDDLEQIPADTTDINHLETQPVSSKDSGIGSVAGKLNLSPSQYINEENLPVYPDEINSSDSINIETEEKALIETYQKEISPYENKMGKTCNSQKRTWVQEEEDIHKEKKIRKNEIKFSDTTQDREIFDHHTEEDIDKSANSVLIKNLSRTPSSCSSSLDSIKADGTSLDFSTYRSSQMESQFLRDTICEESLREKLQDGRITIREFFILLQVHILIQKPRQSNLPGNFTVNTPPTPEDLMLSQYVYRPKIQIYREDCEARRQKIEELKLSASNQDKLLVDINKNLWEKMRHCSDKELKAFGIYLNKIKSCFTKMTKVFTHQGKVALYGKLVQSAQNEREKLQIKIDEMDKILKKIDNCLTEMETETKNLEDEEKNNPVEEWDSEMRAAEKELEQLKTEEEELQRNLLELEVQKEQTLAQIDFMQKQRNRTEELLDQLSLSEWDVVEWSDDQAVFTFVYDTIQLTITFEESVVGFPFLDKRYRKIVDVNFQSLLDEDQAPPSSLLVHKLIFQYVEEKESWKKTCTTQHQLPKMLEEFSLVVHHCRLLGEEIEYLKRWGPNYNLMNIDINNNELRLLFSSSAAFAKFEITLFLSAYYPSVPLPSTIQNHVGNTSQDDIATILSKVPLENNYLKNVVKQIYQDLFQDCHFYH

SEQ ID NO: 238873 - DNA, 6951 bp, Artificial Sequence
  derived and/or modified sequence
atggacggcgtgagcagcgaggccaacgaggagaacgacaacatcgagagacccgtgagaagaagacacagcagcatcctgaagccccccagaagccccctgcaggacctgagaggcggcaacgagagagtgcaggagagcaacgccctgagaaacaagaagaacagcagaagagtgagcttcgccgacaccatcaaggtgttccagaccgagagccacatgaagatcgtgagaaagagcgagatggaggagaccgagaccggcgagaacctgctgctgatccagaacaagaagctggaggacaactactgcgagatcaccggcatgaacaccctgctgagcgcccccatccacacccagatgcagcagaaggagttcagcatcatcgagcacaccagagagagaaagcacgccaacgaccagaccgtgatcttcagcgacgagaaccagatggacctgaccagcagccacaccgtgatgatcaccaagggcctgctggacaaccccatcagcgagaagagcaccaagatcgacaccaccagcttcctggccaacctgaagctgcacaccgaggacagcagaatgaagaaggaggtgaacttcagcgtggaccagaacaccagcagcgagaacaagatcgacttcaacgacttcatcaagagactgaagaccggcaagtgcagcgccttccccgacgtgcccgacaaggagaacttcgagatccccatctacagcaaggagcccaacagcgccagcagcacccaccagatgcacgtgagcctgaaggaggacgagaacaacagcaacatcaccagactgttcagagagaaggacgacggcatgaacttcacccagtgccacaccgccaacatccagaccctgatccccaccagcagcgagaccaacagcagagagagcaagggcaacgacatcaccatctacggcaacgacttcatggacctgaccttcaaccacaccctgcagatcctgcccgccaccggcaacttcagcgagatcgagaaccagacccagaacgccatggacgtgaccaccggctacggcaccaaggccagcggcaacaagaccgtgttcaagagcaagcagaacaccgccttccaggacctgagcatcaacagcgccgacaagatccacatcaccagaagccacatcatgggcgccgagacccacatcgtgagccagacctgcaaccaggacgccagaatcctggccatgacccccgagagcatctacagcaaccccagcatccagggctgcaagaccgtgttctacagcagctgcaacgacgccatggagatgaccaagtgcctgagcaacatgagagaggagaagaacctgctgaagcacgacagcaactacgccaagatgtactgcaaccccgacgccatgagcagcctgaccgagaagaccatctacagcggcgaggagaacatggacatcaccaagagccacaccgtggccatcgacaaccagatcttcaagcaggaccagagcaacgtgcagatcgccgccgcccccacccccgagaaggagatgatgctgcagaacctgatgaccaccagcgaggacggcaagatgaacgtgaactgcaacagcgtgccccacgtgagcaaggagagaatccagcagagcctgagcaaccccctgagcatcagcctgaccgacagaaagaccgagctgctgagcggcgagaacatggacctgaccgagagccacaccagcaacctgggcagccaggtgcccctggccgcctacaacctggcccccgagagcaccagcgagagccacagccagagcaagagcagcagcgacgagtgcgaggagatcaccaagagcagaaacgagcccttccagagaagcgacatcatcgccaagaacagcctgaccgacacctggaacaaggacaaggactgggtgctgaagatcctgccctacctggacaaggacagcccccagagcgccgactgcaaccaggagatcgccaccagccacaacatcgtgtactgcggcggcgtgctggacaagcagatcaccaacagaaacaccgtgagctgggagcagagcctgttcagcaccaccaagcccctgttcagcagcggccagttcagcatgaagaaccacgacaccgccatcagcagccacaccgtgaagagcgtgctgggccagaacagcaagctggccgagcccctgagaaagagcctgagcaaccccacccccgactactgccacgacaagatgatcatctgcagcgaggaggagcagaacatggacctgaccaagagccacaccgtggtgatcggcttcggccccagcgagctgcaggagctgggcaagaccaacctggagcacaccaccggccagctgaccaccatgaacagacagatcgccgtgaaggtggagaagtgcggcaagagccccatcgagaagagcggcgtgctgaagagcaactgcatcatggacgtgctggaggacgagagcgtgcagaagcccaagttccccaaggagaagcagaacgtgaagatctggggcagaaagagcgtgggcggccccaagatcgacaagaccatcgtgttcagcgaggacgacaagaacgacatggacatcaccaagagctacaccatcgagatcaaccacagacccctgctggagaagagagactgccacctggtgcccctggccggcaccagcgagaccatcctgtacacctgcagacaggacgacatggagatcaccagaagccacaccaccgccctggagtgcaagaccgtgagccccgacgagatcaccaccagacccatggacaagaccgtggtgttcgtggacaaccacgtggagctggagatgaccgagagccacaccgtgttcatcgactaccaggagaaggagagaaccgacagacccaacttcgagctgagccagagaaagagcctgggcacccccaccgtgatctgcacccccaccgaggagagcgtgttcttccccggcaacggcgagagcgacagactggtggccaacgacagccagctgacccccctggaggagtggagcaacaacagaggccccgtggaggtggccgacaacatggagctgagcaagagcgccacctgcaagaacatcaaggacgtgcagagccccggcttcctgaacgagcccctgagcagcaagagccagagaagaaagagcctgaagctgaagaacgacaagaccatcgtgttcagcgagaaccacaagaacgacatggacatcacccagagctgcatggtggagatcgacaacgagagcgccctggaggacaaggaggacttccacctggccggcgccagcaagaccatcctgtacagctgcggccaggacgacatggagatcaccagaagccacaccaccgccctggagtgcaagaccctgctgcccaacgagatcgccatcagacccatggacaagaccgtgctgttcaccgacaactacagcgacctggaggtgaccgacagccacaccgtgttcatcgactgccaggccaccgagaagatcctggaggagaaccccaagttcggcatcggcaagggcaagaacctgggcgtgagcttccccaaggacaacagctgcgtgcaggagatcgccgagaagcaggccctggccgtgggcaacaagatcgtgctgcacaccgagcagaagcagcagctgttcgccgccaccaacagaaccaccaacgagatcatcaagttccacagcgccgccatggacgagaaggtgatcggcaaggtggtggaccaggcctgcaccctggagaaggcccaggtggagagctgccagctgaacaacagagacagaagaaacgtggacttcaccagcagccacgccaccgccgtgtgcggcagcagcgacaactacagctgcctgcccaacgtgatcagctgcaccgacaacctggagggcagcgccatgctgctgtgcgacaaggacgaggagaaggccaactactgccccgtgcagaacgacctggcctacgccaacgacttcgccagcgagtactacctggagagcgagggccagcccctgagcgccccctgccccctgctggagaaggaggaggtgatccagaccagcaccaagggccagctggactgcgtgatcaccctgcacaaggaccaggacctgatcaaggaccccagaaacctgctggccaaccagaccctggtgtacagccaggacctgggcgagatgaccaagctgaacagcaagagagtgagcttcaagctgcccaaggaccagatgaaggtgtacgtggacgacatctacgtgatcccccagccccacttcagcaccgaccagccccccctgcccaagaagggccagagcagcatcaacaaggaggaggtgatcctgagcaaggccggcaacaagagcctgaacatcatcgagaacagcagcgcccccatctgcgagaacaagcccaagatcctgaacagcgaggagtggttcgccgccgcctgcaagaaggagctgaaggagaacatccagaccaccaactacaacaccgccctggacttccacagcaacagcgacgtgaccaagcaggtgatccagacccacgtgaacgccggcgaggcccccgaccccgtgatcaccagcaacgtgccctgcttccacagcatcaagcccaacctgaacaacctgaacggcaagaccggcgagttcctggccttccagaccgtgcacctgccccccctgcccgagcagctgctggagctgggcaacaaggcccacaacgacatgcacatcgtgcaggccaccgagatccacaacatcaacatcatcagcagcaacgccaaggacagcagagacgaggagaacaagaagagccacaacggcgccgagaccaccagcctgccccccaagaccgtgttcaaggacaaggtgagaagatgcagcctgggcatcttcctgcccagactgcccaacaagagaaactgcagcgtgaccggcatcgacgacctggagcagatccccgccgacaccaccgacatcaaccacctggagacccagcccgtgagcagcaaggacagcggcatcggcagcgtggccggcaagctgaacctgagccccagccagtacatcaacgaggagaacctgcccgtgtaccccgacgagatcaacagcagcgacagcatcaacatcgagaccgaggagaaggccctgatcgagacctaccagaaggagatcagcccctacgagaacaagatgggcaagacctgcaacagccagaagagaacctgggtgcaggaggaggaggacatccacaaggagaagaagatcagaaagaacgagatcaagttcagcgacaccacccaggacagagagatcttcgaccaccacaccgaggaggacatcgacaagagcgccaacagcgtgctgatcaagaacctgagcagaacccccagcagctgcagcagcagcctggacagcatcaaggccgacggcaccagcctggacttcagcacctacagaagcagccagatggagagccagttcctgagagacaccatctgcgaggagagcctgagagagaagctgcaggacggcagaatcaccatcagagagttcttcatcctgctgcaggtgcacatcctgatccagaagcccagacagagcaacctgcccggcaacttcaccgtgaacaccccccccacccccgaggacctgatgctgagccagtacgtgtacagacccaagatccagatctacagagaggactgcgaggccagaagacagaagatcgaggagctgaagctgagcgccagcaaccaggacaagctgctggtggacatcaacaagaacctgtgggagaagatgagacactgcagcgacaaggagctgaaggccttcggcatctacctgaacaagatcaagagctgcttcaccaagatgaccaaggtgttcacccaccagggcaaggtggccctgtacggcaagctggtgcagagcgcccagaacgagagagagaagctgcagatcaagatcgacgagatggacaagatcctgaagaagatcgacaactgcctgaccgagatggagaccgagaccaagaacctggaggacgaggagaagaacaaccccgtggaggagtgggacagcgagatgagagccgccgagaaggagctggagcagctgaagaccgaggaggaggagctgcagagaaacctgctggagctggaggtgcagaaggagcagaccctggcccagatcgacttcatgcagaagcagagaaacagaaccgaggagctgctggaccagctgagcctgagcgagtgggacgtggtggagtggagcgacgaccaggccgtgttcaccttcgtgtacgacaccatccagctgaccatcaccttcgaggagagcgtggtgggcttccccttcctggacaagagatacagaaagatcgtggacgtgaacttccagagcctgctggacgaggaccaggccccccccagcagcctgctggtgcacaagctgatcttccagtacgtggaggagaaggagagctggaagaagacctgcaccacccagcaccagctgcccaagatgctggaggagttcagcctggtggtgcaccactgcagactgctgggcgaggagatcgagtacctgaagagatggggccccaactacaacctgatgaacatcgacatcaacaacaacgagctgagactgctgttcagcagcagcgccgccttcgccaagttcgagatcaccctgttcctgagcgcctactaccccagcgtgcccctgcccagcaccatccagaaccacgtgggcaacaccagccaggacgacatcgccaccatcctgagcaaggtgcccctggagaacaactacctgaagaacgtggtgaagcagatctaccaggacctgttccaggactgccacttctaccactag

SEQ ID NO: 238874 - DNA, 6951 bp, Artificial Sequence
  derived and/or modified sequence
atggatggagtgtcctccgaggccaacgaggaaaatgacaatatcgagcgcccggttcgccggcgccactcaagcatactcaagccaccccggtcccccctccaggatctgagggggggaaacgagcgggtgcaggaaagcaacgctttgcggaacaaaaaaaactcccgccgagtgagtttcgccgatacaatcaaagtcttccagactgaatctcacatgaaaattgtcagaaagagcgaaatggaagagaccgagaccggggagaacctcctgctgatccagaacaaaaagctggaagacaattactgcgagattaccgggatgaacaccttactttcagcccctatacatacccagatgcagcagaaggaattttctatcatcgagcatacccgggagagaaagcacgctaatgaccagacggtgatattctctgacgaaaatcagatggatcttacttcttcccacactgtcatgatcaccaaaggtctgctggataatcccattagcgagaagtcgacaaagattgacaccaccagcttccttgccaatctgaagttgcataccgaggattctcgcatgaaaaaagaagtgaacttctccgtggaccagaatacgagtagtgagaacaaaattgatttcaacgactttatcaaacggctcaagacaggaaaatgtagcgccttcccagacgttccagataaggagaattttgaaattccgatctatagcaaggaacctaactcagcatctagcactcatcagatgcacgtgtcccttaaggaagacgagaacaactccaacatcacaagactctttcgtgagaaggacgacggcatgaatttcacacagtgccacactgcgaatattcagacactgataccaacttcatccgagactaatagtagggaatctaagggcaacgatatcaccatctacgggaatgatttcatggacctgacatttaaccacaccttacagatcctgccggcaactgggaatttttccgaaattgagaatcagacacagaacgccatggatgtcaccaccggctatggaactaaggcaagtgggaataagactgtgttcaaatctaaacaaaacactgcctttcaggacttaagcattaatagtgccgacaagatccatattacacggtctcacataatgggggccgagacccacatcgtgtctcaaacatgcaatcaggatgcccgtattctagccatgactcctgaatcaatatactcgaacccatctatccagggttgtaaaaccgtattctactcctcatgcaacgatgcaatggagatgacgaaatgcctctctaacatgcgcgaagagaaaaacttgttgaagcatgactcaaattacgcaaagatgtactgtaatccggacgctatgtcttcccttactgagaagacaatttacagcggagaagagaatatggacattaccaaatcgcacactgtagccattgataaccagatttttaaacaggatcagtcaaacgttcagatcgctgccgccccaacccccgaaaaggaaatgatgctgcagaatctgatgacgacctccgaggacggcaagatgaatgtgaattgtaactccgtgccgcacgtatctaaggagcgcatacagcagtcattgagcaatccactgtctatcagcctgactgaccgaaagaccgagcttctgtcaggagaaaacatggatcttaccgaaagccacacttccaacctgggctctcaagtacctttggccgcctacaatctcgcgccagagtccacatccgaaagccattctcagagtaagtcgtctagcgacgagtgtgaggagataacaaagtcccgcaatgagccgtttcagagatcagacattatagccaaaaactccctgaccgacacttggaacaaggataaggattgggtactgaaaattttgccctatctcgataaggactcaccacagtcagccgattgcaatcaggagatcgctaccagtcacaacatagtctattgtggaggcgtcctggacaagcagatcacgaaccggaacaccgtttcatgggaacagtcccttttttctacaacaaaacctctgtttagtagtggccagttttctatgaagaaccacgatactgctatttcctcacatacagtgaagtccgtcttgggtcagaactctaaactggctgagccgttgcggaagagccttagcaatccaaccccagactattgtcacgacaaaatgatcatatgctccgaagaggagcagaatatggacttaaccaaatcccacactgtcgtcattgggtttggtccctcagagctgcaagagctcggaaagaccaatctggagcatacaactgggcaactcactactatgaatcggcaaattgctgtaaaggtggagaaatgtgggaagtctcccattgaaaagtctggcgtgctgaaatccaattgcataatggacgtgcttgaggacgaaagcgtccagaagccgaagttcccaaaggagaaacagaacgtgaaaatctggggcagaaaaagtgtaggcggcccgaagattgacaaaactatcgtttttagtgaagatgataagaacgatatggatatcactaaatcgtacactatcgaaattaaccatcgtcccctgctggaaaaaagggactgccatctcgtgccccttgccggtacctccgagaccatcctctacacatgccgacaggacgacatggagattacacgaagccataccaccgccctggagtgtaagactgtctcacccgacgagattaccacgagaccaatggacaaaacagtagtttttgtggataatcacgtggagttggaaatgacggaaagccatacagtgttcattgattatcaagaaaaagagagaacagatagacccaatttcgaattaagtcagcggaaatcccttggaacacccaccgtgatttgtacgcctactgaagaaagcgtgttctttcccggtaacggtgaatcagatagactcgtggctaatgattcacagctcacaccactggaagaatggtcaaacaatcgcggacctgtggaagtggctgataacatggagctttccaagtcagcaacatgcaagaacatcaaagacgtgcagtctccaggctttttaaacgagcccctatccagcaaaagccagagaagaaaatccctgaaattaaagaacgataagactatcgtgttcagcgaaaaccataagaatgacatggatatcacccagtcttgcatggttgaaatcgataacgagtccgctcttgaggacaaggaggatttccaccttgccggggcttcgaagacaatcctttactcttgtggccaggatgacatggagatcacccgttctcacaccacggccttggagtgtaaaaccctgctgccaaacgagatcgccatccgccctatggacaaaaccgtgctcttcaccgacaattactccgatctggaggtgaccgatagccacaccgtgtttatagactgccaggccacggagaaaatccttgaggagaacccgaaatttgggatcggcaaaggcaaaaacctgggtgtgtcctttcctaaagacaactcttgtgtgcaagaaatagctgaaaaacaggccctcgcagtgggcaataaaattgttctgcacacagagcagaaacagcagttattcgccgctacaaacaggactaccaatgagattatcaaattccacagcgcagcaatggacgaaaaggttattggaaaggttgttgaccaagcctgcaccctggagaaagcacaagtcgagagctgccagctgaacaatcgcgacaggaggaatgttgatttcactagcagccatgctacggctgtctgtggttcttcggacaattattcctgcctgccaaatgtgatctcctgtaccgacaacctggagggaagcgcaatgctgctttgtgacaaggacgaagagaaagctaattattgcccagtgcagaacgacctggcgtacgctaatgatttcgcatccgagtactatctggagagtgagggacagcccctgagtgctccttgtccgctgctcgagaaagaggaagtgatacagacgagtactaaaggccaactcgactgtgttataacactacacaaagatcaggaccttataaaggacccacggaacttactcgctaatcaaacacttgtgtatagccaggacctgggcgaaatgacaaaactgaactcaaaacgagtcagctttaaattacccaaagaccaaatgaaggtttatgttgatgatatttacgtgattccccagccacatttttccaccgaccagccacctctccctaagaagggacagtcttcgattaataaagaggaagtgatcctgtctaaggcgggcaataagagtctcaacattatagaaaatagcagtgcccccatctgcgaaaataaacccaagatcttgaattccgaagagtggttcgcagccgcatgcaagaaggagttgaaggagaatatacagaccacgaattataatactgcccttgatttccacagcaacagcgacgtgacaaagcaggtaatacagacgcacgtcaatgctggagaagcccctgacccagtgatcacctctaacgtcccatgcttccactccattaagcctaacctgaataacctgaatgggaagaccggcgaatttctggcctttcagacagttcaccttccgccgctcccggagcagctgcttgagttgggtaacaaggcgcataacgacatgcacattgtgcaggcaactgagatacacaatataaacatcatctccagtaacgccaaggactcccgagacgaggaaaacaagaagagtcacaacggagccgaaaccacctcactacctccaaagacagtgtttaaggacaaggtgagacgttgctcactcgggatctttctgcctcggttaccgaacaagaggaactgctccgtaactggcatagacgatcttgagcaaattccagccgataccacggatataaaccatctagaaacgcagcccgtcagttcaaaggactcagggatcggaagtgtcgccggtaaattaaatctgtccccaagtcagtatatcaacgaggagaatctacccgtttaccctgatgagataaacagcagtgatagtattaatatcgaaaccgaggagaaggccctcattgagacctatcagaaggaaataagcccttacgaaaataaaatggggaagacctgcaactctcagaaacgtacatgggtgcaagaagaagaggatattcataaggaaaagaagatccgtaagaacgaaatcaagttctccgatacaacgcaggaccgagaaatcttcgaccaccataccgaggaggatattgataagtccgccaatagtgtgttgatcaagaacctgtctagaactccatcgtcctgttcgtcttcgctggattctatcaaggccgacggaacaagcctggacttttcaacctacagaagttcccaaatggaatctcaattcctgcgggatacaatatgcgaagagtctctcagggaaaaactacaggatggccgtattaccatccgtgagtttttcattttgctgcaagtgcatattctgatccagaagccaagacagtccaatctccctggtaatttcactgtcaacacccctccgacccccgaagacttgatgttgtctcaatatgtctatcgccctaaaatacagatctacagggaagattgcgaagcaagacgacagaaaatcgaggaacttaagctgtcggcatcgaaccaggataagctgcttgtggatatcaacaagaatctttgggaaaagatgcgtcactgcagcgacaaggaactgaaagcatttggaatttaccttaataaaataaagtcctgttttacaaaaatgaccaaagtgttcactcaccaggggaaggtggctctctacggaaaactcgttcaatccgctcagaatgagagagaaaaactccagattaagatcgacgaaatggacaaaattttaaagaagatcgacaattgcctgacagaaatggaaaccgagacaaagaatcttgaagatgaagagaaaaataaccctgtggaggagtgggattctgagatgcgggccgcggagaaggagcttgagcagttgaaaacagaggaggaggaactacaacggaatctcctggaactcgaggtgcagaaggaacagacactggcacagatcgactttatgcagaagcaacgcaatcggaccgaggagctcctggatcagctgagcctgtcggaatgggatgtagtcgaatggtctgacgaccaagctgtctttacgtttgtttatgataccattcagctgactatcaccttcgaggaatcggtggtggggttccccttcttagataagaggtaccgcaaaatcgtggatgtcaatttccagagcctgcttgacgaggaccaggccccaccgagctcactgttggtacacaagctgatttttcagtacgtggaggagaaagagagctggaaaaaaacctgtacgacccagcatcagcttcccaagatgctggaggaattctctctggtggtgcatcattgtcgtttactgggggaggagattgagtacctcaaaagatggggacccaattataatttgatgaacatagacataaacaacaatgaattaagactgttattttcatccagtgctgccttcgccaaattcgagatcaccctatttcttagcgcatattacccgtcagtgcccttgcccagtaccatccaaaaccatgtagggaatacaagccaagacgatatcgcaacaatcctgagcaaagtccccctggagaataactatctgaaaaatgttgttaaacaaatttaccaagatctctttcaggattgtcatttctaccattag

SEQ ID NO: 238875 - DNA, 6951 bp, Artificial Sequence
  derived and/or modified sequence
atggatggagtgagcagcgaggccaatgaagaaaatgacaacatcgagaggcctgtgagaagaagacacagcagcatcctgaagcccccaagaagccccctgcaggacctgcggggcggcaatgaaagagtgcaggagagcaatgccctgaggaacaagaagaacagcagaagagtgtcctttgctgacaccatcaaggtgttccagacagagagccacatgaagatcgtgaggaagtctgagatggaggagacagaaacaggagagaacctgctgctgatccagaacaagaagctggaggacaactactgtgagatcaccggcatgaacaccctgctgagcgcccccatccacacccagatgcagcagaaggagttcagcatcatcgagcacacccgggagaggaagcacgccaatgaccagaccgtcatcttcagtgatgagaaccagatggacctgaccagcagccacacagtgatgatcaccaagggcctgctggacaaccccatcagcgagaagagcaccaagattgacaccaccagcttcctggccaacctgaagctgcacacagaggacagcaggatgaagaaggaggtgaacttctctgtggaccagaacaccagcagcgagaacaagattgacttcaatgacttcatcaagaggctgaagacaggcaagtgcagcgccttcccagatgtgcctgacaaggaaaattttgagatccccatctacagcaaggagcccaacagcgccagcagcacccaccagatgcacgtgtccctgaaggaggatgagaacaacagcaacatcaccaggctcttccgggagaaggatgatggcatgaacttcacccagtgccacacagccaacatccagaccctcatccccaccagcagcgagaccaacagccgggagagcaaaggaaatgacatcaccatctatggaaatgacttcatggacctgaccttcaaccacaccctgcagatcctgcctgccactggaaacttcagcgagattgagaaccagacccagaatgccatggatgtgaccaccggctacggcaccaaggccagcggcaacaagacagtgttcaagagcaagcagaacacagccttccaggacctgagcatcaacagcgctgacaagatccacatcaccaggagccacatcatgggcgctgagacccacatcgtgtcccagacctgcaaccaggatgcccgcatcctggccatgaccccagagagcatctacagcaaccccagcatccagggctgcaagacagtgttctacagcagctgcaatgatgccatggagatgaccaagtgcctgagcaacatgagggaggagaagaacctgctgaagcatgacagcaactatgccaagatgtactgcaacccagatgccatgagcagcctgacagagaagaccatctacagcggggaggagaacatggacatcaccaagagccacacagtggccatcgacaaccagatcttcaagcaggaccagagcaatgtgcagattgctgctgcccccaccccagagaaggagatgatgctgcagaacctgatgaccaccagtgaagatggcaagatgaatgtgaactgcaacagcgtgccccacgtgtccaaggagcgcatccagcagagcctgagcaaccccctgagcatcagcctgacagacaggaagacagagctgctgagcggggagaacatggacctgacagagagccacaccagcaacctgggcagccaggtgcccctggccgcctacaacctggcccctgagagcaccagcgagagccacagccagagcaagagcagcagtgatgaatgtgaggagatcaccaagagcagaaatgagcccttccagaggagtgacatcatcgccaagaacagcctgacagacacctggaacaaggacaaggactgggtgctgaagatcctgccctacctggacaaggacagcccccagagcgctgactgcaaccaggagatcgccaccagccacaacatcgtgtactgcggcggcgtgctggacaagcagatcaccaacagaaacacagtgtcctgggagcagagcctcttcagcaccaccaagcccctcttcagcagcggccagttctccatgaagaaccacgacacagccatcagcagccacacagtgaagtctgtgctgggccagaacagcaagctggccgagcccctgaggaagagcctgagcaaccccaccccagactactgccacgacaagatgatcatctgcagcgaggaggagcagaacatggacctgaccaagagccacacagtggtgattggcttcggccccagcgagctgcaggagctgggcaagaccaacctggagcacaccaccggccagctgaccaccatgaaccggcagattgctgtgaaggtggagaagtgtgggaagagccccatcgagaagagcggcgtgctgaagagcaactgcatcatggatgtgctggaggatgagagcgtgcagaagcccaagttccccaaggagaagcagaatgtgaagatctggggcaggaagtctgtgggcggccccaagattgacaagaccatcgtgttttctgaagatgacaagaatgacatggacatcaccaagagctacaccatcgagatcaaccaccggcccctgctggagaagagggactgccacctggtgcccctggccggcaccagcgagaccatcctgtacacctgccggcaggatgacatggagatcaccaggagccacaccacagccctggagtgcaagacagtgtccccagatgagatcaccacccggcccatggacaagacagtggtgtttgtggacaaccacgtggagctggagatgacagagagccacacagtgttcatcgactaccaggagaaggagaggacagaccggcccaactttgagctgagccagaggaagagcctgggcacccccaccgtcatctgcacccccacagaggagagcgtcttcttccctggaaatggagagagtgaccggctggtggccaatgacagccagctgacccccctggaggagtggagcaacaacagaggccctgtggaggtggccgacaacatggagctgagcaagagcgccacctgcaagaacatcaaggatgtgcagagccctggcttcctgaatgagcccctgagcagcaagagccagaggaggaagagcctgaagctgaagaatgacaagaccatcgtgttttctgagaaccacaagaatgacatggacatcacccagagctgcatggtggagattgacaatgaaagtgccctggaggacaaggaggacttccacctggccggggccagcaagaccatcctgtacagctgtggccaggatgacatggagatcaccaggagccacaccacagccctggagtgcaagaccctgctgcccaatgagatcgccatccggcccatggacaagacagtgctcttcacagacaactacagcgacctggaggtgacagacagccacacagtgttcatcgactgccaggccacagagaagatcctggaggagaaccccaagtttggaattggcaagggcaagaacctgggcgtgtccttccccaaggacaacagctgtgtgcaggagattgctgagaagcaggccctggccgtgggcaacaagatcgtgctgcacacagagcagaagcagcagctgtttgctgccaccaacagaaccaccaatgagatcatcaagttccacagcgctgccatggatgagaaggtgattggcaaggtggtggaccaggcctgcaccctggagaaggcccaggtggagagctgccagctgaacaacagagacagaagaaatgtggacttcaccagcagccacgccacagctgtgtgtggcagcagtgacaactacagctgcctgcccaacgtcatcagctgcacagacaacctggagggcagcgccatgctgctgtgtgacaaggatgaggagaaggccaactactgccctgtgcagaatgacctggcctatgccaatgactttgccagcgagtactacctggagagcgagggccagcccctgagcgccccctgccccctgctggagaaggaggaggtgatccagaccagcaccaagggccagctggactgtgtgatcaccctgcacaaggaccaggacctgatcaaggaccccaggaacctgctggccaaccagaccctggtgtacagccaggacctgggggagatgaccaagctgaacagcaagagggtgtccttcaagctgcccaaggaccagatgaaggtgtatgtggatgacatctacgtgatcccccagccccacttcagcacagaccagccccccctgcccaagaagggccagagcagcatcaacaaggaggaggtgatcctgagcaaggccggcaacaagagcctgaacatcatcgagaacagcagcgcccccatctgtgagaacaagcccaagatcctgaacagcgaggagtggtttgctgctgcctgcaagaaggagctgaaggagaacatccagaccaccaactacaacacagccctggacttccacagcaacagtgatgtgaccaagcaggtgatccagacccacgtgaatgctggggaggccccagaccctgtgatcaccagcaatgtgccctgcttccacagcatcaagcccaacctgaacaacctgaatggcaagacaggagagttcctggccttccagacagtgcacctgccccccctgcctgagcagctgctggagctgggcaacaaggcccacaatgacatgcacatcgtgcaggccacagagatccacaacatcaacatcatcagcagcaatgccaaggacagcagagatgaggagaacaagaagagccacaacggggctgagaccaccagcctgccccccaagacagtgttcaaggacaaggtgcggcgctgcagcctgggcatcttcctgccccggctgcccaacaagaggaactgcagcgtgactggaattgatgacctggagcagatcccagctgacaccacagacatcaaccacctggagacccagcctgtgagcagcaaggacagcggcatcggctctgtggccggcaagctgaacctgagccccagccagtacatcaatgaggagaacctgcctgtgtacccagatgagatcaacagcagtgacagcatcaacattgaaacagaggagaaggccctgattgagacctaccagaaggagatcagcccctatgagaacaagatgggcaagacctgcaacagccagaagaggacctgggtgcaggaggaggaggacatccacaaggagaagaagatcaggaagaatgagatcaagttcagtgacaccacccaggaccgggagatctttgaccaccacacagaggaggacatcgacaagagcgccaacagcgtgctgatcaagaacctgagcaggacccccagcagctgcagcagcagcctggacagcatcaaggcagatggcaccagcctggacttcagcacctaccgcagcagccagatggagagccagttcctgcgggacaccatctgtgaggagagcctgcgggagaagctgcaggacggccgcatcaccatccgggagttcttcatcctgctgcaggtgcacatcctgatccagaagccccggcagagcaacctgcccggcaacttcaccgtgaacaccccacccaccccagaggacctgatgctgagccagtatgtgtaccggcccaagatccagatctaccgggaggactgtgaggcccggcggcagaagattgaggagctgaagctgagcgccagcaaccaggacaagctgctggtggacatcaacaagaacctgtgggagaagatgaggcactgcagcgacaaggagctgaaggccttcggcatctacctgaacaagatcaagagctgcttcaccaagatgaccaaggtgttcacccaccagggcaaggtggccctgtatggcaagctggtgcagagcgcccagaatgaaagagagaagctgcagatcaagattgatgagatggacaagatcctgaagaagattgacaactgcctgacagagatggagacagagaccaagaacctggaggatgaggagaagaacaaccctgtggaggagtgggacagcgagatgagagctgctgagaaggagctggagcagctgaagacagaggaggaggagctgcagaggaacctgctggagctggaggtgcagaaggagcagaccctggcccagattgacttcatgcagaagcagaggaacagaacagaggagctgctggaccagctgagcctgtctgagtgggatgtggtggagtggagcgatgaccaggccgtgttcacctttgtgtatgacaccatccagctgaccatcacctttgaggagagcgtggtgggcttccccttcctggacaagcgctacaggaagatcgtggatgtgaacttccagagcctgctggatgaggaccaggccccacccagcagcctgctggtgcacaagctgatcttccagtatgtggaggagaaggagagctggaagaagacctgcaccacccagcaccagctgcccaagatgctggaggagttcagcctggtggtgcaccactgccgcctgctgggggaggagattgagtacctgaagcgctggggccccaactacaacctgatgaacatcgacatcaacaacaatgagctgcggctgctcttcagcagcagcgctgcctttgccaagtttgagatcaccctcttcctgagcgcctactaccccagcgtgcccctgcccagcaccatccagaaccacgtgggcaacaccagccaggatgacatcgccaccatcctgagcaaggtgcccctggagaacaactacctgaagaatgtggtgaagcagatctaccaggacctcttccaggactgccacttctaccactag

SEQ ID NO: 238876 - DNA, 6951 bp, Artificial Sequence
  derived and/or modified sequence
atggacggcgtgagcagcgaggccaacgaggagaacgacaacatcgagcgccctgtcaggcgtaggcacagctcaattctaaagccgcctaggagcccactccaagacctccggggcggaaacgaaagagtgcaggagtccaatgcactgcgtaacaaaaaaaattcccggcgtgtgagctttgctgacaccattaaggtattccaaacagagtcccatatgaaaattgtacgaaagagcgaaatggaggagaccgaaaccggggagaacctactactgatccagaacaaaaaacttgaagacaattactgcgaaatcacaggcatgaacactttgctgtccgctcctattcacacacaaatgcagcagaaggagttttctattatcgaacacactcgagaacgaaaacacgccaacgaccagaccgtaatcttctctgacgaaaaccaaatggatcttacgtctagccataccgtgatgattactaaaggacttctggataatcctatctctgagaagtcaacaaaaattgacactacctcgttcctggccaacttaaaactgcacacagaagacagtaggatgaaaaaggaggtgaacttctcagtagaccaaaatactagctccgagaacaaaatcgactttaatgacttcattaaacggttaaaaacaggcaagtgtagcgcctttcctgacgtgcccgacaaggagaactttgaaattcccatctatagcaaagaacccaacagtgcatcgagcacgcatcagatgcacgtgtccctcaaggaagacgaaaacaactctaacataacaagattgttccgggagaaggacgatggcatgaacttcacccagtgccacacagcaaatatacagacgcttattcctacaagctcggaaacgaactcccgggaaagcaagggcaatgacataactatatacgggaacgactttatggatttaaccttcaatcatactttacagattttacccgcaaccggcaactttagcgaaatcgaaaaccagacacagaatgcaatggatgtgacgacagggtacggcactaaggcctctggcaataagactgttttcaagtctaagcagaacaccgcctttcaggatctgtctatcaactcggccgataaaattcacatcacgagatctcacatcatgggggctgagacacatatcgtctcacagacctgcaaccaagacgctaggatcttggctatgacacccgagagcatttacagcaacccctctatacaaggctgcaagaccgtgttctacagtagctgcaatgatgccatggaaatgactaagtgcctatccaacatgagagaagagaagaatcttctcaaacacgactcgaattacgccaaaatgtactgcaatcccgatgctatgagctctttaacagagaaaacaatatactctggcgaggagaatatggatataaccaagagtcatactgtggcgatcgacaatcaaattttcaagcaagaccagtcaaacgtgcagatcgcagccgctcctacccctgagaaggagatgatgcttcaaaatctaatgaccacaagtgaagacggaaaaatgaatgtcaactgtaattcagtacctcacgtgagcaaggagcgcatccagcagtctctgagtaatcctctgtccataagcctgactgataggaagaccgagcttttgagtggagaaaacatggatttgacggaatcgcacacaagcaatctggggagccaggtgcctcttgctgcttataacctggcccccgaaagcacctctgagtcccactcccagtccaagtcttcttccgacgagtgcgaggagatcacgaagagccggaatgaacccttccagcgctcggatatcatcgcaaaaaatagcttgacggacacctggaacaaagacaaggactgggtgctgaaaattctgccctatctggataaagattcaccacagtccgctgactgcaatcaggaaattgccacctcccataacattgtgtactgcggaggggtgcttgataagcagattaccaatcgcaatactgtgagctgggagcaatctctgttttctacgaccaaacccctatttagctccggccagttttccatgaagaaccatgacaccgccatatcaagccatactgtcaaatcggtgctgggccagaacagcaaacttgcggagcctcttcgtaagagcctgagcaatcccacgccagactactgtcacgacaaaatgataatttgtagtgaggaagagcagaatatggatcttacgaaatcccataccgtggtgataggcttcgggccttccgagctacaggaactggggaaaacgaaccttgagcacactaccggacagttgaccaccatgaataggcagattgctgtgaaagtggagaaatgtgggaagtcacctatcgaaaaaagcggtgttctgaaatccaactgcattatggatgtcctcgaggatgagtctgtgcagaagcccaaatttccgaaggagaagcaaaatgtaaaaatctggggaagaaagtccgtaggcggtcccaagatcgacaaaactattgtgttttccgaggacgataaaaacgacatggatatcacaaagtcttatacaattgagattaatcataggccgctgttggagaagcgggactgccacctcgttccacttgcaggtaccagtgagacaattctgtacacgtgcagacaggatgacatggagatcacacgcagccacaccaccgcgctcgagtgcaagactgtcagcccagacgagatcacaaccaggccaatggacaagaccgtggtgtttgtcgacaaccacgtggagttagagatgactgaatctcacaccgtgttcatcgactatcaagaaaaagagagaacagaccggccaaactttgaacttagtcaaaggaagagcttaggaacacctaccgttatctgtactcccacggaggagagtgtgttttttccaggtaacggggaatccgaccggctggtggctaatgattctcaactgacccctctcgaagagtggtccaataaccggggcccagtggaagtcgctgacaacatggagcttagcaaatcagctacatgtaaaaacattaaggacgttcagagcccaggatttctaaacgagccccttagctcgaagagccaacgacggaaaagcctgaagctcaagaatgacaagactattgtattctctgagaatcataagaacgacatggacattacgcaatcgtgcatggttgaaatcgacaacgagtccgcactagaggacaaggaggacttccatctggccggcgcatcaaaaaccattctatattcttgcggtcaggatgatatggaaataaccagaagtcacaccacagctctcgagtgcaagacactgctgcctaacgagatcgccatccgacctatggataaaactgttctcttcacagacaactactctgacctggaggtgaccgattcacatactgtgtttatagattgtcaggcgacagaaaaaattttggaagagaaccccaagttcgggatcggcaagggaaaaaatttgggggtgtccttcccaaaagacaacagctgtgtgcaagagattgccgaaaaacaggcattggccgtgggaaataagatcgttctgcacaccgaacagaagcagcaactattcgctgcaacgaatcgaaccacaaacgaaatcataaaattccactccgccgctatggatgaaaaagtcatcggcaaggttgtggatcaggcctgtaccctggagaaggcccaagtcgagtcgtgccagttgaacaatcgggataggaggaatgtggattttacatcttctcatgcgacagcggtgtgtgggagtagcgacaactactcctgtctacctaatgtgatttcctgcactgacaatctggaaggtagcgctatgctgctgtgtgacaaggatgaggagaaggccaactactgtcccgtgcagaacgacctggcctacgcaaacgacttcgcaagcgaatactatctggaatcggaggggcagcctctgagcgcaccctgccctctcctggagaaggaggaggtgattcaaacttctaccaagggccagctcgattgcgtcatcactctgcataaagaccaggacctcatcaaggatccccggaacctcctggccaaccaaactctcgtgtactcccaggacctcggagagatgaccaaattaaactctaaacgggtgagctttaaactgccgaaggatcagatgaaggtctatgttgacgacatctatgtcatcccacagcctcacttttccacggatcagcctccattacctaagaagggccagtcaagtataaacaaggaagaggtgatcctgagcaaagccggcaataaaagtttgaacattatcgagaactcctctgctcctatttgtgaaaacaaaccaaagattcttaatagcgaggagtggtttgcagctgcttgtaaaaaggagcttaaggaaaatatccagaccacaaattataacaccgccctggattttcactctaattccgatgtgacaaaacaagtgattcagacacatgtcaacgcaggagaagctccagaccccgtcattacctccaacgtgccttgctttcattccataaagccaaatcttaataatcttaatggaaagaccggggaattcctggccttccagacggtacacctccccccccttcccgagcagctcttggaacttgggaataaagctcataacgacatgcatatcgtgcaggccactgagatccacaatattaatataataagttccaatgcaaaggactccagagacgaggagaacaagaagagccacaacggggcagagacaactagtctccctccaaaaacggtgttcaaagacaaagttcgcaggtgcagtttgggtatctttctgcctcgtctgccaaacaagcggaactgcagtgtgacgggaatagacgatctggagcaaatccctgccgatacgacagacattaaccacctcgagacccaacccgtctcatcgaaggattctggaattgggtccgtggcagggaagctaaacttgtctccaagccaatatatcaacgaagaaaaccttcctgtgtacccagatgagatcaacagctccgattccattaatatcgagaccgaggaaaaagcactaatcgaaacataccagaaagagatctcgccatatgagaataagatgggcaaaacatgtaacagtcagaagcgaacgtgggttcaggaggaggaggatatccacaaagagaaaaagatccgtaagaatgagatcaagttctccgatactacccaggatagggaaattttcgatcatcacactgaggaggatattgacaagagcgcgaattctgtgcttatcaagaatctgtcaaggaccccatcaagctgctcctccagcctggattcgatcaaggctgatggcacttcactcgacttctctacctaccggagtagtcagatggagtcccagttcctgagggacacaatttgcgaagaatctctaagagaaaaattgcaggacggccggattacaatccgggagttctttatcctgctccaggtgcacatactcatccaaaaacccaggcaaagcaatctgccaggtaactttaccgtcaacacaccaccaactccagaagacctcatgttgtctcaatatgtgtaccgccccaagatccagatttatagagaggactgcgaagctaggcgtcagaagattgaagagctcaagctctccgccagcaaccaggataagctcctggtggacatcaataagaatctttgggaaaagatgagacactgctcggacaaggagcttaaagcgttcggtatctacctgaacaaaatcaaatcatgttttacaaaaatgacgaaagtgttcacccaccaagggaaggtagccctctacggcaagcttgttcagtccgcacagaatgagcgggagaagctgcagataaagatagacgaaatggataaaatcctcaagaagattgacaattgtcttacggagatggagacggaaaccaaaaatctggaagatgaggaaaagaacaatcctgtcgaagaatgggacagcgagatgagagctgccgagaaggagttggagcagctgaaaaccgaagaggaagagctgcagaggaacctgctggaactggaggttcagaaggaacaaacactggcccagattgactttatgcagaagcagagaaataggacagaagagcttttggaccagctgagcctgagcgaatgggatgtcgtagagtggtctgatgatcaggccgtgttcacattcgtgtacgacacaatccagttgaccattacatttgaagagtctgtcgtcggtttccctttccttgacaagaggtaccggaagatcgtagatgtaaattttcagtctctgctggacgaggaccaggccccacccagctcactgttggtgcataagctgatcttccagtacgtagaggaaaaagagagctggaagaaaacttgcaccacacagcatcagctgcccaagatgctcgaggagttcagtctggtggtgcatcattgcaggctcctcggcgaagagatcgagtacctgaagaggtgggggcctaattacaacctcatgaacattgatatcaataataacgaactccggttgctgttcagctcgtccgctgcattcgctaaattcgagatcaccctgtttctgtctgcctactacccatctgtaccattaccctctaccattcagaatcacgtcggcaacactagccaggacgacattgctaccattttatccaaggtgccactcgaaaacaactatcttaaaaacgtggtcaaacagatttaccaagacctgttccaggactgtcacttttaccattag

SEQ ID NO: 238877 - DNA, 7607 bp, Artificial Sequence
  derived and/or modified sequence
agatttgaatacttcactgaggcgagccgggcgttgtgagcggactgctagaggcggctgtctgtttccgctctaaggaaactcagagcgtgtggaccccaaacaagtctgcgcaaaatttgtcgaggaggtttgccgcggcagaaaagttttcttcaaaaatggatggggtgtcttcagaggctaatgaagaaaatgacaatatagagagacctgttagaagacggcattcttcaatattgaaacccccaaggagtcctcttcaggacctcagaggtgggaatgaaagagttcaggaatccaatgctttgagaaataagaaaaactctcgtcgagtcagctttgcagatactataaaggtattccagacggagtctcatatgaaaatagtgagaaagtcagaaatggaagaaacagaaacaggagaaaatcttcttttgatacagaataagaaattagaagataattactgtgaaattactgggatgaacacattgctttctgctcccattcatacccagatgcaacagaaggagttttcaattatagaacatacccgtgaaaggaaacatgcaaatgaccagacagtcattttttcagatgaaaaccagatggacctgacatcaagtcacactgtaatgattaccaaaggccttttagataatcccataagtgaaaagtccaccaagatagataccacatcatttctagctaatttaaagcttcacaccgaggactcaagaatgaaaaaagaagtaaatttttccgtggatcaaaacacttcttcagaaaataaaatagatttcaatgacttcataaaaagattgaaaacaggaaaatgtagtgcttttcctgatgtgcctgataaagaaaattttgagatacctatttattccaaggaaccgaacagtgcctcttctacacatcaaatgcatgtatctcttaaggaagatgaaaataacagtaatattactaggctctttagagaaaaagatgatgggatgaatttcacccagtgtcatacagccaatattcagacattgattcccacatccagtgagaccaactcacgggaatctaaaggtaatgatattacaatttatggcaatgactttatggacttgacatttaaccacactttgcagatcttacctgcaacaggtaatttttctgaaatagaaaatcaaactcagaatgccatggatgtaacaacaggttatggaactaaagcttcaggaaataaaacagtttttaagagtaaacaaaatactgcttttcaagacctttccataaactctgcagacaaaatacatattaccagaagtcatattatgggggcagaaactcacatagtctcacagacttgtaatcaggatgccagaatattagccatgaccccagaatctatatattctaatccatctattcaaggttgtaagactgttttctattctagttgtaatgatgccatggaaatgaccaaatgtctctcaaatatgagagaggagaaaaatttgctaaagcatgacagtaattatgctaaaatgtattgcaatccagatgctatgtcttctctcacagagaaaactatttattccggagaggagaacatggacattaccaagagtcatacagttgcaatagataatcaaatttttaaacaagatcaatcaaatgtgcaaatagcagctgcaccaacacccgaaaaagaaatgatgctccaaaatcttatgaccacatcagaagatgggaaaatgaatgtaaattgtaactcagttcctcatgtatctaaggaaagaatacagcagagcctgtcaaatcctttgtctatttcattgactgatagaaagactgaactcttatcaggtgaaaatatggatttgactgaaagtcacacaagtaacttaggaagtcaggttcctcttgcagcttataatctagcaccggagagtaccagtgaatctcactctcagagcaaaagctcttcagatgaatgtgaagaaattaccaaaagtcgtaatgaaccatttcagcgatcagacataatagccaaaaacagcttaaccgacacctggaacaaagacaaagattgggttttgaagattttgccctaccttgataaagattctcctcagtcagctgattgtaatcaggagatagcaacaagccataatatagtctactgtggtggagttcttgataaacaaataactaatagaaatacagtatcatgggaacaatctttgttttctaccacaaagccattattttcatcaggacagttctctatgaaaaatcatgatactgctataagtagtcatacagtgaaatctgtactaggccagaattctaaactggctgagccactgaggaaaagtttaagcaatcccacacctgactattgccatgacaagatgattatatgttcagaggaagagcaaaatatggatctaacaaagagccacactgtcgtcattggatttggtccttctgaactacaagaacttggtaaaactaatttagaacacactactggccagctaacaacaatgaacagacagatagctgtaaaagttgaaaaatgtggtaaaagtcccatagaaaaaagtggagtgcttaaatctaactgtattatggatgtgttagaggacgaaagtgtacagaaacctaaatttccaaaggaaaagcaaaatgtcaaaatttggggaaggaaaagtgttggtggaccaaaaattgataagactattgtattttcagaagacgataagaatgatatggatatcactaagagttatacaatagaaataaaccatagacctttattagagaaacgtgattgtcatttggtgccattggcaggaacttctgaaactattttatatacatgtaggcaggatgacatggagatcactagaagtcacacaactgccttagaatgtaaaactgtctcaccagatgaaataactactaggcctatggacaaaactgtagtgtttgtagataatcatgttgaactagaaatgacagagtcccatactgttttcattgactaccaagaaaaggaaagaacagacagacctaactttgaactatcccaaaggaaaagcctaggaacaccaacagtgatatgtactcctactgaggagagtgttttctttccaggaaatggtgaaagtgaccgtctagtagcaaatgacagccagctaacccctctggaggaatggtctaataataggggccctgtagaggtagctgataacatggaattgtctaaatcagccacttgcaaaaacatcaaagatgtacaaagtcctggatttctgaatgaacctctatcaagcaaaagtcagagaagaaaaagccttaagctaaaaaatgacaagaccattgtattttcagagaatcataaaaatgatatggatattacccagagttgtatggtggaaatagataacgaaagtgccctggaggataaagaggacttccatttggcaggggcttctaaaactattttgtattcatgtgggcaggatgacatggagatcactaggagtcacacaactgccttagaatgtaaaactctcctgccaaatgaaatagctattaggcccatggacaaaaccgtattgttcacagataattacagtgatctggaagtcaccgattcccatactgttttcattgactgtcaagccacagagaaaatacttgaagaaaaccctaaatttggaataggaaaaggaaaaaacttgggtgtttcctttcctaaggataatagctgtgttcaagaaatcgctgaaaaacaagcactggctgtaggaaacaaaatagttcttcacaccgagcaaaagcaacaactctttgctgctactaatagaactactaatgaaatcatcaaatttcatagtgctgctatggatgaaaaggtcatagggaaagttgtagaccaggcctgtacattggaaaaagcgcaagttgaaagctgtcagttaaataatagagatagaagaaatgtggactttacaagtagtcatgcaactgctgtttgtggatccagtgataattattcctgtttaccaaatgttatttcctgtactgataatttggagggtagtgccatgctcttatgtgataaagatgaggaaaaagccaattattgcccagtgcaaaatgatcttgcttatgcaaatgattttgccagtgaatattacttggaatctgagggacagcctctctctgctccttgtcctttgttagagaaggaagaagttattcaaaccagtaccaaaggacagttagactgtgttataacactgcacaaagatcaagatctgattaaggatccacgaaatctattggctaatcaaactttagtatatagtcaagatctgggggagatgactaaacttaattcaaagcgagtatcttttaagcttccaaaggatcaaatgaaagtctatgttgatgacatttatgttattcctcagcctcatttctcaaccgaccaacctccattacctaaaaaaggacagagtagtatcaataaagaagaagtaatactgtctaaagctggaaataagagtttaaatattatagaaaattcctctgcacccatatgtgaaaacaagcccaaaatactcaatagtgaggaatggtttgctgcagcctgtaaaaaagaactgaaggaaaatattcaaacaactaactataatacagctctagatttccacagtaactcagacgtaactaagcaagtcattcaaactcatgtcaatgctggagaagcaccagatcctgtaattacatctaatgttccatgttttcatagtatcaaaccaaatctgaataatttgaatggaaaaactggagagtttttagcctttcaaactgttcatctaccaccccttccagagcaattacttgaattaggaaataaggcacacaatgatatgcatatagtgcaagctacagaaatacataatattaacataatctccagcaatgctaaagatagtagagatgaggaaaataaaaagtctcataatggagctgaaaccacctctctaccgccaaagacagtttttaaagataaagtaaggagatgttctttgggaatctttttgcctagattgcccaacaagagaaattgtagtgtcactggtattgatgacctggaacagattccagcagacacaactgatataaatcacttagaaactcagccggtctctagcaaagattcaggcattggatctgttgcaggtaaactgaacctaagtccttctcaatatataaatgaggaaaatcttcctgtatatcctgatgagatcaattcttcagactctattaacatagaaactgaggaaaaggccttgattgagacataccaaaaagagatttcaccatatgaaaataaaatgggaaaaacttgcaatagccaaaaaagaacgtgggtacaagaagaagaagatattcataaggagaaaaaaatcagaaaaaatgagattaagtttagtgatacgacacaagatcgggagatttttgatcaccatactgaagaggatatagataaaagtgctaacagtgtattgataaaaaacctgagcaggaccccatctagttgcagcagctctctggattcaatcaaggctgatgggacctctctggacttcagcacttaccgcagtagtcaaatggaatcacagtttctcagagatactatttgtgaagagagcttgagggagaaactccaagatgggagaataacaataagggagttctttatacttctccaggtccacatcttgatacagaaaccccgacagagcaatctcccaggcaattttactgtaaacacaccacctactccagaagacctgatgttaagtcaatatgtttaccgacccaagatacagatttatagagaagattgtgaggctcgtcgccaaaagattgaagaattaaagctttctgcatcgaaccaagataagctgttggttgatataaataagaacctgtgggaaaaaatgagacactgctctgacaaagagctgaaggcctttggaatttatcttaacaaaataaagtcatgttttaccaagatgactaaagtcttcactcaccaaggaaaagtggctctgtatggcaagctggtgcagtcagctcagaatgagagggagaaacttcaaataaagatagatgagatggataaaatacttaagaagatcgataactgcctcactgagatggaaacagaaactaagaatttggaggatgaagagaaaaacaatcctgtggaagaatgggattctgaaatgagagctgcagaaaaagaattggaacagctgaaaactgaagaagaggagcttcaaagaaatctcttagaactggaggtacaaaaagagcagacccttgctcaaatagactttatgcaaaaacaaagaaatagaactgaagagctactggatcagttgagcttgtctgagtgggatgtcgttgagtggagtgatgatcaagctgtattcacctttgtttatgacacgatacaactcaccatcacctttgaagagtcagttgttggtttccctttcctggacaagcgttataggaagattgttgatgtcaattttcaatctctgttagatgaggatcaagctcctccttcctcccttttagttcataagcttattttccagtacgttgaagaaaaggaatcctggaagaagacatgtacaacccagcatcagttacccaagatgcttgaagaattctcactggtagtgcaccattgcagactccttggagaggagattgagtatttaaagagatggggaccaaattataacctaatgaacatagatattaataataatgaattgagacttttattctctagctccgcagcatttgcaaagtttgaaataactttgtttctctcagcctattatccatctgtaccattaccttccaccattcagaatcacgttgggaacactagccaagatgatattgctaccattctatctaaagtgccactggagaacaactacctgaagaatgtagtcaagcaaatttaccaagatctgtttcaggactgccatttctaccactagacccttggaccaccattggaacaaccaagcagaatgtacttgatattatttcagggtcccattgctgttcagcctttgtttttacgtcattacaagctgagtaaaattccttctgatgatgttatagttaatctgtatgttttttatatctctgcagaatgatggtgatgaagtctggatggtaggcctcatagcctactatcaacttactcatctttgtaccaaaggtttaagtaataggacacttaggaaaaatgtctcctaactaaactagtgctttctgctttagtacaagccctaaggattaacttaagtataagaagtgttatcactgacaagaacattagccattttcccataactagatagagctatgattttttaggttgcctggcttctgcctagcagatatttctggagtagaaatgtatctgtctacaaactattatcctttttctccgttactaaaatgctattaagagaaagtagggctgg

SEQ ID NO: 238878 - DNA, 6950 bp, Artificial Sequence
  derived and/or modified sequence
atggacggagtctcctcagaggccaatgaggagaacgataacattgagcggcctgtccgtcgcaggcacagcagtattctgaaacctccacgcagccccttgcaggatctgcgtggagggaatgagagagtccaagaaagcaatgcgctgcggaataagaagaactcgagaagggtttcttttgctgacaccattaaggtgttccaaactgagtcccatatgaaaatcgtgcgtaagtctgagatggaagagacagaaaccggcgaaaaccttctcttgatccaaaacaaaaaattagaagataactactgtgaaattacagggatgaatacactgctcagcgccccaatccacacacagatgcaacaaaaagaattcagcatcattgagcataccagagagaggaagcatgcaaacgatcagacagtgatctttagtgacgagaaccagatggacttgaccagcagccatacagtgatgatcaccaagggactccttgacaaccctatcagcgagaagtccaccaaaatcgatactacctccttccttgctaatctcaagctgcataccgaggattctaggatgaaaaaagaagtgaactttagcgtagaccaaaacacttccagtgagaacaagattgactttaacgacttcattaagcgtttgaagacaggcaagtgctcagctttccctgacgttcccgataaggagaattttgagatcccaatctattccaaagagccgaatagcgcttccagcacacatcaaatgcacgttagcctcaaggaagacgagaacaactccaatatcacccggctgttccgcgaaaaggatgacggaatgaatttcacgcagtgtcatactgcaaatattcagacattaatccctacatccagcgaaacgaacagcagagagagtaaggggaatgacatcaccatatatggaaatgatttcatggatcttaccttcaatcatactttgcagattctgcccgctaccggcaatttctctgagatagagaaccagactcaaaatgccatggacgtaactacgggatacggcaccaaggcatcaggcaacaaaaccgtcttcaaatccaaacaaaacaccgcattccaggatctgtctataaactcagctgacaagattcacattactcggtctcacatcatgggggctgagacgcacatcgttagtcaaacatgtaaccaggatgcccgtattttggcgatgactccggagagcatctacagtaatccatctatacagggctgtaagacggtattttatagctcttgcaacgatgctatggaaatgacaaaatgcctttccaacatgcgggaggagaagaatctgctgaaacacgactccaattatgcaaaaatgtactgcaaccccgatgcgatgagctctttgactgagaaaaccatttatagcggggaagagaatatggacattacaaaaagtcacaccgtagcgattgataatcagatcttcaaacaggatcaatccaacgtgcagattgccgcagcgcctacgccagagaaggagatgatgctgcagaatcttatgaccacgagcgaagatggaaagatgaatgttaattgtaattctgtcccacatgtctcaaaggagcggatacagcagagcttatcgaatcctctgtccatttcactcacggaccggaaaacagagttactgagcggagagaacatggaccttacagagtcccacactagcaatctgggctcccaggtgccccttgcggcatataatctcgccccagagtcaacctccgagtcccatagccagtcaaagtcatcctccgacgagtgtgaggagattactaaatcacgcaacgagcccttccagagaagtgacattattgcaaagaacagcctcactgacacatggaataaggacaaggactgggtcctgaagatattaccctatctagataaggatagccctcagtctgcagactgcaaccaagagattgcaacttctcataacattgtctattgtggcggagtgctcgacaagcaaattacaaaccggaatactgtgtcctgggaacagtccctctttagcacaaccaaaccactcttttctagtggccagttctctatgaagaaccatgataccgcgatttcatcccacactgtgaaatccgtactgggtcagaactctaagctggccgaaccactgaggaagtctctgtcgaatcccactccagactattgccacgataagatgatcatctgctcagaggaagagcagaacatggacctgacgaaaagccacaccgtggtcataggatttgggcctagcgaactgcaggaactcggtaagacgaaccttgaacatacaaccggccagctcactacaatgaacagacaaatcgccgtcaaggttgagaagtgtgggaagtcgccaatcgaaaagagcggtgtgctgaagtctaactgtatcatggacgtcctggaggatgaaagcgttcagaagcccaagttccctaaggagaagcagaatgtcaaaatctggggtagaaagagtgtgggtggtccgaaaattgataagactatagtgttttccgaggatgacaagaatgatatggacataactaagtcctataccattgaaataaatcatagaccactgttggagaagcgggactgccacctggtgccattggctggcacatcagaaacgatcctctatacatgccgccaggatgacatggaaatcactcgatcccatactaccgcattagaatgcaagacagtgagccctgatgagatcacaaccaggcctatggacaaaaccgttgtattcgtcgacaaccatgtggagcttgagatgactgagtctcacacagtgttcatcgactaccaggaaaaagagagaaccgacaggcccaatttcgagttgtcccagcgaaagtcgctcgggacaccgacggtcatttgtacacctacagaagaatctgtattctttccagggaacggagaatctgatcgccttgtggcgaatgattcccagcttacccccctcgaggaatggagcaataaccgaggcccagtcgaagtcgctgataacatggaactgagcaagtctgcaacctgcaagaacattaaggacgtgcagtcaccgggattcttaaatgagcccctatcttctaagtcccagagacgaaagtctcttaaactgaagaatgacaagacaatcgtgttcagtgaaaaccataagaacgatatggacataacacagtcctgcatggtggagattgataacgagagcgccctggaggacaaggaggatttccacttggcaggcgcaagcaaaactatcctttatagctgcggtcaggatgacatggagatcacgcgctcacacaccacagcacttgaatgcaagacactgctgcccaacgaaatcgcaattaggcccatggataagaccgtgcttttcacagataattacagtgatctagaggtcacagactcacacacagtcttcatcgattgtcaggccaccgaaaagattttggaggaaaatcctaagtttgggatagggaaggggaagaatctaggcgtgtcatttcctaaggacaactcttgtgtgcaggagatcgcggaaaagcaggcattagcagtcgggaataagattgtgttacataccgagcagaaacagcagctgtttgccgcaacgaaccggacaactaacgaaatcatcaagtttcattccgccgctatggacgaaaaagttattggaaaggttgtagaccaagcatgtaccctagaaaaggcccaagtagaatcctgccagcttaacaacagggatcggaggaacgtagactttacaagctcacacgccactgccgtttgtggaagctctgataattactcatgcctccccaatgtgatttcttgcacggataatctagagggaagcgctatgctactgtgcgacaaagatgaggagaaagccaattactgcccagtccagaatgatttggcatacgctaacgattttgcatcagaatactacctggaatcagagggccaaccccttagcgctccatgtcctttattagagaaggaggaggtgatacagacaagcactaagggccagctggattgtgtaatcaccttgcacaaagatcaagacctaatcaaggaccctcgcaatctgctcgctaatcaaaccctcgtttacagccaggacctcggcgagatgacgaaactgaatagcaaaagagtctccttcaaattgcctaaagaccaaatgaaggtctatgtagacgacatttacgtgatcccccagccgcatttctctacggaccagccacctctgccgaaaaagggacagtcctctattaataaagaagaagtgatcctgtctaaggctggaaacaaaagcctaaacattatcgagaacagctccgcccctatttgcgaaaacaaaccaaagattttgaacagcgaggaatggttcgcagcagcatgcaagaaggagctgaaggaaaatatccagactaccaactataacacagccctcgactttcacagtaacagcgatgtcactaagcaggtcatccagactcacgtgaatgccggtgaggcgccagacccagtgatcacgtcaaatgtgccctgcttccattccattaaaccaaacttgaataatcttaacggaaaaacaggggagttcttggcttttcaaaccgtccacttgccgcctcttcccgagcagctcttggagctgggaaacaaggcacataacgatatgcatatcgtgcaggccacagaaatccataatatcaatatcatcagctccaacgctaaagactcccgggatgaggaaaataagaaatcacacaacggtgctgagacaaccagtcttcccccaaaaaccgtcttcaaggacaaggtcaggcgctgcagtttaggaatctttctgccaaggctgcccaataagcggaattgtagcgtcactggcattgacgaccttgagcagatccctgcagataccaccgacataaaccatctggagactcagcctgtgagttccaaagactccggaataggaagcgtggctggcaagctgaatcttagcccctcgcaatatattaatgaggagaacctcccggtctacccagacgagattaattcttccgattcgattaatatagagaccgaggaaaaggccctaatcgagacctaccagaaggagattagcccctacgagaacaaaatgggaaaaacatgcaattctcagaagagaacatgggtccaagaggaggaggatattcacaaagagaaaaaaatacgcaagaatgagattaaattctccgataccacacaggaccgtgaaatctttgaccaccatactgaggaagatatcgataaaagtgccaacagcgtcctaataaagaatttgagtcggacgccatcaagctgttccagctccctggactcaatcaaggctgatggcacgagcttggactttagcacatatcggtcgtcccaaatggagtcccagttcttgagagataccatctgtgaggaaagtctgcgtgagaaactccaggacggaaggatcacaatccgcgagttcttcattctcttgcaggtgcatatcttgatccaaaagcctaggcagtcgaacctgcccggtaattttaccgtgaatacgccccctacacctgaggacctcatgctcagccaatatgtttacagacctaagatacagatttatagagaagactgtgaagccagacgtcagaaaatcgaggagctgaagctctctgccagcaaccaggataagctgctggtcgatatcaataagaacctttgggagaagatgaggcactgctctgacaaggaactcaaggcctttggaatctacctcaataaaattaagagctgctttacgaagatgactaaagtatttacccatcagggaaaggtggcactgtatggaaagctagtgcagtctgctcagaacgagcgcgagaaacttcaaattaagattgatgagatggataaaattttgaagaagatcgacaattgtctcacggagatggagaccgagactaagaacctagaagacgaagaaaaaaacaaccccgttgaagaatgggactccgagatgcgggctgcggaaaaggaattggaacaactgaagacggaggaagaagagttacaaaggaacctactggagctcgaggtgcaaaaagaacaaactctggcccagattgactttatgcaaaagcagaggaatcgcaccgaagaactcttggatcaactgagcctgagcgagtgggatgtggttgaatggagcgatgaccaggccgtttttaccttcgtgtatgataccatccagctgacaatcacatttgaggaaagtgtggtcgggtttccttttctggacaaaagatatagaaagatcgttgacgtgaattttcagtcgctgttggatgaagatcaagccccacccagttcgctcctcgtacataagctgatttttcagtacgtggaggaaaaggagagctggaaaaagacttgcaccacccagcaccaattacctaagatgctagaagagttttctctggtggtccatcactgcaggttgctgggcgaagagatagagtacctcaaacgctggggcccaaactataatcttatgaatattgacatcaacaataatgaattaagactcctgttctcttcttcggccgcatttgctaagttcgagattacgctgttcctttcagcatactacccttctgttccgctaccttccacaattcagaaccatgtgggcaacacctcacaagatgacatcgcaaccatcttgtctaaggtgccccttgagaacaactatctgaagaatgtcgtgaagcagatttaccaggaccttttccaagattgccatttctaccacta

SEQ ID NO: 238879 - protein, 311 aa, Artificial Sequence
  derived and/or modified sequence
MQRPGPFSTLYGRVLAPLPGRAGGAASGGGGNSWDLPGSHVRLPGRAQSGTRGGAGNTSTSCGDSNSICPAPSTMSKAEEAKKLAGRAAVENHVRNNQVLGIGSGSTIVHAVQRIAERVKQENLNLVCIPTSFQARQLILQYGLTLSDLDRHPEIDLAIDGADEVDADLNLIKGGGGCLTQEKIVAGYASRFIVIADFRKDSKNLGDQWHKGIPIEVIPMAYVPVSRAVSQKFGGVVELRMAVNKAGPVVTDNGNFILDWKFDRVHKWSEVNTAIKMIPGVVDTGLFINMAERVYFGMQDGSVNMREKPFC

SEQ ID NO: 238880 - protein, 177 aa, Artificial Sequence
  derived and/or modified sequence
ARQLILQYGLTLSDLDRHPEIDLAIDGADEVDADLNLIKGGGGCLTQEKIVAGYASRFIVIADFRKDSKNLGDQWHKGIPIEVIPMAYVPVSRAVSQKFGGVVELRMAVNKAGPVVTDNGNFILDWKFDRVHKWSEVNTAIKMIPGVVDTGLFINMAERVYFGMQDGSVNMREKPFC

SEQ ID NO: 238881 - DNA, 936 bp, Artificial Sequence
  derived and/or modified sequence
atgcagcgtcccggtccatttagcaccctctacggccgggtgctcgcgccactgccgggccgggccgggggcgctgcgtcaggaggtggcggcaattcctgggacttgccgggttcccatgtaagattacctgggcgcgctcagagcggtaccagagggggggccggtaacaccagcacatcctgtggcgattccaactccatttgtccagccccatctaccatgtccaaggcggaagaggcgaagaagttggccggaagagccgcagtggagaaccatgtccgcaacaaccaggttctcggtatcggttccggatctaccatcgtgcatgccgtacaacggatcgctgagcgggtgaagcaggaaaatctgaatctggtctgtattcccaccagctttcaggccagacagctgatactccagtacgggttaaccctgtcggacctagataggcaccctgaaatcgacctggcaatcgacggtgctgatgaagtcgacgcagacttaaatctgatcaagggaggtgggggatgtctaacccaagagaaaatagtcgcaggctacgcgagccggttcatagtgattgcggatttcaggaaagattccaagaatctaggagaccagtggcataaggggataccgattgaggtgattccaatggcgtacgtgcccgtgtctagagctgtgtcccagaagttcggcggggttgttgagctgagaatggccgttaacaaagcgggaccagtcgtcacagacaacggaaactttattctcgattggaagttcgacagggtccataagtggagcgaggtaaatactgccatcaagatgatcccaggagtggtggacaccggtctgttcatcaacatggccgaaagggtttatttcggaatgcaagacggttcagtcaacatgcgcgaaaaacccttttgctag

SEQ ID NO: 238882 - DNA, 534 bp, Artificial Sequence
  derived and/or modified sequence
gcccgtcagctgatcttacagtacggcttgaccctgtctgatctcgatcgacatcccgagatagatcttgctatcgacggagcagacgaggtcgatgcagacctgaacctcattaagggcggcggcggatgcctgacccaggagaagatcgtggctggctacgcatctcggtttattgttatagcggactttcgaaaggattccaagaatctaggggatcaatggcacaaagggattcccatcgaggtgattccaatggcctatgttcctgttagccgggcagtgagccagaagtttggaggggttgtggagcttcggatggccgttaataaggcaggccccgtcgtgaccgataacggtaactttatcctggattggaaatttgatcgtgtgcataagtggtccgaggtcaatacagccatcaagatgattcccggcgtggtggataccggtctgttcatcaatatggcagagcgtgtctactttggtatgcaggatggtagcgtcaatatgagggagaaacccttctgctag

SEQ ID NO: 238883 - DNA, 936 bp, Artificial Sequence
  derived and/or modified sequence
atgcagaggcctggccccttcagcaccctgtatggccgggtgctggcccccctgcccggccgggccggcggggccgccagcggcggcggcggcaacagctgggacctgcccggcagccacgtgcggctgcccggccgggcccagagcggcacccggggcggggccggcaacaccagcaccagctgtggggacagcaacagcatctgcccagcccccagcaccatgagcaaggccgaggaggccaagaagctggccggccgggctgctgtggagaaccacgtgaggaacaaccaggtgctgggcatcggcagcggcagcaccatcgtgcatgctgtgcagagaattgctgagcgggtgaagcaggagaacctgaacctggtgtgcatccccaccagcttccaggcccggcagctgatcctgcagtatggcctgaccctgagtgacctggacagacaccctgagattgacctggccattgatggagcagatgaggtggatgctgacctgaacctgatcaagggcggcggcggctgcctgacccaggagaagatcgtggccggctacgccagccgcttcatcgtgattgctgacttcaggaaggacagcaagaacctgggggaccagtggcacaagggcatccccattgaagtcatccccatggcctacgtgcctgtgtccagagctgtgtcccagaagtttggaggagtggtggagctgaggatggctgtgaacaaggccggccctgtggtgacagacaatggaaacttcatcctggactggaagtttgacagagtgcacaagtggagcgaggtgaacacagccatcaagatgatccctggggtggtggacaccggcctcttcatcaacatggccgagcgggtgtacttcggcatgcaggacggctctgtgaacatgagggagaagcccttctgctag

SEQ ID NO: 238884 - DNA, 534 bp, Artificial Sequence
  derived and/or modified sequence
gcccggcagctgatcctgcagtatggcctgaccctgagtgacctggacagacaccctgagattgacctggccattgatggagcagatgaggtggatgctgacctgaacctgatcaagggcggcggcggctgcctgacccaggagaagatcgtggccggctacgccagccgcttcatcgtgattgctgacttcaggaaggacagcaagaacctgggggaccagtggcacaagggcatccccattgaagtcatccccatggcctacgtgcctgtgtccagagctgtgtcccagaagtttggaggagtggtggagctgaggatggctgtgaacaaggccggccctgtggtgacagacaatggaaacttcatcctggactggaagtttgacagagtgcacaagtggagcgaggtgaacacagccatcaagatgatccctggggtggtggacaccggcctcttcatcaacatggccgagcgggtgtacttcggcatgcaggacggctctgtgaacatgagggagaagcccttctgctag

SEQ ID NO: 238885 - DNA, 936 bp, Artificial Sequence
  derived and/or modified sequence
atgcagcggcccggccccttcagcaccctgtacggccgggtgctggcacctctgccaggaagagcgggaggtgcggcttcagggggtggaggaaattcttgggacctccctgggtctcatgtgaggttgccgggaagggctcagtcgggtacacgcggcggggctggaaatacctctacatcttgcggtgatagtaactcgatctgtcccgcccctagcaccatgagtaaggctgaggaagcaaaaaagctggcggggagagctgcagtggaaaatcatgtccgtaataatcaagtgctgggaataggaagtgggtctactattgtccatgcggttcagcggatagctgagagggtcaaacaggagaacttaaatctagtgtgcatcccaacctccttccaggcaaggcagttaatccttcagtatggtttgacactgagtgatctcgatagacatcctgagatcgatctggctattgatggagccgacgaggtagatgctgatctgaatttgatcaagggggggggagggtgcctgacccaagaaaagatcgtggctggctatgcatctaggttcattgtgattgccgatttcaggaaggactcaaagaatcttggtgaccagtggcacaaaggcatccccatagaggtgatcccaatggcttacgtcccagtgtctcgcgctgtcagccaaaaattcgggggagtggtggagctgcgcatggccgttaacaaggcagggcctgtggttaccgacaacggaaattttattctcgactggaagtttgatcgggtgcacaaatggagtgaagtgaacactgccattaagatgataccaggcgtcgtggacaccggtctgttcataaacatggctgaaagagtatatttcgggatgcaagacgggtcagtgaacatgcgggaaaaaccattctgttag

SEQ ID NO: 238886 - DNA, 534 bp, Artificial Sequence
  derived and/or modified sequence
gcccggcagctgatcctgcagtacggcctgaccctgagcgacctggaccggcaccccgagattgatctggcaatcgacggcgctgacgaagttgacgcagaccttaatttaattaaaggcgggggagggtgcctgacacaagaaaaaatcgtcgctgggtatgcctcccgctttatcgtcatcgccgactttaggaaggatagcaagaatctgggggatcagtggcataaaggtattccaatcgaagttattcctatggcctacgtcccagtgtcacgggcggtgtcacagaaatttgggggggtggtggaactgcgtatggctgtgaataaagctggccctgtggtgactgataatggtaacttcattctcgattggaagttcgaccgcgtccataagtggtctgaggttaacactgcaatcaaaatgattccaggggtagtggatactgggttattcattaacatggcggagagggtttactttggaatgcaggacggttcggtgaacatgcgggaaaagcctttctgctag

SEQ ID NO: 238887 - DNA, 936 bp, Artificial Sequence
  derived and/or modified sequence
atgcaacggccaggtcctttctccactctttacggcagagtcctggctccccttccaggcagagccggtggggcagcttccgggggaggcggtaactcctgggatctgcctggaagccatgtgagactgcccggacgcgctcaaagcgggactagggggggtgctgggaatacaagcacatcatgcggcgacagcaacagcatttgtcccgctcctagcactatgtctaaggcggaagaggcgaagaagctggctggcagggccgcagtagaaaaccatgttcgaaataatcaggtgttgggaattggttctggttcgaccatcgtccacgccgttcagcgaattgccgaaagggtgaagcaggaaaacctgaacctcgtgtgcataccaacatctttccaagccagacaactaatcctacagtacgggcttaccctgtccgatctggataggcatccagagatcgatcttgccatagatggggcagatgaggtcgacgccgatctgaatttgattaagggcggagggggttgcctgacacaggagaagatagtagcaggatacgcgagccgatttattgtaatcgcagattttaggaaagatagtaagaacctcggcgatcagtggcataagggcatcccaatcgaggtcatccccatggcctatgttcccgtctcacgcgctgtaagtcaaaagttcggaggagtggtggagctcagaatggccgtgaacaaggccggacccgtggttacggataatggcaattttatcttagactggaaattcgaccgcgtgcataagtggtccgaggtcaacacggccattaagatgatcccgggagttgtggacaccgggctgttcataaatatggccgagagggtgtattttggcatgcaggacggcagcgtgaacatgcgggaaaagccattctgctag

SEQ ID NO: 238888 - DNA, 534 bp, Artificial Sequence
  derived and/or modified sequence
gcacgacagttgattctccagtacgggctcactctatctgacttggaccggcaccccgaaatcgacctggccattgacggcgcagatgaggtggatgccgatctaaatctgatcaagggcggtggcggatgtcttacacaggagaaaattgtggctggctatgcatcaaggttcattgtcatcgccgacttccgcaaagactcaaaaaatttgggcgatcaatggcataaaggcatacccatcgaggtaatcccaatggcctacgtacctgtgagtcgggcagtttcccaaaaatttggcggagtggtggagctgaggatggcagttaacaaggctggacccgtggtgacagacaatggcaattttattttggattggaagtttgatagggtgcacaaatggagtgaggtcaataccgccatcaaaatgatccctggagtggtagatactggacttttcatcaatatggcggagagggtatatttcgggatgcaggacgggtctgtgaatatgcgggaaaagcccttttgttag

SEQ ID NO: 238889 - DNA, 1823 bp, Artificial Sequence
  derived and/or modified sequence
atttccgggggagccgggggcgggacttcagcggaggccggagcgaggcgtcgggatgcagcgccccgggcccttcagcaccctctacgggcgggtcttggccccgctgcccgggagggccgggggcgcggcctccggcggaggagggaacagctgggacctcccgggttcccacgtgcggctgccggggcgtgcacagtctgggacccgtggcggtgctggcaacacaagcaccagctgcggggactccaacagcatctgcccggccccctccacgatgtccaaggccgaggaggccaagaagctggcgggccgcgcggctgtggagaaccacgtgaggaataaccaagtgctgggaattggaagtggttctacaattgtccatgctgtgcagcgaatagctgaaagggtgaagcaagagaatctgaacctcgtctgtattcccacttccttccaggcccgccagctcatcctgcagtatggcttgaccctcagtgatctggatcgacacccagagatcgaccttgccatcgatggtgctgatgaagtagatgctgatctcaatctcatcaagggtggcggaggctgcctgacccaggagaagattgtggctggctatgctagtcgcttcatcgtgatcgctgatttcaggaaagattcgaagaatctcggggatcagtggcacaagggaatccccatcgaggtcatcccaatggcctatgtcccagtgagccgagctgtgagccagaagtttgggggcgtggttgaacttcgaatggctgtcaacaaggctggtcctgtggtgacagataatgggaattttatcttggactggaagtttgaccgggtacacaaatggagtgaagtgaatacagctatcaaaatgatcccaggtgtggtggacacaggcctattcatcaacatggctgagagagtctactttgggatgcaggatggctcagtgaacatgagggagaagcctttctgttgaccctgcaaggagcagagtgtgttcaccttgagtctccagcccacagccaaggtggacgtacctctccaggagcctttgccttaatgtatctctgcctggacaacttgtggtggggggtggggggaagagtgggagggggagttaaatccagtcttatgaagtattgttattaaatgtctttttaaaaagagaaatataaacatatatttttactattaaaatattcagttttttaaatgaagtagaacttgagttcatgttttatatgaaatatttaccaaaaaaaaaaaatgaggtaaactgtatttaaaacctttgacttgagtctgctggtaaagcttctgaatattgagtttgctgagaaataaaaatcaaaacttctttaagctggtaaagtgaggggcccaccagcagtgatctcctgatgccttactggaaactttgtttacttgtctgctaccctctgatttgtttttagttagtttttattgtgagcacacatagtacctagttacatcttaagatcaggtttataaaactgtggagtggagcggtatggtatggaatgacttggaatgtaagctgtcagggagaaaatgttgttacacttttgctaagatctgggggtttcttcatattcctgctgttggaagcagttgaccagaaatgcttgccagtactgccaaagcactgctgtgaaatgtgaagtactttgtttttttatttttaatgattttctttttgttattaatatttttctctgttcctttgttattacttgcatggtttggcgtcagaagtccttacctctttatattgtttgcaggtttaa

SEQ ID NO: 238890 - DNA, 1281 bp, Artificial Sequence
  derived and/or modified sequence
gcccgccagctcatcctgcagtatggcttgaccctcagtgatctggatcgacacccagagatcgaccttgccatcgatggtgctgatgaagtagatgctgatctcaatctcatcaagggtggcggaggctgcctgacccaggagaagattgtggctggctatgctagtcgcttcatcgtgatcgctgatttcaggaaagattcgaagaatctcggggatcagtggcacaagggaatccccatcgaggtcatcccaatggcctatgtcccagtgagccgagctgtgagccagaagtttgggggcgtggttgaacttcgaatggctgtcaacaaggctggtcctgtggtgacagataatgggaattttatcttggactggaagtttgaccgggtacacaaatggagtgaagtgaatacagctatcaaaatgatcccaggtgtggtggacacaggcctattcatcaacatggctgagagagtctactttgggatgcaggatggctcagtgaacatgagggagaagcctttctgttgaccctgcaaggagcagagtgtgttcaccttgagtctccagcccacagccaaggtggacgtacctctccaggagcctttgccttaatgtatctctgcctggacaacttgtggtggggggtggggggaagagtgggagggggagttaaatccagtcttatgaagtattgttattaaatgtctttttaaaaagagaaatataaacatatatttttactattaaaatattcagttttttaaatgaagtagaacttgagttcatgttttatatgaaatatttaccaaaaaaaaaaaatgaggtaaactgtatttaaaacctttgacttgagtctgctggtaaagctttttacttgtctgctaccctctgatttgtttttagttagtttttattgtgagcacacatagtacctagttacatcttaagatcaggtttataaaactgtggagtggagcggtatggtatggaatgacttggaatgtaagctgtcagggagaaaatgttgttacacttttgctaagatctgggggtttcttcatattcctgctgttggaagcagttgaccagaaatgcttgccagtactgccaaagcactgctgtgaaatgtgaagtactttgtttttttatttttaatgattttctttttgttattaatatttttctctgttcctttgttattacttgcatggtttggcgtcagaagtccttacctctttatattgtttgcaggtttaaataaaacagtgtggtgcc

SEQ ID NO: 238891 - DNA, 936 bp, Artificial Sequence
  derived and/or modified sequence
atgcagagacccggccccttcagcaccctgtacggcagagtgctggcccccctgcccggcagagccggcggcgccgccagcggcggcggcggcaacagctgggacctgcccggcagccacgtgagactgcccggcagagcccagagcggcaccagaggcggcgccggcaacaccagcaccagctgcggcgacagcaacagcatctgccccgcccccagcaccatgagcaaggccgaggaggccaagaagctggccggcagagccgccgtggagaaccacgtgagaaacaaccaggtgctgggcatcggcagcggcagcaccatcgtgcacgccgtgcagagaatcgccgagagagtgaagcaggagaacctgaacctggtgtgcatccccaccagcttccaggccagacagctgatcctgcagtacggcctgaccctgagcgacctggacagacaccccgagatcgacctggccatcgacggcgccgacgaggtggacgccgacctgaacctgatcaagggcggcggcggctgcctgacccaggagaagatcgtggccggctacgccagcagattcatcgtgatcgccgacttcagaaaggacagcaagaacctgggcgaccagtggcacaagggcatccccatcgaggtgatccccatggcctacgtgcccgtgagcagagccgtgagccagaagttcggcggcgtggtggagctgagaatggccgtgaacaaggccggccccgtggtgaccgacaacggcaacttcatcctggactggaagttcgacagagtgcacaagtggagcgaggtgaacaccgccatcaagatgatccccggcgtggtggacaccggcctgttcatcaacatggccgagagagtgtacttcggcatgcaggacggcagcgtgaacatgagagagaagcccttctgctag

SEQ ID NO: 238892 - DNA, 534 bp, Artificial Sequence
  derived and/or modified sequence
gccagacagctgatcctgcagtacggcctgaccctgagcgacctggacagacaccccgagatcgacctggccatcgacggcgccgacgaggtggacgccgacctgaacctgatcaagggcggcggcggctgcctgacccaggagaagatcgtggccggctacgccagcagattcatcgtgatcgccgacttcagaaaggacagcaagaacctgggcgaccagtggcacaagggcatccccatcgaggtgatccccatggcctacgtgcccgtgagcagagccgtgagccagaagttcggcggcgtggtggagctgagaatggccgtgaacaaggccggccccgtggtgaccgacaacggcaacttcatcctggactggaagttcgacagagtgcacaagtggagcgaggtgaacaccgccatcaagatgatccccggcgtggtggacaccggcctgttcatcaacatggccgagagagtgtacttcggcatgcaggacggcagcgtgaacatgagagagaagcccttctgctag

SEQ ID NO: 238893 - protein, 314 aa, Artificial Sequence
  derived and/or modified sequence
MVKLLVAKILCMVGVFFFMLLGSLLPVKIIETDFEKAHRSKKILSLCNTFGGGVFLATCFNALLPAVREKLQKVLSLGHISTDYPLAETILLLGFFMTVFLEQLILTFRKEKPSFIDLETFNAGSDVGSDSEYESPFMGGARGHALYVEPHGHGPSLSVQGLSRASPVRLLSLAFALSAHSVFEGLALGLQEEGEKVVSLFVGVAVHETLVAVALGISMARSAMPLRDAAKLAVTVSAMIPLGIGLGLGIESAQGVPGSVASVLLQGLAGGTFLFITFLEILAKELEEKSDRLLKVLFLVLGYTVLAGMVFLKW

SEQ ID NO: 238894 - protein, 323 aa, Artificial Sequence
  derived and/or modified sequence
MVKLLVAKILCMVGVFFFMLLGSLLPVKIIETDFEKAHRSKKILSLCNTFGGGVFLATCFNALLPAVREKLQKVLSLGHISTDYPLAETILLLGFFMTVFLEQLILTFRKEKPSFIDLETFNAGSDVGSDSEYESPFMGGARGHALYVEPHGHGPSLSVQGLSRASPVRLLSLAFALSAHSVFEGLALGLQEEGEKVVSLFVGVAVHETLVAVALGISMARSAMPLRDAAKLAVTVSAMIPLGIGLGLGIESAQGVPGSVASVLLQGLAGGTFLFITFLEILAKELEEKSDRLLKVLFLVLGYTVLAGMVFLKWISPPEPRVS

SEQ ID NO: 238895 - DNA, 945 bp, Artificial Sequence
  derived and/or modified sequence
atggtgaagctcttggtcgctaagatcttgtgtatggtgggggtcttctttttcatgctgctaggttcattactccccgttaaaataattgaaaccgactttgaaaaagcgcataggagtaaaaagatccttagcctgtgcaacactttcggaggtggggtgtttctggcaacttgtttcaacgctctgcttccagcagtgagagagaaactgcaaaaggtgctgtctctgggccacatctcaacagattaccctttggccgagacgattcttctccttggcttttttatgacagtcttcctcgagcaactgatattaacattccgcaaggagaaaccctccttcattgatctcgagaccttcaacgcgggaagcgatgtcgggagcgattccgagtatgagtccccattcatgggcggggcccgggggcacgcgctgtatgtggaaccccatggccacggacccagtctgtccgttcaaggattaagtcgcgctagccccgtacgcctgctgtccctagccttcgccctctctgcccatagcgtgttcgaaggtcttgctctggggctccaggaggaaggcgagaaggtcgtctccctattcgtaggagttgcagttcacgagactctggtggctgtggcgcttggaatatctatggcccgatctgccatgccacttcgggatgctgccaagctggctgtgaccgtgagtgctatgatccctctggggattggtctgggtttggggattgagtccgcccaaggggttcctggcagtgtggcgtcagtgttactgcagggactggccggagggacatttctgttcattactttcctggagattctggcaaaggagctagaggaaaagtccgaccgcctgttaaaagtcctctttctcgtgctcggctacaccgtgctggccggcatggtcttccttaaatggtag

SEQ ID NO: 238896 - DNA, 972 bp, Artificial Sequence
  derived and/or modified sequence
atggtgaagctgttggtggcgaaaatcttatgtatggtgggggtgtttttttttatgcttctcggatctctcttgccggttaagataatagaaacagactttgagaaagcccacagatctaaaaagatactgagcctgtgcaacacattcgggggcggcgtgtttctagccacctgcttcaatgccctactgccagccgtccgggagaaattacagaaagtgctatccctggggcacatatccacagactaccccctggcagagaccatcctgttactaggtttctttatgacagtcttcttggagcagctgatccttacgttcagaaaggaaaagccttcttttattgatttagagacattcaatgccgggagtgatgtaggtagcgatagtgaatacgagagccccttcatggggggtgccagaggccatgctctgtacgtcgagcctcacggtcatggacccagcttatcggtgcagggactgagcagagcgagcccagtgcggctgctgtctttagcattcgctctgagcgcacacagcgtgtttgagggactggcgctgggactgcaggaggaaggggagaaggtggtgtctctctttgtgggagtagctgtacacgagaccctggttgccgtggccctaggcatcagcatggctcggtccgcaatgccccttagagatgcagccaaactggccgtgacggtcagtgctatgattcccctcggaatcgggttaggcttgggcatcgagtccgcgcagggcgtccctgggtccgtagcctctgtgcttctgcagggcctggcagggggtacctttctctttattacgttcctggagatattggccaaagagctggaagagaagtccgaccgactactgaaagttctcttcttggtccttggttatacggtcttagccgggatggtatttctgaaatggatctccccgccggaaccacgggtgtcatag

SEQ ID NO: 238897 - DNA, 945 bp, Artificial Sequence
  derived and/or modified sequence
atggtgaagctgctggtggccaagatcctgtgcatggtgggcgtcttcttcttcatgctgctgggcagcctgctgcctgtgaagatcatcgagacagactttgagaaggcccacaggagcaagaagatcctgagcctgtgcaacaccttcggcggcggcgtcttcctggccacctgcttcaatgccctgctgcctgctgtgcgggagaagctgcagaaggtgctgagcctgggccacatcagcacagactaccccctggccgagaccatcctgctgctgggcttcttcatgaccgtcttcctggagcagctgatcctgaccttcaggaaggagaagcccagcttcatcgacctggagaccttcaatgccggcagtgatgtgggcagtgacagtgaatatgagagccccttcatgggcggggcccggggccacgccctgtatgtggagccccacggccacggccccagcctgtctgtgcagggcctgagccgggccagccctgtgcggctgctgagcctggcctttgccctgagcgcccacagcgtgtttgagggcctggccctgggcctgcaggaggagggggagaaggtggtgtccctgtttgtgggcgtggccgtgcatgagaccctggtggccgtggccctgggcatctccatggcccggagcgccatgcccctgagagatgctgccaagctggccgtgacagtgtctgccatgatccccctgggcatcggcctgggcctgggcatcgagagcgcccagggcgtgcccggctctgtggcctctgtgctgctgcagggcctggccggcggcaccttcctgttcatcaccttcctggagatcctggccaaggagctggaggagaagagtgaccggctgctgaaggtgctcttcctggtgctgggctacacagtgctggccggcatggtgttcctgaagtggtag

SEQ ID NO: 238898 - DNA, 972 bp, Artificial Sequence
  derived and/or modified sequence
atggtgaagctgctggtggccaagatcctgtgcatggtgggcgtcttcttcttcatgctgctgggcagcctgctgcctgtgaagatcatcgagacagactttgagaaggcccacaggagcaagaagatcctgagcctgtgcaacaccttcggcggcggcgtcttcctggccacctgcttcaatgccctgctgcctgctgtgcgggagaagctgcagaaggtgctgagcctgggccacatcagcacagactaccccctggccgagaccatcctgctgctgggcttcttcatgaccgtcttcctggagcagctgatcctgaccttcaggaaggagaagcccagcttcatcgacctggagaccttcaatgccggcagtgatgtgggcagtgacagtgaatatgagagccccttcatgggcggggcccggggccacgccctgtatgtggagccccacggccacggccccagcctgtctgtgcagggcctgagccgggccagccctgtgcggctgctgagcctggcctttgccctgagcgcccacagcgtgtttgagggcctggccctgggcctgcaggaggagggggagaaggtggtgtccctgtttgtgggcgtggccgtgcatgagaccctggtggccgtggccctgggcatctccatggcccggagcgccatgcccctgagagatgctgccaagctggccgtgacagtgtctgccatgatccccctgggcatcggcctgggcctgggcatcgagagcgcccagggcgtgcccggctctgtggcctctgtgctgctgcagggcctggccggcggcaccttcctgttcatcaccttcctggagatcctggccaaggagctggaggagaagagtgaccggctgctgaaggtgctcttcctggtgctgggctacacagtgctggccggcatggtgttcctgaagtggatcagccccccagagccccgggtgtcctag

SEQ ID NO: 238899 - DNA, 945 bp, Artificial Sequence
  derived and/or modified sequence
atggtgaagctgctggtggccaagatcctgtgcatggtgggcgtgtttttcttcatgttgttgggatccttgctacccgtcaaaattatagaaactgactttgaaaaggcccatcgatcaaagaagatcctcagcctgtgcaacacttttggcggaggcgtcttccttgcaacatgttttaatgcactcctgccagcggttcgcgaaaaactgcaaaaggtgctcagcctcggacatatctctacagattatcctctcgccgagactattttactattgggcttcttcatgactgtgtttctggaacaactgatcttgacttttcgcaaagagaaacccagcttcattgacctcgagacttttaacgccggctccgatgtcggaagtgacagcgagtatgaaagcccattcatgggtggtgcgcggggccatgctttatacgtggagccccacggacacggcccaagtttgtctgttcaggggttgtccagggcatcacccgtgcgcctgctcagtctggcttttgccctcagtgctcatagtgtgtttgagggacttgccctgggattacaagaagagggcgagaaagttgtctctctcttcgtgggagtcgcagtccacgaaactctggtggccgtggcattgggaatctcaatggctcgaagcgccatgccccttcgagacgccgccaagctggcggtgaccgtttcagccatgatccctctgggcataggcctcggcttgggtatcgagtcggctcagggggtgcccggcagcgtcgcttctgttctgctccaaggcctggcaggaggtactttcctgttcatcacttttctagaaatacttgccaaggaacttgaagaaaagtccgaccgtctgctgaaggtgttgtttctcgtactcggctacactgtcctggcagggatggtcttcttgaagtggtag

SEQ ID NO: 238900 - DNA, 972 bp, Artificial Sequence
  derived and/or modified sequence
atggtgaagctgctggtggccaagatcctgtgcatggtgggcgtgtttttctttatgctgctgggatcactcctgcctgtaaagattatcgaaaccgactttgaaaaggcccaccgatctaagaaaattctgagcctgtgtaatacctttggagggggggtgtttctggccacctgctttaacgcccttcttcctgccgtccgtgagaaactgcagaaagtcttgagtctaggacacatatcaacggactacccgctcgctgagactatcctgctgctgggcttcttcatgaccgtgttccttgagcagctgatactaacatttcgtaaagagaaaccgtcattcattgacctggaaacctttaacgcaggctcagacgtaggctctgactctgagtatgagtcccccttcatggggggtgcccgaggccacgctctttatgttgaaccccacggtcatggcccgagtttaagcgttcagggattgtctcgggcatcccccgttcggctgctgagcttggcctttgctctgagcgcacattctgtcttcgaagggttggcacttggcttgcaggaggagggtgaaaaggtcgtgtcactctttgtcggggtagctgtacatgaaacactggtcgctgtcgcacttggcatctccatggctaggagcgcaatgcccctgcgcgacgctgccaagttggcggtgactgtctccgccatgattccattaggcatcgggctgggtttgggaattgaaagcgcacagggcgtgcccggaagcgtggcatccgttctgctgcaggggcttgccggcggaacattcttattcatcacttttttagagatactggcaaaggaacttgaagagaagtctgacagactgctaaaagttctatttctcgtcctagggtacacagtcctggctggaatggtatttcttaagtggatatcaccgcccgaacctcgcgttagctag

SEQ ID NO: 238901 - DNA, 945 bp, Artificial Sequence
  derived and/or modified sequence
atggtgaaattgctggtcgctaaaatcttgtgcatggttggggtgttcttcttcatgctccttggaagcctgcttcccgtgaagatcattgagaccgatttcgagaaggcgcatcggtccaagaagatcctgagtctgtgcaacacattcggtggtggcgtattcctggccacttgtttcaacgctttattgcccgctgtgagagaaaagctgcaaaaggtcctgagcctcggacacatcagcaccgattaccccctggcggagactattctcctgctcggatttttcatgaccgtgtttttagagcagctgatcctcacttttagaaaagaaaaacccagcttcatcgacctcgagacttttaacgccggatcggacgtcgggtccgacagtgaatacgagagccccttcatgggcggagcaagaggccatgccctgtacgtggagccacatgggcacgggccaagcttgagtgttcagggcctgtctagggcctcccctgttagactgctctctttggctttcgcactgtccgcccactctgtttttgagggcctcgccctcgggctccaggaggaaggcgagaaagtggtcagcctttttgtgggagtcgcagtgcatgagactctggtggctgtggccttaggcatctcaatggcgaggtcggctatgcctctgcgggatgctgccaagttagccgtcacagtgagcgcaatgattcctctgggcatcggcctggggttgggcattgagagtgcccaaggtgtccccggatctgttgccagcgtgcttctgcagggtcttgcagggggaacgtttctcttcatcacttttctggagattctggctaaggagctggaggaaaagtcagatcgcctgctcaaagtgttgttcctggtcttaggctacacagtactagctgggatggtcttcctgaagtggtag

SEQ ID NO: 238902 - DNA, 972 bp, Artificial Sequence
  derived and/or modified sequence
atggtaaaattgctggttgctaagatcttgtgtatggtgggggtcttcttcttcatgctactgggtagcctgctgcctgtcaaaatcatcgagacagacttcgagaaagcacacaggtctaaaaagatccttagcctctgcaacaccttcgggggtggcgtttttctcgcaacatgttttaatgccctgctgccagctgtaagagaaaagctgcagaaggttctgagcctggggcatatatctaccgactatccattggccgaaaccatcctccttctgggcttctttatgacagtattcttggagcagttaatcctcacatttcgaaaagagaagccttctttcattgaccttgaaacattcaacgcaggcagcgacgtgggttcagattcggagtacgagagcccctttatgggtggcgctcgaggacacgccttgtatgtcgaaccccacggacacgggccatctctgagtgtccaggggttgtcccgtgccagcccagtgagactactgagcctggcctttgccctctcggcgcacagcgtctttgagggactggctttaggcctgcaggaggagggagagaaggtcgtgagcctttttgtcggcgtggctgtgcatgagacactggtggccgtggcacttggaatttctatggctcggagcgcgatgcccctgcgcgatgccgcaaagctggcagtcaccgtgtcagcaatgatccctttgggtatcggactggggctgggaatcgaatctgcacagggggtacctggcagcgttgcttcagtcttgctccaagggctggctggtgggacctttctttttatcacgtttctggagatccttgcaaaagaattagaggagaaatctgataggttgcttaaggtgctcttcctggtcctgggctataccgtactggctggaatggtgtttctgaaatggatctctccacctgaacccagggtgtcttag

SEQ ID NO: 238903 - DNA, 1423 bp, Artificial Sequence
  derived and/or modified sequence
gggcaggggcgtgggcggggcgtggaccagccgcgccgagcggggcctctccgggccgcgtctgtggggtcgagactgcgcggccgttgggcgtgcagcggcgccagtcggcggacgaggggcccccgggagttgctggactgagacatgagcctccaactgtgtggttgggctcggtagcacatcgtgggacttgggtgtgcgcccacagatggtttggccctgcagtgaccagagcagcccaagccgccaccatggtgaaattgctagtggccaaaatcctgtgcatggtgggcgtgttcttcttcatgctgctcggctccctgctccccgtgaagatcatcgagacagattttgagaaggcccatcgctcgaaaaagatcctctctctctgcaacacctttggaggaggggtgtttctggccacgtgcttcaacgctctgctgcccgctgtgagggaaaagctccagaaggtcctgagcctcggccacatcagcaccgactacccgctggccgaaaccatcctcctgctgggcttcttcatgaccgtcttcctggagcagctgatcctgaccttccgcaaggagaagccgtccttcatcgacctggagaccttcaacgccggatcggacgtgggcagcgactcggagtatgagagccccttcatggggggcgcgcggggccacgcgctgtacgtggagccccacggccacggccccagcctgagcgtgcagggcctctcgcgcgccagccccgtgcgcctgctcagcctggccttcgcgctgtcggcccactcggtctttgagggcctggccctgggcctgcaggaggagggggagaaagtggtgagcctgttcgtgggggtggccgtccacgagacactggtggccgtggccctgggcatcagcatggcccggagtgccatgcccctgcgggacgcggccaagctggcggtcaccgtaagcgccatgatccccctgggcatcggcctgggcctgggcattgagagcgcccagggcgtgccgggcagcgtggcgtccgtgctgctgcagggcctggcgggcggcaccttcctcttcatcaccttcctggagatcctggccaaggagctggaggagaagagtgaccgtctgctcaaggtcctcttcctggtgctgggctacaccgtcctggccgggatggtcttcctcaagtggtgagcggcctcgccattgtccctgccgccggagcccgccgggagccccgggccggacacaggccgcgtcccccggccgcgcgtcccccaagagcgagcactgtggccctgggccaccacctgtgcacaaggggcctcccgggaccaggctgtgcccccgatcctacaccctgagcctcagagcactgctactttttaaaatacttctttctcttaaaagtctttacc

SEQ ID NO: 238904 - DNA, 1219 bp, Artificial Sequence
  derived and/or modified sequence
gtctgtggggtcgagactgcgcggccgttgggcgtgcagcggcgccagtcggcggacgaggggcccccgggagttgctggactgagacatgagcctccaactgtgtggttgggctcggtagcacatcgtgggacttgggtgtgcgcccacagatggtttggccctgcagtgaccagagcagcccaagccgccaccatggtgaaattgctagtggccaaaatcctgtgcatggtgggcgtgttcttcttcatgctgctcggctccctgctccccgtgaagatcatcgagacagattttgagaaggcccatcgctcgaaaaagatcctctctctctgcaacacctttggaggaggggtgtttctggccacgtgcttcaacgctctgctgcccgctgtgagggaaaagctccagaaggtcctgagcctcggccacatcagcaccgactacccgctggccgaaaccatcctcctgctgggcttcttcatgaccgtcttcctggagcagctgatcctgaccttccgcaaggagaagccgtccttcatcgacctggagaccttcaacgccggatcggacgtgggcagcgactcggagtatgagagccccttcatggggggcgcgcggggccacgcgctgtacgtggagccccacggccacggccccagcctgagcgtgcagggcctctcgcgcgccagccccgtgcgcctgctcagcctggccttcgcgctgtcggcccactcggtctttgagggcctggccctgggcctgcaggaggagggggagaaagtggtgagcctgttcgtgggggtggccgtccacgagacactggtggccgtggccctgggcatcagcatggcccggagtgccatgcccctgcgggacgcggccaagctggcggtcaccgtaagcgccatgatccccctgggcatcggcctgggcctgggcattgagagcgcccagggcgtgccgggcagcgtggcgtccgtgctgctgcagggcctggcgggcggcaccttcctcttcatcaccttcctggagatcctggccaaggagctggaggagaagagtgaccgtctgctcaaggtcctcttcctggtgctgggctacaccgtcctggccgggatggtcttcctcaagtggatctcgccgcccgagccccgagtgtcttgaggcttattagaggttggagtcactgcgatgggacagccgggctccgtccctc

SEQ ID NO: 238905 - DNA, 945 bp, Artificial Sequence
  derived and/or modified sequence
atggtgaagctgctggtggccaagatcctgtgcatggtgggcgtgttcttcttcatgctgctgggcagcctgctgcccgtgaagatcatcgagaccgacttcgagaaggcccacagaagcaagaagatcctgagcctgtgcaacaccttcggcggcggcgtgttcctggccacctgcttcaacgccctgctgcccgccgtgagagagaagctgcagaaggtgctgagcctgggccacatcagcaccgactaccccctggccgagaccatcctgctgctgggcttcttcatgaccgtgttcctggagcagctgatcctgaccttcagaaaggagaagcccagcttcatcgacctggagaccttcaacgccggcagcgacgtgggcagcgacagcgagtacgagagccccttcatgggcggcgccagaggccacgccctgtacgtggagccccacggccacggccccagcctgagcgtgcagggcctgagcagagccagccccgtgagactgctgagcctggccttcgccctgagcgcccacagcgtgttcgagggcctggccctgggcctgcaggaggagggcgagaaggtggtgagcctgttcgtgggcgtggccgtgcacgagaccctggtggccgtggccctgggcatcagcatggccagaagcgccatgcccctgagagacgccgccaagctggccgtgaccgtgagcgccatgatccccctgggcatcggcctgggcctgggcatcgagagcgcccagggcgtgcccggcagcgtggccagcgtgctgctgcagggcctggccggcggcaccttcctgttcatcaccttcctggagatcctggccaaggagctggaggagaagagcgacagactgctgaaggtgctgttcctggtgctgggctacaccgtgctggccggcatggtgttcctgaagtggtag

SEQ ID NO: 238906 - DNA, 972 bp, Artificial Sequence
  derived and/or modified sequence
atggtgaagctgctggtggccaagatcctgtgcatggtgggcgtgttcttcttcatgctgctgggcagcctgctgcccgtgaagatcatcgagaccgacttcgagaaggcccacagaagcaagaagatcctgagcctgtgcaacaccttcggcggcggcgtgttcctggccacctgcttcaacgccctgctgcccgccgtgagagagaagctgcagaaggtgctgagcctgggccacatcagcaccgactaccccctggccgagaccatcctgctgctgggcttcttcatgaccgtgttcctggagcagctgatcctgaccttcagaaaggagaagcccagcttcatcgacctggagaccttcaacgccggcagcgacgtgggcagcgacagcgagtacgagagccccttcatgggcggcgccagaggccacgccctgtacgtggagccccacggccacggccccagcctgagcgtgcagggcctgagcagagccagccccgtgagactgctgagcctggccttcgccctgagcgcccacagcgtgttcgagggcctggccctgggcctgcaggaggagggcgagaaggtggtgagcctgttcgtgggcgtggccgtgcacgagaccctggtggccgtggccctgggcatcagcatggccagaagcgccatgcccctgagagacgccgccaagctggccgtgaccgtgagcgccatgatccccctgggcatcggcctgggcctgggcatcgagagcgcccagggcgtgcccggcagcgtggccagcgtgctgctgcagggcctggccggcggcaccttcctgttcatcaccttcctggagatcctggccaaggagctggaggagaagagcgacagactgctgaaggtgctgttcctggtgctgggctacaccgtgctggccggcatggtgttcctgaagtggatcagcccccccgagcccagagtgagctag

SEQ ID NO: 238907 - protein, 190 aa, Artificial Sequence
  derived and/or modified sequence
MFQVPDSEGGRAGSRAMKPPGGESSNLFGSPEEATPSSRPNRMASNIFGPTEEPQNIPKRTNPPGGKGSGIFDESTPVQTRQHLNPPGGKTSDIFGSPVTATSRLAHPNKPKDHVFLCEGEEPKSDLKAARSIPAGAEPGEKGSARKAGPAKEQEPMPTVDSHEPRLGPRPRSHNKVLNPPGGKSSISFY

SEQ ID NO: 238908 - protein, 178 aa, Artificial Sequence
  derived and/or modified sequence
MMRAMKPPGGESSNLFGSPEEATPSSRPNRMASNIFGPTEEPQNIPKRTNPPGGKGSGIFDESTPVQTRQHLNPPGGKTSDIFGSPVTATSRLAHPNKPKDHVFLCEGEEPKSDLKAARSIPAGAEPGEKGSARKAGPAKEQEPMPTVDSHEPRLGPRPRSHNKVLNPPGGKSSISFY

SEQ ID NO: 238909 - protein, 218 aa, Artificial Sequence
  derived and/or modified sequence
MFQVPDSEGGRAGSRKWQLLTGSLASTSPSLLSGQGPWAPLQRAMKPPGGESSNLFGSPEEATPSSRPNRMASNIFGPTEEPQNIPKRTNPPGGKGSGIFDESTPVQTRQHLNPPGGKTSDIFGSPVTATSRLAHPNKPKDHVFLCEGEEPKSDLKAARSIPAGAEPGEKGSARKAGPAKEQEPMPTVDSHEPRLGPRPRSHNKVLNPPGGKSSISFY

SEQ ID NO: 238910 - protein, 208 aa, Artificial Sequence
  derived and/or modified sequence
MFQVPDSEGGRAGSRAMKPPGGESSNLFGSPEEATPSSRPNRMASNIFGPTEEPQNIPKRTNPPGGKGSGIFDESTPVQTRQHLNPPGGKTSDIFGSPVTATSRLAHPNKPTRNSRDRVAMFSFPFAQMSGVGRGLVLCEPGCSASPGRHDSCLETRAFQMAGRCLCGDEMGHPWPSLMCSPGLRGTGRGVRVGRWGRAWSLDQQPAS

SEQ ID NO: 238911 - DNA, 537 bp, Artificial Sequence
  derived and/or modified sequence
atgatgagagccatgaagccccccggcggcgagagcagcaacctgttcggcagccccgaggaggccacccccagcagcagacccaacagaatggccagcaacatcttcggccccaccgaggagccccagaacatccccaagagaaccaacccccccggcggcaagggcagcggcatcttcgacgagagcacccccgtgcagaccagacagcacctgaacccccccggcggcaagaccagcgacatcttcggcagccccgtgaccgccaccagcagactggcccaccccaacaagcccaaggaccacgtgttcctgtgcgagggcgaggagcccaagagcgacctgaaggccgccagaagcatccccgccggcgccgagcccggcgagaagggcagcgccagaaaggccggccccgccaaggagcaggagcccatgcccaccgtggacagccacgagcccagactgggccccagacccagaagccacaacaaggtgctgaacccccccggcggcaagagcagcatcagcttctactag

SEQ ID NO: 238912 - DNA, 657 bp, Artificial Sequence
  derived and/or modified sequence
atgttccaggtgcccgacagcgagggcggcagagccggcagcagaaagtggcagctgctgaccggcagcctggccagcaccagccccagcctgctgagcggccagggcccctgggcccccctgcagagagccatgaagccccccggcggcgagagcagcaacctgttcggcagccccgaggaggccacccccagcagcagacccaacagaatggccagcaacatcttcggccccaccgaggagccccagaacatccccaagagaaccaacccccccggcggcaagggcagcggcatcttcgacgagagcacccccgtgcagaccagacagcacctgaacccccccggcggcaagaccagcgacatcttcggcagccccgtgaccgccaccagcagactggcccaccccaacaagcccaaggaccacgtgttcctgtgcgagggcgaggagcccaagagcgacctgaaggccgccagaagcatccccgccggcgccgagcccggcgagaagggcagcgccagaaaggccggccccgccaaggagcaggagcccatgcccaccgtggacagccacgagcccagactgggccccagacccagaagccacaacaaggtgctgaacccccccggcggcaagagcagcatcagcttctactag

SEQ ID NO: 238913 - DNA, 627 bp, Artificial Sequence
  derived and/or modified sequence
atgttccaggtgcccgacagcgagggcggcagagccggcagcagagccatgaagccccccggcggcgagagcagcaacctgttcggcagccccgaggaggccacccccagcagcagacccaacagaatggccagcaacatcttcggccccaccgaggagccccagaacatccccaagagaaccaacccccccggcggcaagggcagcggcatcttcgacgagagcacccccgtgcagaccagacagcacctgaacccccccggcggcaagaccagcgacatcttcggcagccccgtgaccgccaccagcagactggcccaccccaacaagcccaccagaaacagcagagacagagtggccatgttcagcttccccttcgcccagatgagcggcgtgggcagaggcctggtgctgtgcgagcccggctgcagcgccagccccggcagacacgacagctgcctggagaccagagccttccagatggccggcagatgcctgtgcggcgacgagatgggccacccctggcccagcctgatgtgcagccccggcctgagaggcaccggcagaggcgtgagagtgggcagatggggcagagcctggagcctggaccagcagcccgccagctag

SEQ ID NO: 238914 - DNA, 573 bp, Artificial Sequence
  derived and/or modified sequence
atgtttcaggttcctgattccgagggaggcagagctggctcacgtgctatgaaaccccccggcggcgagtcttccaacctgttcggctcccctgaggaggctaccccttctagccggccaaaccggatggcctccaatattttcggacccactgaggaaccacagaatattcctaagagaactaatcccccaggggggaagggaagtgggatatttgacgaatcaactcccgtgcaaactcgacaacatctgaacccgccgggtggtaagaccagcgacattttcggttcgccagtcactgcgacctcacgattggcgcaccccaacaagcccaaagatcatgtttttctctgcgagggggaagaacctaagagtgatctgaaagctgctcgctcgattcccgccggggcagaacccggggagaagggctccgccagaaaggctgggcccgccaaagagcaggagccaatgcctacagtggactcccacgaacctcggctggggcccaggcctcggagccacaacaaggtcttgaaccccccaggtggaaaaagttcgatcagcttttactag

SEQ ID NO: 238915 - DNA, 537 bp, Artificial Sequence
  derived and/or modified sequence
atgatgcgagctatgaagccccctggaggggagagtagtaatctgtttgggtcgcctgaggaagccacgccgtctagcaggcctaatcggatggcgtccaatatcttcggtcccaccgaggagcctcagaacatccccaaaaggacgaacccccccgggggcaaagggtctgggatctttgatgaatctacacctgtccagactagacagcatctaaaccctcctggggggaaaacctcagatattttcggcagcccagtgacagccacaagccgactggcacaccccaataagcccaaagaccacgtatttctctgcgagggggaggaacctaaatctgacctgaaagcagcccggagcatccccgcgggcgcagagcccggcgagaaaggtagcgcgcgcaaggcagggccagcgaaggaacaggaacccatgcctaccgtggactcccatgagcctcgcctgggccctaggccacgttcacataacaaggtactcaaccctcccggcggcaaatcgtctatttcgttctactag

SEQ ID NO: 238916 - DNA, 657 bp, Artificial Sequence
  derived and/or modified sequence
atgttccaggttccagatagcgaggggggaagggcggggagccgcaagtggcagctactcacaggaagcctggcatcaacttcgccaagcctgcttagcgggcaggggccctgggccccactgcagagagccatgaagcctccaggaggagaatctagtaatctattcggctcccctgaagaagccacacccagctcacggccaaaccggatggcttccaatatctttggtccaacagaggagccccagaacatccctaaacggacaaaccctcctgggggcaagggctccgggatcttcgatgagagtaccccggtccagaccaggcagcacttaaatccccccggcggtaaaaccagcgatattttcggatcaccagtgactgctacaagtagactcgcccaccccaataagcccaaagatcacgtgttcctgtgtgagggcgaggaacctaagtcagacctgaaagccgctcgctctatccctgcgggggcagaacccggtgaaaagggaagcgccaggaaggcgggccccgcaaaggaacaggagccaatgcccactgtggatagtcatgagcctcggctggggccacgaccaaggtcgcacaacaaggtgttgaatccccccgggggtaaaagtagcatctcattctattag

SEQ ID NO: 238917 - DNA, 627 bp, Artificial Sequence
  derived and/or modified sequence
atgttccaggttccagactctgagggaggaagagccggatcccgggctatgaaaccacccggcggagagagcagtaatctcttcgggtcacccgaggaggcaacaccaagcagccggccaaacagaatggctagcaacattttcggtcccacggaggagcctcaaaatatcccaaaaagaactaacccaccaggtggcaaaggcagtggcatcttcgatgagtcaacgcctgtgcagaccagacagcacctgaaccctcccggagggaagacttcagacatcttcggttctcctgtaaccgctacctctaggctggcccatccaaataagcccacgcgaaactcccgagatcgggtagcgatgttttcgttcccgtttgcccagatgagcggagtcggaagaggtctggtgctctgcgagcccggttgctccgcgtcaccaggtcgtcatgatagctgtctggaaacaagggcgtttcagatggccggcagatgcctttgcggggacgagatgggacacccatggcccagcctgatgtgcagtcccggccttcgaggcacagggcgtggagttagagtgggtcggtggggacgcgcatggagtctggatcaacaacccgcaagttag

SEQ ID NO: 238918 - DNA, 573 bp, Artificial Sequence
  derived and/or modified sequence
atgttccaggtgcctgattctgagggcggccgggccggcagccgggccatgaagcccccaggaggagagagcagcaacctgtttggcagccctgaggaggccacccccagcagccggcccaacaggatggccagcaacatcttcggccccacagaggagccccagaacatccccaagaggaccaaccccccaggcggcaaaggaagtggcatctttgatgagagcacccctgtgcagacccggcagcacctgaaccccccaggcggcaagaccagtgacatcttcggcagccctgtgacagccaccagccggctggcccaccccaacaagcccaaggaccacgtgttcctgtgtgagggggaggagcccaagagtgacctgaaggccgcccggagcatcccagctggagctgagcctggagagaagggcagcgccaggaaggccggccctgccaaggagcaggagcccatgcccaccgtggacagccatgagccccggctgggcccccggcccaggagccacaacaaggtgctgaaccccccaggcggcaagagcagcatctccttctactag

SEQ ID NO: 238919 - DNA, 537 bp, Artificial Sequence
  derived and/or modified sequence
atgatgagggccatgaagcccccaggaggagagagcagcaacctgtttggcagccctgaggaggccacccccagcagccggcccaacaggatggccagcaacatcttcggccccacagaggagccccagaacatccccaagaggaccaaccccccaggcggcaaaggaagtggcatctttgatgagagcacccctgtgcagacccggcagcacctgaaccccccaggcggcaagaccagtgacatcttcggcagccctgtgacagccaccagccggctggcccaccccaacaagcccaaggaccacgtgttcctgtgtgagggggaggagcccaagagtgacctgaaggccgcccggagcatcccagctggagctgagcctggagagaagggcagcgccaggaaggccggccctgccaaggagcaggagcccatgcccaccgtggacagccatgagccccggctgggcccccggcccaggagccacaacaaggtgctgaaccccccaggcggcaagagcagcatctccttctactag

SEQ ID NO: 238920 - DNA, 657 bp, Artificial Sequence
  derived and/or modified sequence
atgttccaggtgcctgattctgagggcggccgggccggcagcaggaagtggcagctgctgaccggcagcctggccagcaccagccccagcctgctgagcggccagggcccctgggcccccctgcagagggccatgaagcccccaggaggagagagcagcaacctgtttggcagccctgaggaggccacccccagcagccggcccaacaggatggccagcaacatcttcggccccacagaggagccccagaacatccccaagaggaccaaccccccaggcggcaaaggaagtggcatctttgatgagagcacccctgtgcagacccggcagcacctgaaccccccaggcggcaagaccagtgacatcttcggcagccctgtgacagccaccagccggctggcccaccccaacaagcccaaggaccacgtgttcctgtgtgagggggaggagcccaagagtgacctgaaggccgcccggagcatcccagctggagctgagcctggagagaagggcagcgccaggaaggccggccctgccaaggagcaggagcccatgcccaccgtggacagccatgagccccggctgggcccccggcccaggagccacaacaaggtgctgaaccccccaggcggcaagagcagcatctccttctactag

SEQ ID NO: 238921 - DNA, 627 bp, Artificial Sequence
  derived and/or modified sequence
atgttccaggtgcctgattctgagggcggccgggccggcagccgggccatgaagcccccaggaggagagagcagcaacctgtttggcagccctgaggaggccacccccagcagccggcccaacaggatggccagcaacatcttcggccccacagaggagccccagaacatccccaagaggaccaaccccccaggcggcaaaggaagtggcatctttgatgagagcacccctgtgcagacccggcagcacctgaaccccccaggcggcaagaccagtgacatcttcggcagccctgtgacagccaccagccggctggcccaccccaacaagcccaccaggaacagccgggacagagtggccatgttctccttcccctttgcccagatgtctggagtgggccggggcctggtgctgtgtgagcccggctgcagcgccagccctggaagacatgacagctgcctggagacccgggccttccagatggccggccgctgcctgtgtggagatgagatgggccacccctggcccagcctgatgtgcagccctggcctgcggggcaccggccggggcgtgcgggtgggccgctggggccgggcctggagcctggaccagcagcctgccagctag

SEQ ID NO: 238922 - DNA, 936 bp, Artificial Sequence
  derived and/or modified sequence
agctgcacagggccgcactaaagtcatactcacactaccctgggggactggtttctggacaaggtgttgagaaagggagaaaactcttccttttaggatggtgaggaaggaaagccggtctgaactggatgatgagggccatgaagcccccaggaggagaatcgagcaatctttttggaagtccagaagaagctactccttccagcaggcctaataggatggcatctaatatttttggaccaacagaagaacctcagaacatacccaagaggacaaatcccccagggggtaaaggaagtggtatctttgacgaatcaacccccgtgcagactcgacagcacctgaacccacctggagggaagaccagcgacatttttgggtctccggtcactgccacttcacgcttggcacacccaaacaaacccaaggatcatgttttcttatgtgaaggagaagaaccaaaatcggatcttaaagctgcaaggagcatcccggctggagcagagccaggtgagaaaggcagcgccagaaaagcaggccccgccaaggagcaggagcccatgcccacagtcgacagccatgagccccggctggggccgcggcctcgctctcacaacaaggtcctgaacccaccgggaggcaaatccagcatctccttctactaagagaagccactgctccacccggagccagaccagaaactcaagagatagggtagccatgttttcatttccttttgcccaaatgagcggggtgggaagagggttagtcttatgtgagcctggctgctcagcgtctcctggccgtcatgacagctgcttggagacccgtgccttccagatggctgggagatgcctctgtggggatgaaatggggcacccctggccatcactcatgtgtagtccaggtttgagaggaactggaaggggggtgagg

SEQ ID NO: 238923 - DNA, 965 bp, Artificial Sequence
  derived and/or modified sequence
acggcgcgcggcgagctgagggtggcggcggtcgacatgttccaggtcccggatagcgagggcggccgcgccggctccaggaaatggcaactgctgacaggaagtttggcatccacctcccccagcctcctgagtggacaggggccctgggcaccacttcagagggccatgaagcccccaggaggagaatcgagcaatctttttggaagtccagaagaagctactccttccagcaggcctaataggatggcatctaatatttttggaccaacagaagaacctcagaacatacccaagaggacaaatcccccagggggtaaaggaagtggtatctttgacgaatcaacccccgtgcagactcgacagcacctgaacccacctggagggaagaccagcgacatttttgggtctccggtcactgccacttcacgcttggcacacccaaacaaacccaaggatcatgttttcttatgtgaaggagaagaaccaaaatcggatcttaaagctgcaaggagcatcccggctggagcagagccaggtgagaaaggcagcgccagaaaagcaggccccgccaaggagcaggagcccatgcccacagtcgacagccatgagccccggctggggccgcggcctcgctctcacaacaaggtcctgaacccaccgggaggcaaatccagcatctccttctactaagagaagccactgctccacccggagccagaccagaaactcaagagatagggtagccatgttttcatttccttttgcccaaatgagcggggtgggaagagggttagtcttatgtgagcctggctgctcagcgtctcctggccgtcatgacagctgcttggagacccgtgccttccagatggctgggagatgcctctgtggggatgaaatggggcacccctggccatcactcatgtgtagtccaggtttgagaggaactggaaggggggtgaggg

SEQ ID NO: 238924 - DNA, 573 bp, Artificial Sequence
  derived and/or modified sequence
atgttccaggtgcccgacagcgagggcggccgggccggcagccgggccatgaagcccccaggaggcgaatctagtaacctgttcggctcacccgaggaggccacccctagcagccgccccaatagaatggcgagtaatatattcggcccaaccgaggaacctcaaaacatacccaagaggaccaatccacctggtggcaagggcagcggaatttttgatgagtctactcctgtgcagacacgccagcacttgaaccccccaggcggcaaaacaagcgatatctttggttcccccgtgacggccacgagcagacttgcgcaccccaataaacctaaggaccatgtatttctgtgtgaaggtgaggagccgaaaagtgatctaaaggctgcccgctcaatcccagccggcgcggagcccggcgaaaaagggtccgctcgtaaagcaggtcccgctaaggaacaggagcccatgccgacagtggacagtcacgagccgcggctcggaccaaggcccaggagccacaacaaggtgctaaatccaccaggagggaagtcaagtatctccttctattag

SEQ ID NO: 238925 - DNA, 537 bp, Artificial Sequence
  derived and/or modified sequence
atgatgcgggccatgaagccccccggcggcgagagcagcaacctgtttgggtcccccgaggaggccaccccttcctctagaccaaaccgcatggccagcaacatcttcggtccaaccgaggaaccccagaatattcctaaaaggaccaatccccccggagggaaggggtctggcatcttcgacgaatcaactcccgtacagacccgccagcacctcaatcctcctggagggaaaactagtgatatttttggttccccagtcactgccacttcccgcctcgcccacccaaacaaacctaaggatcatgtgttcctgtgtgaaggtgaggagccaaaaagcgaccttaaggccgctcgttcaataccggccggggccgagccaggtgagaaggggagcgccagaaaagccggacccgctaaggaacaagagcccatgcccaccgtcgactctcacgaaccacggcttgggccgagaccacgctcacacaacaaagtgcttaatcctccaggggggaagtctagtataagcttttactag

SEQ ID NO: 238926 - DNA, 657 bp, Artificial Sequence
  derived and/or modified sequence
atgttccaggtgcccgacagcgagggcggccgggccggcagccggaagtggcaactgctgactggtagtttggcttcgacgtctccctccctcctgtctgggcaagggccatgggctccgcttcagagggctatgaagccacctgggggcgagtcgtccaatcttttcggctcccctgaagaagcgactccaagctcccggccaaatcgcatggcatctaacatttttgggccgacggaagagccacaaaacattccgaagaggaccaacccacccggcggaaaaggatcaggcatctttgacgaaagtacaccggttcagacgaggcagcatcttaatccccccggtggcaaaacttctgatatatttggtagtcccgtgactgcaacatccaggttagcccacccaaacaagccgaaggatcacgtatttttgtgtgaaggggaggaacccaagtccgacctgaaagcggcgcgcagcatccctgcgggcgccgagccaggcgaaaagggcagtgctaggaaggccggacctgcaaaagagcaggaacccatgccaacagtggactcccatgagccgcgcttggggcccagaccacgatcacacaacaaggtgctcaacccacctgggggcaaatcctccatttccttctactag

SEQ ID NO: 238927 - DNA, 627 bp, Artificial Sequence
  derived and/or modified sequence
atgttccaggtgcccgacagcgagggcggccgggccggcagccgggctatgaaaccccctggcggggaatcctctaacctcttcgggagccccgaagaggcaacccctagctccaggccaaatagaatggccagcaacatattcggacctactgaagaacctcaaaatatacccaagcgcactaatcctcctggaggtaagggatccggtatcttcgacgagtccacccccgtgcaaacacggcagcacctgaacccaccagggggcaagacttccgacatttttggctcacccgtgactgcaacgagtcggctggcccatcctaacaagcctacccgcaactccagagaccgggtagccatgttcagttttccctttgcccagatgtctggcgtgggcagaggactcgtgctttgcgagcccggctgttcggctagccccggacgacacgattcttgccttgaaacacgcgcatttcagatggcaggccgatgtttgtgtggggatgaaatgggtcacccatggccatcgctgatgtgtagcccgggcctgcggggcacagggaggggagtgcgcgttgggaggtggggaagggcctggtcattagaccagcaaccagcctcctag

SEQ ID NO: 238928 - DNA, 573 bp, Artificial Sequence
  derived and/or modified sequence
atgttccaagtgcctgatagcgagggcggacgggctggcagcagggctatgaagccaccgggtggagagtcctcaaatctgttcggttcaccggaggaagctaccccctcgtcacgccctaatcgcatggcaagtaatatcttcggcccaactgaggaaccccagaacattccgaagcgtacaaacccaccaggaggtaagggcagtggcatctttgacgagagcacccccgtgcaaacgagacaacacctgaatccgcctgggggaaaaacttctgatatttttgggagccctgtcaccgcgacctccagactcgcacaccctaataaaccaaaggaccatgtttttctgtgtgagggagaggagccaaagtctgacctgaaggccgctcgttctattcctgcaggcgctgaaccaggcgagaagggcagtgcccgtaaagcagggccagccaaagagcaggagccgatgccaaccgtggacagtcacgaaccaagactgggcccacgcccaagatctcacaacaaagtcctcaatccccctggaggcaagtcttcaatctcattttattag

SEQ ID NO: 238929 - DNA, 1142 bp, Artificial Sequence
  derived and/or modified sequence
atgttccaggtcccggatagcgagggcggccgcgccggctccagggccatgaagcccccaggaggagaatcgagcaatctttttggaagtccagaagaagctactccttccagcaggcctaataggatggcatctaatatttttggaccaacagaagaacctcagaacatacccaagaggacaaatcccccagggggtaaaggaagtggtatctttgacgaatcaacccccgtgcagactcgacagcacctgaacccacctggagggaagaccagcgacatttttgggtctccggtcactgccacttcacgcttggcacacccaaacaaacccaccagaaactcaagagatagggtagccatgttttcatttccttttgcccaaatgagcggggtgggaagagggttagtcttatgtgagcctggctgctcagcgtctcctggccgtcatgacagctgcttggagacccgtgccttccagatggctgggagatgcctctgtggggatgaaatggggcacccctggccatcactcatgtgtagtccaggtttgagaggaactggaaggggggtgagggtggggaggtggggcagggcatggtccttggatcaacagcccgccagctgattggatgtctaggaatgactgaaagaaaccaaaacagcctgtccactgctgctgtgggatggaggaggcgtaagcagaaacactaacagtatattgacctcttagcagaaccgcttccattctggagatcacggctgctaaatccagcatccccacttcattttacccccagcatattgttctgtagtcttttcttgaaacatcttgattgcttttcctcggcagctttcaaaaaaccaaataataatagttatccgtcttctacttcatggaagattgttttggtgccctgaccctctgaagtgcccagttcctgccatctgaaacctcggcctgatctgatctcatgttggaatctgcctgtctttcacacagggctggtcttggtcctttacatgccagttttgcttgtgaattcttgcttttttcctctcatcagccttaagtttaggcgtttgttgttctccagtgatgtagacagttcccttcacaagtcacagttcttcccataaatg

SEQ ID NO: 238930 - DNA, 537 bp, Artificial Sequence
  derived and/or modified sequence
atgatgagagcaatgaagcccccaggcggtgagtctagcaatctcttcggctcaccagaagaggctactccttccagtcggcctaaccgaatggctagtaacattttcgggccaaccgaggagccacagaacattcctaaaagaacgaacccgcctggagggaagggctcaggcatctttgatgagtccaccccagtccaaactcgtcagcacctgaatccccctgggggaaagacttctgacatttttggctccccagtgacagctacttcccgtttagctcatcccaacaagccgaaggatcacgtgttcctctgtgagggcgaggagccaaagagcgatctcaaagcagcgagatccatccctgcgggagccgagcccggagagaaaggcagtgcccgtaaagctgggccagctaaggaacaagagccaatgcccacagtcgacagccatgaacctaggctggggcctcggcctcgatcacacaataaggtcctcaacccgcctggcggtaaatcctctatttccttttattag

SEQ ID NO: 238931 - DNA, 657 bp, Artificial Sequence
  derived and/or modified sequence
atgtttcaggtaccagacagcgagggtgggcgagccggatccagaaaatggcagttattgacgggatctttagcctcgacaagtccatctttattaagcggacaaggaccgtgggctccactccaacgggctatgaagccacccggaggagagagctccaatctgtttggatccccggaggaagcaaccccttccagcaggcctaaccggatggcttcaaacattttcggtccaacagaggagccccagaatatccccaagcggaccaaccccccagggggaaagggtagcggaatctttgacgaatccacacctgttcaaactaggcaacaccttaaccctcctggtgggaaaacaagcgatattttcggcagtccggttacagccactagccgtttagcccacccaaataaacccaaagaccatgtttttctttgcgaaggtgaggagcctaaatctgatttgaaggccgctaggagtattcctgccggtgctgaacccggagaaaaaggctcagcccgaaaggcaggaccggctaaagagcaagaaccgatgcctactgttgattctcacgaacccaggttaggacctcgaccacgatctcacaacaaggttctaaatccccctggaggaaaatcatccatctccttttactag

SEQ ID NO: 238932 - DNA, 3718 bp, Artificial Sequence
  derived and/or modified sequence
acctgcgctgggcgggcgggaacggcgcgcggcgagctgagggtggcggcggtcgacatgttccaggtcccggatagcgagggcggccgcgccggctccagggccatgaagcccccaggaggagaatcgagcaatctttttggaagtccagaagaagctactccttccagcaggcctaataggatggcatctaatatttttggaccaacagaagaacctcagaacatacccaagaggacaaatcccccagggggtaaaggaagtggtatctttgacgaatcaacccccgtgcagactcgacagcacctgaacccacctggagggaagaccagcgacatttttgggtctccggtcactgccacttcacgcttggcacacccaaacaaacccaaggatcatgttttcttatgtgaaggagaagaaccaaaatcggatcttaaagctgcaaggagcatcccggctggagcagagccaggtgagaaaggcagcgccagaaaagcaggccccgccaaggagcaggagcccatgcccacagtcgacagccatgagccccggctggggccgcggcctcgctctcacaacaaggtcctgaacccaccgggaggcaaatccagcatctccttctactaagagaagccactgctccacccggagccagaccagaaactcaagagatagggtagccatgttttcatttccttttgcccaaatgagcggggtgggaagagggttagtcttatgtgagcctggctgctcagcgtctcctggccgtcatgacagctgcttggagacccgtgccttccagatggctgggagatgcctctgtggggatgaaatggggcacccctggccatcactcatgtgtagtccaggtttgagaggaactggaaggggggtgagggtggggaggtggggcagggcatggtccttggatcaacagcccgccagctgattggatgtctaggaatgactgaaagaaaccaaaacagcctgtccactgctgctgtgggatggaggaggcgtaagcagaaacactaacagtatattgacctcttagcagaaccgcttccattctggagatcacggctgctaaatccagcatccccacttcattttacccccagcatattgttctgtagtcttttcttgaaacatcttgattgcttttcctcggcagctttcaaaaaaccaaataataatagttatccgtcttctacttcatggaagattgttttggtgccctgaccctctgaagtgcccagttcctgccatctgaaacctcggcctgatctgatctcatgttggaatctgcctgtctttcacacagggctggtcttggtcctttacatgccagttttgcttgtgaattcttgcttttttcctctcatcagccttaagtttaggcgtttgttgttctccagtgatgtagacagttcccttcacaagtcacagttcttcccataaatgaggcccgctgacctctgcgggactttaaaaatctattcagatatttccgagtaagtggcttgtttaaattcttcctgtgtctttctttattccttaattggttggtggaaagaagagatgcttgggaaccttgggttcttaggtttggattctttaataatatctaaaaagctaaattttaaataccagctttacataaatgattgttgactctggtctgtttctgacacctttccagaaaaaagtcaattgttcaggtacaccaaagaggaagaagagctgtggaggccaccctctacaaagctttatagaacttctggatctaactcacaaacaagcttccagaagagactagagaccttaggccaggagatgaaggagttcagtagcaaagtcacacctgtccaattccctgagctttgctcactcagctaatgggatggcaaaggtggtggtgctttcatcttcaggcagaagcctctgcccatccccctcaagggctgcaggcccagttctcatgctgcccttgggtgggcatctgttaacagaggagaacgtctgggtggcggcagcagctttgctctgagtgcctacaaagctaatgcttggtgctagaaacatcatcattattaaacttcagaaaagcagcagccatgttcagtcaggctcatgctgcctcactgcttaagtgcctgcaggagccgcctgccaagctccccttcctacacctggcacactggggtctgcacaaggctttgtcaaccaaagacagcttcccccttttgattgcctgtagactttggagccaagaaacactctgtgtgactctacacacacttcaggtggtttgtgcttcaaagtcattgatgcaacttgaaaggaaacagtttaatggtggaaatgaactaccatttataacttctgtttttttattgagaaaatgattcacgaattccaaatcagattgccaggaagaaataggacgtgacggtactgggccctgtgattctcccagcccttgcagtccgctaggtgagaggaaaagctctttacttccgcccctggcagggacttctgggttatgggagaaaccagagatgggaatgaggaaaatatgaactacagcagaagcccctgggcagctgtgatggagcccctgacattactcttcttgcatctgtcctgccttctttccctctgcgaggcagtggggtgggattcagagtgcttagtctgctcactgggagaagaagagttcctgcgcatgcaagccctgctgtgtggctgtcgtttacatttgggaggtgtcctgtatgtctgtacgttggggactgcctgtatttggaagatttaaaaacctagcatcctgttctcaccctctaagctgcattgagaaatgactcgtctctgtatttgtattaagccttaacacttttcttaagtgcattcggtgccaacattttttagagctgtaccaaaacaaaaagcctgtactcacatcacaatgtcattttgataggagcgttttgttatttttacaaggcagaatggggtgtaacagttgaattaaacttagcaatcacgtgctcagagcttttgcctgtcagttgtgtgtgtcccttatagtcccttcccccacagctcttgctgaaagagtttgccttgttttgttttgttgttttgtatttagccagaggatgccaaaattagtcttctcaaagctttgagtagagtaagtgtgggaataagccagtttttttttttctgtttctgtaacttaaatgaacgggtttttttcccttgtatgccacttgtcctaacatgtccttaaggtgtttaacctgcctctgacctggcttgcaatgcataggtgaggagaagcagagagcttgtcatatgcaagtcctgtcaagaaaacaggtgggcatggtggctcaggtctgtagtctttgggtctttgggaggccagggtgggaggatcacttgagctcaggagtttgagaccagcctagacaacatactacgaccctgtctatacaaaaaaaaacttctctaaattagccggatgtggtggtgcatgcctgtagtcccagctactcgggaggctgagtgaggcaggaggatcacttgagaccaggaggttgtggctgtagtgagtgatgatcatgccactgcacttcagcctggaccacagagcaagaccctgtgtaaaaaaataaaataaaaaacagattggatgtctttcttctga

SEQ ID NO: 238933 - DNA, 627 bp, Artificial Sequence
  derived and/or modified sequence
atgtttcaggtgcctgactccgaggggggacgcgcaggctccagagcaatgaagcctccgggaggggagtctagtaatctctttggatcacctgaggaagctacaccatcgagccgtcccaaccgcatggccagcaacattttcggacctacagaagagcctcagaacatccctaaacggaccaacccccctgggggaaagggatccggaatcttcgacgagtctacacccgttcagacgcgacaacatttaaacccccctggagggaaaacctccgacattttcggaagcccagtgacagccacatcacgccttgcccatccaaacaaaccaacccgcaatagtagagacagggtagccatgttttcttttcctttcgctcagatgagtggcgtgggaagggggctggttctctgtgaaccgggttgctctgcgtcgcctggccgtcacgactcctgtcttgaaacgagagcttttcagatggcgggaagatgcctctgcggagacgaaatgggtcatccttggccctccctgatgtgctcgccagggctacggggaacgggccgtggtgttagagtcgggcgatggggcagagcctggtcacttgatcagcagcccgctagctag

SEQ ID NO: 238934 - DNA, 573 bp, Artificial Sequence
  derived and/or modified sequence
atgttccaggtgcccgacagcgagggcggcagagccggcagcagagccatgaagccccccggcggcgagagcagcaacctgttcggcagccccgaggaggccacccccagcagcagacccaacagaatggccagcaacatcttcggccccaccgaggagccccagaacatccccaagagaaccaacccccccggcggcaagggcagcggcatcttcgacgagagcacccccgtgcagaccagacagcacctgaacccccccggcggcaagaccagcgacatcttcggcagccccgtgaccgccaccagcagactggcccaccccaacaagcccaaggaccacgtgttcctgtgcgagggcgaggagcccaagagcgacctgaaggccgccagaagcatccccgccggcgccgagcccggcgagaagggcagcgccagaaaggccggccccgccaaggagcaggagcccatgcccaccgtggacagccacgagcccagactgggccccagacccagaagccacaacaaggtgctgaacccccccggcggcaagagcagcatcagcttctactag

SEQ ID NO: 238935 - DNA, 1668 bp, Artificial Sequence
  derived and/or modified sequence
atgagactgattggaatgccaaaggagaaatacgatccccctgatccacgcagaatctatacgatcatgagcgccgaggaggtggccaacggtaaaaagagccattgggccgagttggaaatcagcgggagagtgcgatccctctcaacttctctctggagcctcacccatctgacagcattgcacctgaacgataattacctgtccagaattccgccggatatcgcgaaactccacaatctagtctatctggacttgtcttctaacaaactgaggagccttccggctgagctcgggaatatggtgagcctgagagaactgttgctcaacaacaatctcctccgagttctaccctatgagctcggaaggttatttcaactgcagacactgggactgaaaggcaacccattgagccaggacatcctgaacctgtaccaagacccagacgggactcggaagcttctcaattttatgctggacaatctcgcagtgcatcctgagcagttgcccccgcggccatggatcacactgaaggaaagggaccagatcttacctagcgcctcatttaccgtgatgtgctataacgttctctgcgataagtacgctacccggcagctgtacggttactgtccttcctgggccttaaattgggagtaccgtaaaaagggtattatggaggaaatcgtgaactgcgacgccgatataatttccttacaggaggtggagacagagcagtattttaccctcttccttcccgctctgaaggaacgggggtacgacggctttttctcccccaagtcacgggcaaagatcatgagcgaacaggaacggaagcatgtggatggctgcgcgatcttttttaagactgaaaagttcacactcgttcagaaacatactgtcgaattcaaccaagtagcaatggccaacagcgacggctctgaggctatgctgaatagggtaatgacaaaggataacatcggagtcgctgtagtactggaagtccataaagaactatttggagctggcatgaagccgattcatgcagcggataagcagctgctcattgtggctaacgctcatatgcattgggatcctgagtactccgacgtcaaacttatccagactatgatgttcgtttctgaagtgaagaacatattggaaaaggcctctagtcgccccggctcccctaccgccgatcctaacagcattccattggttctctgtgccgatcttaatagccttccggacagcggggtcgtagaatacctctctaacgggggcgtagccgataaccacaaagactttaaagaactgcggtataacgagtgtctgatgaatttcagttgtaacggaaagaatgggtccagtgaggggaggatcacgcacgggttccagttgaagtctgcctatgaaaacaatctgatgccttacaccaattataccttcgatttcaaaggcgtgattgactacatcttctacagcaagacgcacatgaatgtgctcggggttcttgggccactggaccctcaatggttggtggagaataatatcaccggctgcccacaccctcacataccatctgaccatttcagtctgctcacacagttggagctgcaccctccactgctgccattggtaaacggggtgcatctccctaaccgccgctag

SEQ ID NO: 238936 - DNA, 1668 bp, Artificial Sequence
  derived and/or modified sequence
atgcgccttatcggtatgccaaaagagaaatacgaccctccggaccctcgccggatttacactattatgtccgccgaagaagtcgccaatggaaagaagtcccactgggccgagctggaaatcagtggacgcgtgagatccctgagcactagcctatggtcactgacccacttaaccgctctgcatctgaacgataactacctttcaaggattccaccagacattgctaaactccataacttagtttatcttgacctctcgtctaacaaactaagaagtctacctgccgaactcggaaatatggtatctttgagggagttgctacttaacaataatctacttcgggtgcttccttacgagctgggccgactattccagttacagacgctgggacttaaaggaaatccacttagccaggacatattgaatctctaccaggatccagatggcaccagaaaattgctcaacttcatgttagataatttggcagtccaccctgaacagctccctccaagaccttggatcacactgaaagaaagagatcagattctgccatctgcttcatttactgtgatgtgttataacgttctgtgtgacaaatatgcgactcgccagctgtacggttactgcccaagctgggccttgaactgggagtacagaaaaaagggcattatggaggagattgtaaactgtgacgccgacatcatctccctgcaggaggttgagaccgagcagtattttacactcttcttgcctgccctgaaagagagggggtatgatggttttttctcgcccaaaagtagagcaaaaattatgtccgagcaggagagaaaacatgtcgacggctgtgccatcttttttaagacagagaagtttacgcttgtacagaagcacactgtcgaattcaatcaggtcgctatggcaaactccgatggaagtgaagcaatgctgaacagagtcatgacaaaagacaatatcggcgtggccgtggtattggaagtgcacaaagaactgttcggggcgggaatgaagcctatccatgcggcagacaaacagctgctgatagtcgcaaacgcgcacatgcactgggaccctgagtactccgatgtcaagttgatccaaacaatgatgttcgtatctgaagtgaagaacattctggagaaagccagtagtcgacctgggagtccaaccgcggaccccaattctatcccactggtcctctgcgccgacctgaattctcttcctgattcaggggttgtcgaatatctgtcgaacggcggcgttgctgataaccataaagatttcaaagagctccgctacaacgagtgcttaatgaatttctcttgtaatgggaagaacgggagcagcgaagggcgcatcacacatggattccagctgaaaagtgcttatgaaaataatctgatgccctacaccaattacaccttcgacttcaagggcgtgattgattatatcttctacagtaagacacacatgaacgtcctgggcgtactcggtcccttggacccccagtggctggtggagaacaacatcaccgggtgcccacatccacacatccccagcgatcactttagtctcctgacccagctggaacttcacccccctttgctgccattggttaatggcgtccacttgcccaaccgtcgttag

SEQ ID NO: 238937 - DNA, 1668 bp, Artificial Sequence
  derived and/or modified sequence
atgaggctcatcggcatgcccaaggagaagtatgaccccccagacccccggcgcatctacaccatcatgtctgctgaggaggtggccaacgggaagaagagccactgggccgagctggagatcagcggccgggtgcgcagcctgagcaccagcctgtggagcctgacccacctgacagccctgcacctgaatgacaactacctgagccgcatccccccagacatcgccaagctgcacaacctggtgtacctggacctgagcagcaacaagctgcggagcctgcctgctgagctgggcaacatggtgtccctgcgggagctgctgctgaacaacaacctgctgcgggtgctgccctatgagctgggccgcctcttccagctgcagaccctgggcctgaagggcaaccccctgagccaggacatcctgaacctgtaccaggaccctgatggcaccaggaagctgctgaacttcatgctggacaacctggccgtgcaccctgagcagctgcccccccggccctggatcaccctgaaggagcgggaccagatcctgcccagcgccagcttcaccgtgatgtgctacaacgtgctgtgtgacaagtatgccacccggcagctgtatggctactgccccagctgggccctgaactgggagtacaggaagaagggcatcatggaggagatcgtgaactgtgatgctgacatcatcagcctgcaggaggtggagacagagcagtacttcaccctcttcctgcctgccctgaaggagcggggctatgatggcttcttcagccccaagagccgggccaagatcatgtctgagcaggagaggaagcacgtggatggctgtgccatcttcttcaagacagagaagttcaccctggtgcagaagcacacagtggagttcaaccaggtggccatggccaacagtgatggcagcgaggccatgctgaacagagtgatgaccaaggacaacatcggcgtggccgtggtgctggaggtgcacaaggagctgtttggagctggcatgaagcccatccacgccgctgacaagcagctgctgattgtggccaatgcccacatgcactgggaccctgagtacagtgatgtgaagctgatccagaccatgatgtttgtgtctgaggtgaagaacatcctggagaaggccagcagcaggcctggcagccccacagctgaccccaacagcatccccctggtgctgtgtgccgacctgaacagcctgcctgattctggagtggtggagtacctgagcaatggaggagtggccgacaaccacaaggacttcaaggagctgcgctacaatgaatgtctgatgaacttcagctgcaatggcaagaatggcagcagcgagggccgcatcacccacggcttccagctgaagagcgcctatgagaacaacctgatgccctacaccaactacacctttgacttcaagggcgtcatcgactacatcttctacagcaagacccacatgaatgtgctgggcgtgctgggccccctggacccccagtggctggtggagaacaacatcaccggctgcccccacccccacatccccagcgaccacttcagcctgctgacccagctggagctgcacccccccctgctgcccctggtgaatggagtgcacctgcccaacagaagatag

SEQ ID NO: 238938 - DNA, 1668 bp, Artificial Sequence
  derived and/or modified sequence
atgcggctgatcggcatgcccaaggagaagtacgacccccccgaccctcggcgtatatatactattatgtctgctgaggaagtggcaaacgggaagaaaagtcattgggctgaactcgaaattagtggccgcgttcggtcactctcaacctcgctatggtcgttaactcatctgacggccctccacctgaacgacaattatctctctagaatcccccccgacatcgccaaacttcataacctggtatatctcgatctgtcctcaaacaagttaaggtcactgcctgctgagctgggcaatatggtgtccttacgggagttgcttcttaacaacaatctgctgcgggtgctgccatatgaactgggccgtctttttcagctgcaaaccttgggccttaaaggtaatccactgagccaggacatccttaacctgtatcaagatcccgatggtactagaaagttgctgaacttcatgttggacaatctggccgtgcatccagaacaacttccacccaggccttggatcacattgaaagagcgcgaccagattctcccatcagccagttttaccgtcatgtgctataatgtgctgtgcgacaagtatgctactcgtcaactttacggttactgtcccagctgggcattgaactgggagtataggaaaaaagggatcatggaggaaattgtgaactgcgacgccgatataatctccctacaagaagtggaaaccgaacagtattttaccctgttcctgcccgctctcaaagagaggggatacgacggattcttctcccctaagtcaagggcaaaaatcatgtctgagcaagaacgaaagcacgtggatggctgcgcaatttttttcaagactgagaaatttacactggtccagaagcacaccgttgagttcaatcaagtggcgatggccaacagcgacgggtccgaggcaatgcttaatagggtcatgacaaaagacaacattggcgtggccgtggtgctggaggtgcacaaagagttatttggtgcaggcatgaagcccattcatgcagccgataagcagcttctgattgtggccaatgctcacatgcactgggaccctgagtatagcgatgtgaagcttatccagactatgatgttcgtcagcgaagtgaagaacatcctggagaaggcatcaagtcggcctggtagcccaaccgctgaccctaattcaatccccctagttctctgtgcagaccttaattcattgcccgactcaggcgtcgtcgaatacctgagcaacggtggtgtggcggataatcacaaagacttcaaggaactaagatacaacgaatgtctgatgaatttcagctgcaacggcaagaacggctcaagtgagggtcgcatcactcatgggttccagctcaaaagtgcctacgagaacaaccttatgccttatactaactataccttcgacttcaagggagtgatcgactacatcttctacagcaaaactcatatgaacgtcttgggtgtgttgggccccctggatccccagtggctggtggagaacaacattacggggtgtccgcaccctcacataccctcagatcacttcagcctgctgacacaattggagctccatccacctttactccctctcgttaacggcgttcacttaccaaatagacggtag

SEQ ID NO: 238939 - DNA, 1668 bp, Artificial Sequence
  derived and/or modified sequence
atgcggctgatcggcatgcccaaggagaagtacgacccccccgaccctcgtcgcatctataccattatgtccgcggaagaggttgctaacgggaagaagtcccactgggcggaacttgaaattagcgggagagtgcgctccctctcaacttcactgtggtctctcacacacctgactgccttacacttaaacgataattatctgtcacgcatcccccctgatatcgctaagctccacaatctcgtgtatctcgatttgagtagcaacaagctaagaagccttccagctgagttgggcaatatggtaagccttcgggagcttctgctcaacaataacctgctgcgcgtgctcccctatgagctggggagactgttccaattacagaccctcggattgaagggtaacccactgagccaagacattttaaatttatatcaggatcctgacggaactagaaaactgttaaactttatgctggacaatctggctgtacaccccgagcagctgccacctcgaccatggatcacgttaaaggagagggaccaaattttaccatccgccagcttcactgtgatgtgttacaacgtgctatgcgataaatacgcgaccagacaactgtacggatattgccccagctgggcccttaactgggagtaccggaagaaaggcattatggaagagattgtgaattgcgacgcagacatcatttcgctgcaggaagttgagacggaacagtacttcaccttgttcttgcctgccctgaaggagcgcgggtacgatggtttcttctctccaaaatctagagcgaaaattatgtcagagcaggagcggaaacacgtggatgggtgtgccatatttttcaagaccgagaaattcaccctcgttcagaagcacaccgtggagtttaatcaagttgcaatggccaactctgacgggtctgaagccatgctcaatagagtgatgacaaaggataacattggcgttgcagtcgtgctggaggtgcacaaggaacttttcggggccgggatgaaacccatccatgcggccgacaaacaactgctcatcgtggcaaacgcccatatgcactgggacccagagtacagcgatgtgaagctgatacagaccatgatgtttgttagtgaggtgaaaaacatattggagaaggcatcatcacgacccggctctccaaccgctgatcccaactccattcccctggtactttgtgctgacctcaattcactgccagactctggcgtggttgagtatctctctaacggcggggtggctgacaatcataaggacttcaaggaactcagatataacgaatgcctgatgaatttttcttgtaacgggaagaacgggtcctccgaaggacggatcacccacggcttccagctcaagagcgcttacgaaaacaatttgatgccatataccaattacacctttgacttcaagggagtgatcgattacatcttctacagtaaaactcacatgaatgtcctgggcgtattggggcctctagatccccagtggttagttgaaaataacatcaccggctgcccacatccccacattccctctgaccactttagtcttctgacccagctagagctccatccccctcttctgcccctggtcaacggcgtccacttgcccaaccgccgttag

SEQ ID NO: 238940 - DNA, 1668 bp, Artificial Sequence
  derived and/or modified sequence
atgcggctgatcggaatgccgaaagagaagtatgatccgccagaccccagacgaatttatactatcatgagcgcggaagaagtggcaaacgggaaaaagagtcactgggcggaactggaaatcagtggaagagtccggtccctctccacctcgctctggtcactgactcatctgactgcactacacctgaacgataattacctgtctcggattccccctgacattgcgaagttacacaaccttgtctaccttgacctgtcttccaataaattgcgcagcctccccgctgaactcggtaatatggtgagtctgagggaactcttactgaacaataacctgttgcgcgtgttaccctacgagcttggaagactgttccagctgcagacactgggccttaagggaaatccgctgtcacaggacatactaaatctgtatcaggatccggacgggacacgcaagctcctgaattttatgctggataacctggccgtgcaccccgagcagctgccaccacgaccttggattaccttgaaggagcgtgaccagatccttccatctgccagttttaccgtgatgtgttataacgtgttgtgcgataagtacgctacacgacagctgtatggctactgcccttcctgggctctgaattgggaatatcgcaagaagggaattatggaggagatcgttaattgtgatgccgatattattagcctgcaagaagtcgaaacagagcagtacttcacccttttcctccccgcactgaaagagaggggctacgatggcttcttctccccaaagtctagagccaaaatcatgtctgagcaagagaggaagcacgtggacggctgtgcaatttttttcaaaaccgaaaaatttaccctggtccagaagcataccgtggagttcaaccaggtagctatggccaattctgacggttcagaagctatgcttaacagagtgatgaccaaagacaacatcggagtcgccgttgtcttagaggtccacaaagaactgttcggtgccggtatgaagccaatccatgctgcagacaagcagctcttgatagttgcgaacgcacacatgcactgggaccctgaatactcggatgtaaagctgatccagactatgatgttcgtgagtgaggtgaagaatatacttgaaaaagcctctagtagacccggaagccccaccgcggatccaaatagtatcccccttgtgctgtgtgccgacctcaatagcttacccgattccggcgtggtggaatatctcagcaatggcggagtcgccgacaaccacaaggactttaaagaactcaggtataacgaatgtctcatgaatttttcatgcaacggaaagaacggaagctccgaggggagaatcacccacggttttcagctgaagtccgcttacgagaataacctgatgccgtataccaattacaccttcgactttaagggagtgatcgactatatcttctactctaagacccacatgaatgtcctgggagtgttgggcccactggatcctcagtggctggtggaaaataatatcaccgggtgtccccacccacacatcccatcggatcacttcagcctcctgacccagttagagctgcacccccctctgctgcctcttgtgaatggagttcatctgccgaatagacgctag

SEQ ID NO: 238941 - DNA, 1668 bp, Artificial Sequence
  derived and/or modified sequence
atgcgcctgattggaatgcctaaggagaagtatgaccccccagacccccgtcgcatttacactattatgagtgcagaggaagttgccaatggaaaaaaatctcactgggcagaactggaaatcagtggcagggtgagatcgctgagtacgagcctgtggtctctcacacacttaaccgcgctgcaccttaacgataattacctgtctaggataccaccagatatcgctaaactgcataatttggtatatctggacctgtcatccaacaagcttcgaagccttcccgcagagttggggaatatggtttcactgagagagttactgttaaacaataacctcctcagagtcctgccatacgagctgggacggctgttccagttgcaaactctggggctcaagggcaacccactgtcacaggacatcctgaacttatatcaggacccagatggcacccgaaaattactgaatttcatgctagataatctcgccgtccatcctgaacaacttcctcctcgaccgtggatcacgctaaaggagcgggaccagatcttgcccagcgcaagctttactgtcatgtgctacaacgtgctttgcgacaaatacgctacccgccagctgtacggatactgtccctcttgggccctgaattgggaatacagaaaaaagggtatcatggaagaaatcgtgaattgtgacgcagacattatatccttgcaggaggtcgaaaccgagcagtacttcaccctctttctcccagctctgaaagaacgaggatacgatggcttctttagcccaaaatcacgcgctaagatcatgtcggagcaagaaagaaaacacgtggacggatgcgctatcttctttaaaactgaaaagtttacactcgttcagaagcatacggttgagtttaatcaggtcgcgatggctaacagcgatggatctgaagccatgctgaatcgggtgatgaccaaggacaacataggtgtggcggtggtcctcgaggtgcacaaagagctcttcggagctggcatgaagccaatccacgccgctgataagcagctgctgatagtggcaaacgcccatatgcattgggacccagagtacagcgacgttaaactcatccaaacgatgatgtttgtttcagaggtgaaaaatatcctcgaaaaggcaagcagtagacccggatcccctaccgccgacccaaattccattccgttggtcctctgcgctgatcttaattctctgcctgacagtggagtagtcgaatacttgagtaacgggggagtggcagacaatcacaaggattttaaagaacttcggtacaatgagtgcttaatgaactttagttgtaacggcaaaaatggctcaagcgaggggaggatcacacatgggtttcaactgaagtctgcatatgagaacaacctcatgccctacacaaactatacttttgatttcaagggagtaatcgattatatattctactcaaagactcatatgaatgtgctcggtgtgctggggcctttggatccccagtggctcgtggagaataatattacaggttgcccacatccgcatatcccgtcagaccacttttccctcttgactcaattggagctccaccctcctttgctccccttggttaatggagtccacctgccgaataggaggtag

SEQ ID NO: 238942 - DNA, 8794 bp, Artificial Sequence
  derived and/or modified sequence
gcgcgcgcgcgcgcgtgtttgtgtgtgtgtttcccctgccgcggggaaatggctgctgttgcttctgggccagaggaagagaatgagactaatagggatgccaaaggaaaaatatgatcctccagatcctcgcagaatttataccatcatgtcagcagaggaggtagccaatgggaaaaaatctcactgggcagaattagaaatctcgggtagagtgcggagcctaagtacatcactttggtcattgacacacttgacagcgctgcacctaaatgacaattaccttagtcgcattccacctgatattgccaagcttcataatctggtttacctggatctgtcatccaataaactcagaagtttaccagcagaactaggaaacatggtgtctctcagggaattgcttttaaataacaatctgttacgggttttgccttatgaacttggtcggctcttccagctacaaactctaggtttgaaaggcaatcctttatcacaggatattctcaacttataccaggacccagatggaacccgaaagctactgaacttcatgcttgacaatctcgcagttcatccagagcagcttcctccgaggccatggattacattaaaagaacgagaccaaattctgccgtcagcatcattcacggttatgtgttacaatgtgttatgtgataaatacgctacccggcagctatatggctattgcccatcctgggcattaaactgggaatacaggaaaaagggaattatggaagaaattgttaactgtgacgcagatatcattagtcttcaggaagtggaaacagagcaatacttcactctctttctgccagcattgaaggagcgtggatatgatggatttttttctccaaagtcacgtgccaaaatcatgtctgagcaggagagaaagcatgtagatggttgtgcaatattcttcaaaacagaaaaatttacattggtgcagaagcatacagtggaatttaaccaagtggcgatggctaattcagatggatccgaagctatgctgaacagagtgatgacaaaagataacattggtgtcgctgtggtattagaggtccacaaagaactatttggagcaggtatgaagcctattcatgctgcagacaaacagctgcttatagtggcaaatgcccacatgcattgggacccagagtattctgatgtgaagctcatccagaccatgatgtttgtctcagaggttaaaaacattctggagaaagcctctagtaggcctggaagcccaactgcagatcctaattccatcccgctggtgctatgtgcagatcttaactcattgccagattcaggtgttgtggaatacttaagcaatggaggagtagctgacaaccataaagacttcaaggaactaaggtacaatgagtgtcttatgaacttcagctgcaatggaaagaatggaagctcagaagggagaatcacacatggcttccaacttaagagcgcctatgaaaataacttgatgccttacaccaattacacctttgatttcaaaggcgtgattgactacattttctattccaagactcatatgaacgtgcttggtgtcctggggcctttagatcctcaatggctggttgagaacaacatcactgggtgtccacaccctcacatcccttcagaccacttctcactgttaacacaacttgaactccaccctccactcctgcctcttgtcaatggtgttcacttgcctaatcggaggtagtggagtactgccccgccaagacggggatctgttgctatggacctgtacagttgtaaatcaaagtatgtaggagtgaagtatggccatccttaagctgcttcttcaggtttctttcattatgtgtttgctgtaagactttgtacatttttgtgcatattggtatcatttggcagtagggctggaaccaaagtattactctctttacaaaattttaatttaacatgtttttaaattggaccttctttatattgtattaacagccagcattcaaaattgataaattaccaatttgaggcccaataacagtgtatttgtttttccaaaacaaatactttcttttgaatggtttcagtgagccaaccattttataaaaggcaatttttaaaaactataaatacagtattttaaactgaatgatgatatgccttccagggaaaaccttgaatttttcctttataactgacttttggattccaaagtcatttgcacattaacagagtacttaaatttacttgttcagtccataaactatgatatagcctctatacatggtaagaaaatttgaaaaattaaagatggttgcacagtatacttttataatccagcatgtaacaccacatgacaatttgttggccaaatgctggtttggagtttttttgaggaatcactttggtttttttgtcctttatatataaccttattggaagtattaattctaagcctgtctctcaagtttatttatagagaaaaagtaagtaatctgtattgccacataccttgaaaatagaatgtggtatgtttaggatgcccacggaatgaatttttccttattccaattcaaccttctgtctggttgtgccaggaaaacagatgttatatgacctatgtcatttttgccattatagtcaaatgttaaaagaagaaaaaagtctgctgaataaaaaggccttgatcaaagtttcagatggggaaaatcatacagatattttatgtgtttccaacatagattatgtggctgttggtttcttgagatgacagtgcaaaggatttgggagagagaacaaatttggggcagtagttgaaaacgttgggtcattttcctgactctagctgccaaatggccatcatatgcttttaatctttgtttcagttgtctgtcagggttgaattaagaagctactggtttattcccaattgttgatgcctttaggtatgttggaatcttttttttgcctaggaggggccagttgaaaatctgtgactcaagaggcagtgaacagaatactgttttctggggaaaaattggttggctacttgatgttaattatggcacagtaacaggaaaaggttgtgtctgtgtttttaagtttttctttattctgcttttttgctgctataagagttttctgaaatttatattttaaacttttcatgcactttactgtttctagtctcaaaatgtgatatttttaataaacaagaaattttccattatgtgaatgaaattttaaaagacaatagcctatatttgtgtctcactaatatataaagtataggtcaaatttaaattatttaattagttttaaatatacacaatttgtctcctctttcaaacctgacatcttcggctgttttattagtcttaaatgatgcatttactttggtcattttatgctaatttcttccatagtaaattaatcaggctatataaggtaatatttccccagagggtaattttagtgggacgagggtggtgggatgatgtcatatcatacatgggattgcatcagaagggttctgtaaagcctgaactcccttttaaaagtgcctagtgatagaggcgttgtttgtcatctattataattggaatgtcattgtagttcagtgaattttgatgtaaataaaatatcttttaaaaatgttaaagtaccaggataaacaaacaaaaagaaacaacccttaagatgacagattttcctcaacatgcaggtttcccttcttatatacctcaagtatccaacatctagccatgcaaattgattacctgaagcatagtactggaaagtagaatagcatgaaaaacttaattttgtggacattacctttttttgtaatcagctactgtatgttttattttagatcttttgttttgggtgggttttctgctctggaggtatatgcactaacaaaacattttcctcctttcatatacgcatgttaattagcaatgtgagcaatatttcctaccatacttcactcccaatattttttgagatgtttgtataaaatggaatttaaagttcacttatgattgtatatgaaccacagaggagcccatttattaataaaaaacttttttaatagttaaatgtagagggaaaaaataaaaaaaaatgggaaacattgtaaacagcttaagtttattttgtgtatgatcgaggcactctgttgcaggaaggtgtgtaattgggttctctctgcttcaaatgcgctctttcaaaccattcattatcctgtgtatttttaatgtggttttagtaaatgttggtagtagctctgttgaagtaggtaattgtgttatgttttgggtggtacacacttggggcatggtaacccaaatttcatgtgcacggtttccctttagcccactgcccaaatttcacatacccttcaccctttgttccctttgtaaaaggagtggtatctgttttgagctgccaattcagatgatcagaaatgctgctttcctcagcattgtcttgttaaaccgcatgccatttggaactttggcagtgagaagccaaaaggaagaggtgaatgacatatatatatatatattcaatgaaagtaaaatatatatgctcatatactttctagttatcagaatgagttaagctttatgccattgggctgctgcatattttaatcagaagataaaagaaaatctgggcatttttagaatgtgatacatgtttttttaaaactgttaaatattatttcgatatttgtctaagaaccggaatgttcttaaaatttactaaaacagtattgtttgaggaagagaaaactgtactgtttgccattattacagtcatacaagtgcatgtcaagtcacccactctctcaggcatcagtatccacctcatagctttacacattttgatggggaatattgcagcatcctcaggcctgacatctgggaaaggctcagatccacctactgctccttgctcgttgattttgttttaaaatattgtgcctggtgtcaacttttaagcaacagcactgcctaaaagcaagcagagaacagaatcccagcaccattctataggcaactttttagaattcagatatagtaaatctgttccagatttatgatgttttatgtaaaaaaaattttgtataataacatagctgaatatttttgtttcatttctttgatgtaaggcgtgtgaacattcgtttgaatatcacatgttgaagtcaggtatggcacaatgggttctgagaccagcttttcctcccctcccatttgccttgttccaagctctttcttttcaaattacttttctgatattcataggcaggtatttaattttactaattagcatcctgtgtgaatgtattaaagaagccactgtgttttagtgtagttggcaaaaatataaaagctgtttcttatttgcccctatttttttggtgtcttaaagttatatattaaatcacagagaagcaagggagaaagttgaaagatatctaaggctcatatcacttgattctatggtagattatattagaattgaggatgtggcacattaaaactggaacatgggcaaatatagtgttccattttaaaattctaagtttatattgttaaatgggtgaaaatttaagtttatatttgcatttccaagcgtttctaaaaatcactaatgccatctatacttttagtatgaaacagcagactatagaaagcacagggaagaataggctaaatacattctttgaagaaccagaggcatataaccacatcattatgtcattcctaatacatggctagattttctaatgataaaattgactgtgtcccaatgcttatttgattctaagcttttttattctgtttctgagatattttaatagctttgcaaaatatgctgaccagtttttggaaaataatggtttttatagcaagcaaagactttatggcacattttcaaaatagcactcatacatacttacattttgacagaaatgtgaattctcacattgatgagatattctttttcccacctgccctaccctttaaaaaaggtcacttttctaatgtgtagtagattcatttacgcctttccctttgagtcataccatgtttggagaactgtgtgaattgtaggtagagaaattaactagggaagccagaagcttgaactaaagttttaaatttgtaggcagatgagaacttttatactatggttgctttgggcgattctaattttgtaatagcatcatgatcaccaaaattaattcaaacattttagtacatctttaatctgtcttatttaccaaagttctaatctgtttaagaacaggatgccaagagcatctttcattttatagaatgatatgctcacctttataagtgtcacctaaaagcttgagggtaaaaaagaagcagcccatatatctaaactacaggatgtcttgaacaagattcacagaaagaaagaaaaaaaagcagttctttccaggaaggtggtaaggaagagcatgcatatttcttgttttaaccaaataccttttttatgtaaatgtctctattaaaccccaggtcctacaccaggaaatagggtgataaccaggaaaataccaagctttaacccagttggcagttccttgtggcatacatttggttagacttgggtttttcctggaaccaaaggaaaataagcatgttgagttcttcgttcaacagacatgacattgaagtaatagaatattttttaagtaaaatagttttcactttcaaagcctatgacataaggacatttgtgcttattaattgttaatttttttttatggtacattgtataaactgagtagcattgaactgcattttagaagtatgtcatcagaaacaaatcacattatggaaaggatatacaaatgccaagtgatatgactcttttggcatggtggtagcatggtccattcagctttcagaatctttcggaggctctagtttggtgcctagtactagttatttttgttagaacaatctctcaaaatttagataattttccagttgtatgtctgtcacttttaactctaaagcgtaagaatcatggtaaccctctcagaagtggtcctttcttgctcatttcagtttcgtattaacttcaaatcactgatgtattgtctttcaagctatcaattgttatatgtaccaatttaatttagtttgtagttatctgaagtcacaaaattggttcagcattgatgtcaaacaatggctttgcttcttaccaaacagacttagtatcctgctgcttgtttcaatcttgatgcagtaagtgatgcagtatctgggtctgtatttacttagaaactgtactgtcctttctctgtgcttaacttgctaaaaatatattcccttacctgtgaaattcctgagcggtgctctgccaacttttcaaggggagggatttggatggctgtgttactgcacactggatctggaattgttcagggttatgagtgacaaatttcttaaacaccagcagcactgagatgtgcactatgggcattcgtacagttgttgtccaaatgcaaacaactttttcatcttggagaagctgagatacagagttcaatagaactacttggaatattttgagaaggttgaatgtttcatctttggctttgttgtctctggagtggggaagtatggagggctttttttttttttttttttttttttttttttttttttaaagagagtgtgtatgtactttttctctctataagggccagggtgttggtcaaattcaccatcgattaatttatatcttctgttgtgatttttttcaactatataacaagtgccaactaattgtccatgggacaatctacttttccactcaatttatcgttttgagtagggaaaggttcatttattttcattacctggcattaagttaaagaattcattattttgcatacatttgagtcattctgtgacctataaagtgtttttgtaactatctaattctaatggttgcaaagcaaagcacatgactgtaaaaccaagcaaggtgttttagtaactttttccctgaatacttggtagtttccattgatactattccaaaacaaattctgctgttttaggttgtatatttactttgcttttgttctaagaaaaagccaaggactaaatcaacttgtttttgtgtttcagtaatcagtttaaaatctaagatttttttttaaattagactatttaatgaagtgccatgtaattgtagcttgctagtgtttaatgtttaatagactggttctgtaggtgttttaaccatttaacactctctgccatccctggagaaagtggttctactcttactgaacacattctctctgacaaaatcaccagctgctttatttttctatttattacagttaaacagttgatgaggtctgaatcttgaccaaaactgctcagctgagatgtttttcacaatagacactgtacaaagtgtgcgtgcaaaaggacacggttggtagtattttttcattaatgtgaacattgactaaaaaaaagcagtcctgccttttaaatcttgtggcagctcagaagggaggtgcttaagaaccttaactactatgtcagataacaaaatatttttttccattttggagattggttactgctcacacatgatgtatagggctaaatatatgcttgtttccttgcacctgtgtacttcccctctctccctccctttccttcccctgtaggcaataaatggccattttgcaactgca

SEQ ID NO: 238943 - DNA, 1668 bp, Artificial Sequence
  derived and/or modified sequence
atgagactgatcggcatgcccaaggagaagtacgacccccccgaccccagaagaatctacaccatcatgagcgccgaggaggtggccaacggcaagaagagccactgggccgagctggagatcagcggcagagtgagaagcctgagcaccagcctgtggagcctgacccacctgaccgccctgcacctgaacgacaactacctgagcagaatcccccccgacatcgccaagctgcacaacctggtgtacctggacctgagcagcaacaagctgagaagcctgcccgccgagctgggcaacatggtgagcctgagagagctgctgctgaacaacaacctgctgagagtgctgccctacgagctgggcagactgttccagctgcagaccctgggcctgaagggcaaccccctgagccaggacatcctgaacctgtaccaggaccccgacggcaccagaaagctgctgaacttcatgctggacaacctggccgtgcaccccgagcagctgccccccagaccctggatcaccctgaaggagagagaccagatcctgcccagcgccagcttcaccgtgatgtgctacaacgtgctgtgcgacaagtacgccaccagacagctgtacggctactgccccagctgggccctgaactgggagtacagaaagaagggcatcatggaggagatcgtgaactgcgacgccgacatcatcagcctgcaggaggtggagaccgagcagtacttcaccctgttcctgcccgccctgaaggagagaggctacgacggcttcttcagccccaagagcagagccaagatcatgagcgagcaggagagaaagcacgtggacggctgcgccatcttcttcaagaccgagaagttcaccctggtgcagaagcacaccgtggagttcaaccaggtggccatggccaacagcgacggcagcgaggccatgctgaacagagtgatgaccaaggacaacatcggcgtggccgtggtgctggaggtgcacaaggagctgttcggcgccggcatgaagcccatccacgccgccgacaagcagctgctgatcgtggccaacgcccacatgcactgggaccccgagtacagcgacgtgaagctgatccagaccatgatgttcgtgagcgaggtgaagaacatcctggagaaggccagcagcagacccggcagccccaccgccgaccccaacagcatccccctggtgctgtgcgccgacctgaacagcctgcccgacagcggcgtggtggagtacctgagcaacggcggcgtggccgacaaccacaaggacttcaaggagctgagatacaacgagtgcctgatgaacttcagctgcaacggcaagaacggcagcagcgagggcagaatcacccacggcttccagctgaagagcgcctacgagaacaacctgatgccctacaccaactacaccttcgacttcaagggcgtgatcgactacatcttctacagcaagacccacatgaacgtgctgggcgtgctgggccccctggacccccagtggctggtggagaacaacatcaccggctgcccccacccccacatccccagcgaccacttcagcctgctgacccagctggagctgcacccccccctgctgcccctggtgaacggcgtgcacctgcccaacagaagatag

SEQ ID NO: 238944 - protein, 569 aa, Artificial Sequence
  derived and/or modified sequence
MATEGGGKEMNEIKTQFTTREGLYKLLPHSEYSRPNRVPFNSQGSNPVRVSFVNLNDQSGNGDRLCFNVGRELYFYIYKGVRKAADLSKPIDKRIYKGTQPTCHDFNHLTATAESVSLLVGFSAGQVQLIDPIKKETSKLFNEERLIDKSRVTCVKWVPGSESLFLVAHSSGNMYLYNVEHTCGTTAPHYQLLKQGESFAVHTCKSKSTRNPLLKWTVGEGALNEFAFSPDGKFLACVSQDGFLRVFNFDSVELHGTMKSYFGGLLCVCWSPDGKYIVTGGEDDLVTVWSFVDCRVIARGHGHKSWVSVVAFDPYTTSVEEGDPMEFSGSDEDFQDLLHFGRDRANSTQSRLSKRNSTDSRPVSVTYRFGSVGQDTQLCLWDLTEDILFPHQPLSRARTHTNVMNATSPPAGSNGNSVTTPGNSVPPPLPRSNSLPHSAVSNAGSKSSVMDGAIASGVSKFATLSLHDRKERHHEKDHKRNHSMGHISSKSSDKLNLVTKTKTDPAKTLGTPLCPRMEDVPLLEPLICKKIAHERLTVLIFLEDCIVTACQEGFICTWGRPGKVVSFNP

SEQ ID NO: 238945 - DNA, 1710 bp, Artificial Sequence
  derived and/or modified sequence
atggccaccgagggcggcggcaaggagatgaacgagatcaagacccagttcaccaccagagagggcctgtacaagctgctgccccacagcgagtacagcagacccaacagagtgcccttcaacagccagggcagcaaccccgtgagagtgagcttcgtgaacctgaacgaccagagcggcaacggcgacagactgtgcttcaacgtgggcagagagctgtacttctacatctacaagggcgtgagaaaggccgccgacctgagcaagcccatcgacaagagaatctacaagggcacccagcccacctgccacgacttcaaccacctgaccgccaccgccgagagcgtgagcctgctggtgggcttcagcgccggccaggtgcagctgatcgaccccatcaagaaggagaccagcaagctgttcaacgaggagagactgatcgacaagagcagagtgacctgcgtgaagtgggtgcccggcagcgagagcctgttcctggtggcccacagcagcggcaacatgtacctgtacaacgtggagcacacctgcggcaccaccgccccccactaccagctgctgaagcagggcgagagcttcgccgtgcacacctgcaagagcaagagcaccagaaaccccctgctgaagtggaccgtgggcgagggcgccctgaacgagttcgccttcagccccgacggcaagttcctggcctgcgtgagccaggacggcttcctgagagtgttcaacttcgacagcgtggagctgcacggcaccatgaagagctacttcggcggcctgctgtgcgtgtgctggagccccgacggcaagtacatcgtgaccggcggcgaggacgacctggtgaccgtgtggagcttcgtggactgcagagtgatcgccagaggccacggccacaagagctgggtgagcgtggtggccttcgacccctacaccaccagcgtggaggagggcgaccccatggagttcagcggcagcgacgaggacttccaggacctgctgcacttcggcagagacagagccaacagcacccagagcagactgagcaagagaaacagcaccgacagcagacccgtgagcgtgacctacagattcggcagcgtgggccaggacacccagctgtgcctgtgggacctgaccgaggacatcctgttcccccaccagcccctgagcagagccagaacccacaccaacgtgatgaacgccaccagcccccccgccggcagcaacggcaacagcgtgaccacccccggcaacagcgtgcccccccccctgcccagaagcaacagcctgccccacagcgccgtgagcaacgccggcagcaagagcagcgtgatggacggcgccatcgccagcggcgtgagcaagttcgccaccctgagcctgcacgacagaaaggagagacaccacgagaaggaccacaagagaaaccacagcatgggccacatcagcagcaagagcagcgacaagctgaacctggtgaccaagaccaagaccgaccccgccaagaccctgggcacccccctgtgccccagaatggaggacgtgcccctgctggagcccctgatctgcaagaagatcgcccacgagagactgaccgtgctgatcttcctggaggactgcatcgtgaccgcctgccaggagggcttcatctgcacctggggcagacccggcaaggtggtgagcttcaacccctag

SEQ ID NO: 238946 - DNA, 1710 bp, Artificial Sequence
  derived and/or modified sequence
atggctacagagggcggtggaaaggaaatgaatgaaatcaagactcagttcaccacgcgtgaaggactatataagctgctcccccactctgaatactcacgcccaaaccgagtgccctttaacagtcagggctcaaacccagtccgggtctctttcgtcaatctgaatgaccaatctggcaatggggataggttgtgtttcaacgtaggtagagagctttatttctacatttacaagggagtgcgcaaggctgccgacctctcaaagccaatcgataagcggatttacaagggcacacagccaacctgccacgacttcaaccatttgactgcgaccgctgaatctgtgagtctgctggtggggtttagcgcaggacaggtgcaattgatagaccccataaaaaaagagactagcaagctatttaacgaggagcgcctcattgataagagccgagttacctgcgtcaaatgggttcccgggagcgagtcccttttcctggtagcccattcctcaggcaacatgtacctgtacaacgtagagcacacatgtggaaccaccgcgcctcattaccagctgctgaagcaaggcgaaagcttcgccgtccacacgtgcaagagtaagtccaccagaaatcctctcttgaagtggaccgtgggcgaaggcgccttaaacgaattcgccttttcccccgatggaaaattcctggcatgcgttagtcaggatgggttcctgagggtgtttaattttgattctgtcgaactgcacggaaccatgaagagctatttcgggggcttgctgtgcgtgtgttggagcccggatggcaaatacatcgtgaccgggggagaagacgatctggttactgtttggtcattcgtggactgtcgcgttattgcccgcgggcacgggcacaaatcgtgggtgagtgtagtggctttcgacccctataccacaagtgtggaggagggggacccaatggagttcagcggtagtgatgaggacttccaggatctgctgcacttcgggcgcgatagggcaaatagcacccagagtaggctctccaaacgaaattctacagattctaggcccgtgagtgtcacctaccggttcgggtccgtggggcaggacacacagctatgtctctgggatctcacggaggacattcttttcccccaccaaccactgagtcgggcaaggactcatacaaacgttatgaacgccacttctccacccgccggtagtaacgggaattccgtgaccacacccggcaactctgtaccacctccactgcccaggtctaattcgttgccacactccgctgtgtccaacgccggctccaagagttcagtaatggatggggccatcgcatctggagtgtctaagttcgccactctatccctgcacgatcgcaaagaaaggcatcatgagaaagatcataaacgcaatcatagcatggggcacattagtagtaagtctagcgataaactaaatctggtgactaagaccaaaactgatcccgctaagactctgggtacccccctttgcccgaggatggaagacgtcccactcctggagcctctgatctgtaaaaagattgcgcatgaacgcctgaccgtgttgatatttctcgaggattgcattgttactgcttgccaggaagggttcatctgcacctggggcaggcctggcaaggttgtgtcctttaacccctag

SEQ ID NO: 238947 - DNA, 1710 bp, Artificial Sequence
  derived and/or modified sequence
atggccacagaaggaggcggcaaggagatgaatgagatcaagacccagttcaccacccgggagggcctgtacaagctgctgccccacagcgagtacagccggcccaacagagtgcccttcaacagccagggcagcaaccctgtgcgggtgtcctttgtgaacctgaatgaccagagcggaaatggagaccggctgtgcttcaacgtgggccgggagctgtacttctacatctacaagggcgtgaggaaggctgctgacctgagcaagcccatcgacaagaggatctacaagggcacccagcccacctgccacgacttcaaccacctgacagccacagctgagagcgtgtccctgctggtgggcttctctgctggccaggtgcagctgattgaccccatcaagaaggagaccagcaagctgttcaatgaggagcggctgattgacaagagccgggtgacctgtgtgaagtgggtgcccggcagcgagagcctcttcctggtggcccacagcagcggcaacatgtacctgtacaacgtggagcacacctgtggcaccacagccccccactaccagctgctgaagcagggcgagagctttgctgtgcacacctgcaagagcaagagcaccaggaaccccctgctgaagtggacagtgggggagggcgccctgaatgaatttgccttctccccagatggcaagttcctggcctgtgtgtcccaggacggcttcctgcgggtcttcaactttgattctgtggagctgcacggcaccatgaagagctactttggaggcctgctgtgtgtgtgctggagcccagatggcaagtacatcgtgactggaggagaagatgacctggtgacagtgtggagctttgtggactgccgggtgattgcccggggccacggccacaagtcctgggtgtctgtggtggcctttgacccctacaccacctctgtggaggagggggaccccatggagttcagcggcagtgatgaggacttccaggacctgctgcacttcggccgggaccgggccaacagcacccagagccggctgagcaagaggaacagcacagacagcaggcctgtgtctgtgacctacagatttggatctgtgggccaggacacccagctgtgcctgtgggacctgacagaggacatcctcttcccccaccagcccctgagccgggcccggacccacaccaacgtgatgaatgccaccagccccccagctggcagcaatggaaattctgtgaccaccccaggcaacagcgtgcccccacccctgcccaggagcaacagcctgccccacagcgctgtgtccaatgccggcagcaagagctctgtgatggatggagccatcgccagcggcgtgtccaagtttgccaccctgagcctgcatgacaggaaggagcggcaccacgagaaggaccacaagaggaaccacagcatgggccacatcagcagcaagagcagtgacaagctgaacctggtgaccaagaccaagacagatcctgccaagaccctgggcacccccctgtgccccaggatggaggatgtgcccctgctggagcccctcatctgcaagaagatcgcccacgagcggctgactgtgctgatcttcctggaggactgcatcgtgacagcctgccaggagggcttcatctgcacctggggccggcctgggaaggtggtgtccttcaacccctag

SEQ ID NO: 238948 - DNA, 1710 bp, Artificial Sequence
  derived and/or modified sequence
atggccaccgagggcggcggcaaggagatgaacgagatcaagacccagtttacgacgcgggaagggctctataagcttctccctcattctgagtattccagaccaaacagggtcccttttaatagccaggggtcaaaccctgtgcgtgtgtcctttgttaacttgaatgaccaatccggaaacggagaccggttgtgtttcaatgttggaagggagctgtacttctatatctataagggcgtgaggaaggccgctgacctgagcaagcctattgataagaggatctacaaaggtacgcagccaacatgtcacgacttcaaccatttgacagctaccgccgaaagtgtatccctgttggtgggttttagcgccgggcaggtgcagttgattgatccaattaaaaaagaaaccagcaagctttttaacgaagagcgattgattgacaaatctcgcgtgacatgcgttaaatgggtccccgggagcgagtcacttttcctagtcgctcactcgagcggaaacatgtacctgtacaacgtcgagcacacctgcggcactacggcccctcactatcaacttttgaagcagggtgagtcatttgccgttcacacttgcaagtccaagtcaacgcgcaatccacttctgaagtggaccgtgggcgagggagcccttaatgaattcgccttcagtcccgatggtaagtttctggcatgtgtctcacaggatgggtttctccgggtgttcaatttcgactcagtggaactccatggtacaatgaaatcctactttggaggactgttgtgtgtgtgctggtcaccggatggaaagtatatcgtcaccggcggcgaggatgatctggtaaccgtgtggagttttgttgactgtcgggtgattgcgaggggccatgggcacaagtcttgggtcagcgtagtagcttttgatccatataccacttcagttgaggagggcgacccaatggaatttagtggcagtgatgaagacttccaggatctgctccacttcggtcgggaccgggctaattctacccagtctagactctctaagaggaactctacagacagccggccagtctcagtgacttacaggttcggatccgtgggccaggatacccagctctgcctatgggacttaactgaagatatcttgtttccacaccagcccctgtccagggcccggactcacaccaatgtcatgaatgcaacatccccaccggccggttctaatggaaacagcgtgactacccccggaaacagcgtgccgccacccctcccaagatcaaattcactgccccattctgctgtgagcaatgcaggttctaaaagctccgttatggacggagccatcgcctctggcgtgtccaagttcgccactctgagcctccacgaccgcaaagagcgacaccacgagaaggatcataaaaggaaccactctatgggtcacatatctagcaagagctcagataaacttaatctggtgacgaagacgaagacggacccggcaaagacattaggaacacctctctgtcccagaatggaggacgttcccctcctggagcctttaatctgtaaaaaaattgcacacgagcgcctgaccgtacttatcttcctggaggactgcatcgtcactgcgtgccaagagggctttatttgcacctggggacgtcctggcaaagtcgtgagctttaacccttag

SEQ ID NO: 238949 - DNA, 1710 bp, Artificial Sequence
  derived and/or modified sequence
atggccaccgagggcggagggaaggaaatgaatgaaatcaaaacacaattcacaactcgcgagggactgtataagttactccctcacagcgaatacagtagacccaatcgagtgccttttaactcccagggctcgaatcccgtgcgggttagctttgtcaacctgaacgaccagtcagggaatggcgacagattgtgttttaatgtggggagggagctttacttttatatctataaaggggttaggaaagccgctgatctgtctaaacccatagataagcgcatctataagggcacacagccaacatgtcatgacttcaaccatctcaccgcaactgccgagagtgtgtccctcctggtgggattctcagccggacaggtgcagctcattgatccaatcaagaaagagactagtaaactgtttaacgaggaaagattgatcgataagtccagggtgacgtgcgtaaaatgggttcctggcagcgaaagccttttccttgtcgctcattcttctggcaatatgtacctctataatgtggagcacacctgtgggacaactgcaccgcactaccagcttttaaaacagggggagtcttttgctgtgcacacatgtaagagcaaaagcacacgcaaccctctgctaaaatggaccgtcggtgagggcgctctgaatgagttcgcctttagccccgatggcaagttcctggcatgtgtctcacaggatggatttctccgggtgtttaacttcgacagcgtcgagttgcacgggaccatgaaaagctactttggaggtctcctatgtgtgtgttggtcgccagatggaaagtacattgtgactgggggagaggacgacttggttacggtgtggtccttcgtggattgtagagtgatcgctaggggccacggacacaaaagttgggtgtccgttgtagctttcgacccctatacaacttcggtcgaagaaggcgaccctatggagttttctggttctgatgaggactttcaggacttgttacatttcggtcgagatcgcgcaaatagcactcagagtagactgagtaaacggaatagtacagatagtcgccctgtgagcgtaacatacagattcggttctgtgggacaagacacacagttgtgcctctgggatctcaccgaagacatcctgttcccgcaccagcctctgtcacgggctcgaacccatactaatgtgatgaacgccacctctccaccggcaggttctaacgggaactccgtgacaacccccggaaatagtgtgcccccaccactgcccaggtccaactctctccctcacagtgctgtgtcaaatgctggcagtaagagctctgtaatggacggggctattgcctcaggcgtgtcaaagttcgccaccctgtccctacacgatcgcaaagagcgacatcatgaaaaagaccataagcgcaatcactctatgggccacatctctagcaaatcttctgacaagctgaatctggtcactaagacaaaaactgatccggctaaaactctaggcactcccctttgccctcgtatggaagatgtccctctgctggaacctctgatttgcaagaaaattgcgcacgagcggctgaccgttttaattttcttagaggactgtattgtcacagcatgccaagagggctttatatgtacctggggtcggcctggaaaggtggtgagttttaacccatag

SEQ ID NO: 238950 - DNA, 2391 bp, Artificial Sequence
  derived and/or modified sequence
acttagggcaggatgaacgctgctttccaagatggcgacggagggaggagggaaggagatgaacgagattaagacccaattcaccacccgggaaggtctgtacaagctgctgccgcactcggagtacagccggcccaaccgggtgcccttcaactcgcagggatccaaccctgtccgcgtctccttcgtaaacctcaacgaccagtctggcaacggcgaccgcctctgcttcaatgtgggccgggagctgtacttctatatctacaagggggtccgcaaggctgctgacttgagtaaaccaatagataaaaggatatacaaaggaacacagcctacttgtcatgacttcaaccacctaacagccacagcagaaagtgtctctctcctagtgggcttttccgcaggccaagtccagcttatagacccaatcaaaaaagaaactagcaaactttttaatgaggaaagactaatagacaagtcacgagttacctgtgtcaaatgggttcccggttcggaaagccttttcctagtagcccactcgagtgggaacatgtacttatataatgtggagcacacttgtggcaccacagccccccactaccagcttctgaagcagggagagagctttgccgtgcacacttgcaagagcaaatccacgaggaaccctctccttaagtggacggtgggcgagggggccctcaacgagtttgctttctccccagatggcaagttcttagcgtgcgtgagccaggacgggtttctgcgggtgttcaactttgactcagtggagctgcacggtacgatgaaaagctactttgggggcttgctgtgtgtgtgctggagcccggatggcaagtacatcgtgacaggtggggaggacgacttggtgacagtctggtcctttgtagactgccgagtaatagccagaggccacgggcacaagtcctgggtcagtgttgtagcgtttgacccttataccactagtgtagaagaaggtgaccctatggagtttagtggcagcgatgaggacttccaagaccttcttcattttggcagagatcgagcaaatagtacacagtccaggctctccaaacggaactctacagacagccgccccgtaagtgtcacgtatcggtttggttccgtgggccaggacacacagctctgtttatgggaccttacagaagatatccttttccctcaccaacccctctcaagagcaaggacacacacaaatgtcatgaatgccacgagtcctcctgctggaagcaatgggaacagtgttacaacacccgggaactctgtgccgcctcctctgccacggtccaacagccttccacattcagcagtctcaaatgctggcagcaaaagcagtgtcatggacggggccattgcttctggggtcagcaaatttgcaacactttcactacatgaccggaaggagaggcaccacgagaaagatcacaagcgaaatcatagcatgggacacatttctagcaagagcagtgacaaactgaatctagttaccaaaaccaaaacggaccctgctaaaactctgggaacgcccctgtgtcctcgaatggaagatgttcccttgttagagccgctgatatgtaaaaagatagcacatgagagactgactgtactaatatttcttgaagactgtatagtcactgcttgtcaggagggatttatttgcacatggggaaggcctggtaaagtggtaagttttaatccttaatgctgcaccagatctagaacttgaataggtagtgacttttttctttttcgtgggaggggtggggtgtacaatgaatgtgaatgacacttcttattcttaatgtaaatctcaatgcatcagagccataattttggatactgcatgccatgtaattctgaatcatttgataatttaccttagagcatttaaaaaaatataatcaaactaattgccagccaagtcagtcatcctcctgggagtatatagagtcccaaggttagcgctcctgtattagactatttcaattttaggaaaatcatgaccatgtggggaaacaatgactttaaaatgctgaaattaaaatttatgctttaactggaatattttttgcttaactactcaattagaatattgtacacctgatcaatgtgtgttcagcacagatggccatgaattgtcatttatagtccaattttttatcttaatcataaaatgtttaggaatctatgaaatttaactttaggaacaaaacgtttagcagggttgattgatattatttttacattgttctggcaatccacagaaagagaagagccttaatttttaaaacccattttagtcattttatgacaattaaagttgtttaataaacatcttttttcaaagaagca

SEQ ID NO: 238951 - protein, 669 aa, Artificial Sequence
  derived and/or modified sequence
MAYYQEPSVETSIIKFKDQDFTTLRDHCLSMGRTFKDETFPAADSSIGQKLLQEKRLSNVIWKRPQDLPGGPPHFILDDISRFDIQQGGAADCWFLAALGSLTQNPQYRQKILMVQSFSHQYAGIFRFRFWQCGQWVEVVIDDRLPVQGDKCLFVRPRHQNQEFWPCLLEKAYAKLLGSYSDLHYGFLEDALVDLTGGVITNIHLHSSPVDLVKAVKTATKAGSLITCATPSGPTDTAQAMENGLVSLHAYTVTGAEQIQYRRGWEEIISLWNPWGWGEAEWRGRWSDGSQEWEETCDPRKSQLHKKREDGEFWMSCQDFQQKFIAMFICSEIPITLDHGNTLHEGWSQIMFRKQVILGNTAGGPRNDAQFNFSVQEPMEGTNVVVCVTVAVTPSNLKAEDAKFPLDFQVILAGSQRFREKFPPVFFSSFRNTVQSSNNKFRRNFTMTYHLSPGNYVVVAQTRRKSAEFLLRIFLKMPDSDRHLSSHFNLRMKGSPSEHGSQQSIFNRYAQQRLDIDATQLQGLLNQELLTGPPGDMFSLDECRSLVALMELKVNGRLDQEEFARLWKRLVHYQHVFQKVQTSPGVLLSSDLWKAIENTDFLRGIFISRELLHLVTLRYSDSVGRVSFPSLVCFLMRLEAMAKTFRNLSKDGKGLYLTEMEWMSLVMYN

SEQ ID NO: 238952 - protein, 669 aa, Artificial Sequence
  derived and/or modified sequence
MAYYQEPSVETSIIKFKDQDFTTLRDHCLSMGRTFKDETFPAADSSIGQKLLQEKRLSNVIWKRPQDLPGGPPHFILDDISRFDIQQGGAADCWFLAALGSLTQNPQYRQKILMVQSFSHQYAGIFRFRFWQCGQWVEVVIDDRLPVQGDKCLFVRPRHQNQEFWPCLLEKAYAKLLGSYSDLHYGFLEDALVDLTGGVITNIHLHSSPVDLVKAVKTATKAGSLITCATPSGPTDTAQAMENGLVSLHAYTVTGAEQIQYRRGWEEIISLWNPWGWGEAEWRGRWSDGSQEWEETCDPRKSQLHKKREDGEFWMSCQDFQQKFIAMFICSEIPITLDHGNTLHEGWSQIMFRKQVILGNTAGGPRNDAQFNFSVQEPMEGTNVVVCVTVAVTPSNLKAEDAKFPLDFQVILTSVQRFREKFPPVFFSSFRNTVQSSNNKFRRNFTMTYHLSPGNYVVVAQTRRKSAEFLLRIFLKMPDSDRHLSSHFNLRMKGSPSEHGSQQSIFNRYAQQRLDIDATQLQGLLNQELLTGPPGDMFSLDECRSLVALMELKVNGRLDQEEFARLWKRLVHYQHVFQKVQTSPGVLLSSDLWKAIENTDFLRGIFISRELLHLVTLRYSDSVGRVSFPSLVCFLMRLEAMAKTFRNLSKDGKGLYLTEMEWMSLVMYN

SEQ ID NO: 238953 - DNA, 2010 bp, Artificial Sequence
  derived and/or modified sequence
atggcctactaccaggagcccagcgtggagaccagcatcatcaagttcaaggaccaggacttcaccaccctgagagaccactgcctgagcatgggcagaaccttcaaggacgagaccttccccgccgccgacagcagcatcggccagaagctgctgcaggagaagagactgagcaacgtgatctggaagagaccccaggacctgcccggcggccccccccacttcatcctggacgacatcagcagattcgacatccagcagggcggcgccgccgactgctggttcctggccgccctgggcagcctgacccagaacccccagtacagacagaagatcctgatggtgcagagcttcagccaccagtacgccggcatcttcagattcagattctggcagtgcggccagtgggtggaggtggtgatcgacgacagactgcccgtgcagggcgacaagtgcctgttcgtgagacccagacaccagaaccaggagttctggccctgcctgctggagaaggcctacgccaagctgctgggcagctacagcgacctgcactacggcttcctggaggacgccctggtggacctgaccggcggcgtgatcaccaacatccacctgcacagcagccccgtggacctggtgaaggccgtgaagaccgccaccaaggccggcagcctgatcacctgcgccacccccagcggccccaccgacaccgcccaggccatggagaacggcctggtgagcctgcacgcctacaccgtgaccggcgccgagcagatccagtacagaagaggctgggaggagatcatcagcctgtggaacccctggggctggggcgaggccgagtggagaggcagatggagcgacggcagccaggagtgggaggagacctgcgaccccagaaagagccagctgcacaagaagagagaggacggcgagttctggatgagctgccaggacttccagcagaagttcatcgccatgttcatctgcagcgagatccccatcaccctggaccacggcaacaccctgcacgagggctggagccagatcatgttcagaaagcaggtgatcctgggcaacaccgccggcggccccagaaacgacgcccagttcaacttcagcgtgcaggagcccatggagggcaccaacgtggtggtgtgcgtgaccgtggccgtgacccccagcaacctgaaggccgaggacgccaagttccccctggacttccaggtgatcctggccggcagccagagattcagagagaagttcccccccgtgttcttcagcagcttcagaaacaccgtgcagagcagcaacaacaagttcagaagaaacttcaccatgacctaccacctgagccccggcaactacgtggtggtggcccagaccagaagaaagagcgccgagttcctgctgagaatcttcctgaagatgcccgacagcgacagacacctgagcagccacttcaacctgagaatgaagggcagccccagcgagcacggcagccagcagagcatcttcaacagatacgcccagcagagactggacatcgacgccacccagctgcagggcctgctgaaccaggagctgctgaccggcccccccggcgacatgttcagcctggacgagtgcagaagcctggtggccctgatggagctgaaggtgaacggcagactggaccaggaggagttcgccagactgtggaagagactggtgcactaccagcacgtgttccagaaggtgcagaccagccccggcgtgctgctgagcagcgacctgtggaaggccatcgagaacaccgacttcctgagaggcatcttcatcagcagagagctgctgcacctggtgaccctgagatacagcgacagcgtgggcagagtgagcttccccagcctggtgtgcttcctgatgagactggaggccatggccaagaccttcagaaacctgagcaaggacggcaagggcctgtacctgaccgagatggagtggatgagcctggtgatgtacaactag

SEQ ID NO: 238954 - DNA, 2010 bp, Artificial Sequence
  derived and/or modified sequence
atggcctactaccaggagcccagcgtggagaccagcatcatcaagttcaaggaccaggacttcaccaccctgagagaccactgcctgagcatgggcagaaccttcaaggacgagaccttccccgccgccgacagcagcatcggccagaagctgctgcaggagaagagactgagcaacgtgatctggaagagaccccaggacctgcccggcggccccccccacttcatcctggacgacatcagcagattcgacatccagcagggcggcgccgccgactgctggttcctggccgccctgggcagcctgacccagaacccccagtacagacagaagatcctgatggtgcagagcttcagccaccagtacgccggcatcttcagattcagattctggcagtgcggccagtgggtggaggtggtgatcgacgacagactgcccgtgcagggcgacaagtgcctgttcgtgagacccagacaccagaaccaggagttctggccctgcctgctggagaaggcctacgccaagctgctgggcagctacagcgacctgcactacggcttcctggaggacgccctggtggacctgaccggcggcgtgatcaccaacatccacctgcacagcagccccgtggacctggtgaaggccgtgaagaccgccaccaaggccggcagcctgatcacctgcgccacccccagcggccccaccgacaccgcccaggccatggagaacggcctggtgagcctgcacgcctacaccgtgaccggcgccgagcagatccagtacagaagaggctgggaggagatcatcagcctgtggaacccctggggctggggcgaggccgagtggagaggcagatggagcgacggcagccaggagtgggaggagacctgcgaccccagaaagagccagctgcacaagaagagagaggacggcgagttctggatgagctgccaggacttccagcagaagttcatcgccatgttcatctgcagcgagatccccatcaccctggaccacggcaacaccctgcacgagggctggagccagatcatgttcagaaagcaggtgatcctgggcaacaccgccggcggccccagaaacgacgcccagttcaacttcagcgtgcaggagcccatggagggcaccaacgtggtggtgtgcgtgaccgtggccgtgacccccagcaacctgaaggccgaggacgccaagttccccctggacttccaggtgatcctgaccagcgtgcagagattcagagagaagttcccccccgtgttcttcagcagcttcagaaacaccgtgcagagcagcaacaacaagttcagaagaaacttcaccatgacctaccacctgagccccggcaactacgtggtggtggcccagaccagaagaaagagcgccgagttcctgctgagaatcttcctgaagatgcccgacagcgacagacacctgagcagccacttcaacctgagaatgaagggcagccccagcgagcacggcagccagcagagcatcttcaacagatacgcccagcagagactggacatcgacgccacccagctgcagggcctgctgaaccaggagctgctgaccggcccccccggcgacatgttcagcctggacgagtgcagaagcctggtggccctgatggagctgaaggtgaacggcagactggaccaggaggagttcgccagactgtggaagagactggtgcactaccagcacgtgttccagaaggtgcagaccagccccggcgtgctgctgagcagcgacctgtggaaggccatcgagaacaccgacttcctgagaggcatcttcatcagcagagagctgctgcacctggtgaccctgagatacagcgacagcgtgggcagagtgagcttccccagcctggtgtgcttcctgatgagactggaggccatggccaagaccttcagaaacctgagcaaggacggcaagggcctgtacctgaccgagatggagtggatgagcctggtgatgtacaactag

SEQ ID NO: 238955 - DNA, 2010 bp, Artificial Sequence
  derived and/or modified sequence
atggcctactaccaggagccatccgtggagacgtcaattataaagttcaaggaccaggatttcactactctgagggatcactgtctgtctatggggcgcacattcaaagatgagaccttcccggctgcagattcttccatcggtcagaaacttctgcaggagaaacgcctgagcaacgtaatctggaagcggccccaggacctgcccggagggcctccacatttcatactggacgacatttcccggttcgacatccagcaagggggggccgcagactgctggttccttgcagctctcggttcccttacgcagaatccgcagtataggcaaaaaattctcatggtacaaagcttcagccaccagtacgcaggtatcttccggttccggttttggcagtgtgggcagtgggtcgaggtggtgatcgacgaccgcttaccagtccagggcgataaatgcctattcgtgaggccacggcaccaaaaccaggagttttggccctgcctgctggagaaggcctacgccaaattgttggggtcttattccgacctccactatgggtttttagaggatgccctagtcgatttaaccggtggggtgatcaccaatatccatttgcactcctctccagtggatctggtgaaggctgtgaaaaccgcgaccaaggctgggagcttgatcacatgcgcaacaccctccggacctaccgatacagcacaggccatggagaacggactcgtgtccctgcacgcttacaccgtgacaggggccgaacagatccagtacaggcgcgggtgggaagagatcatatcgttatggaacccctggggttggggagaggccgagtggcgagggagatggagtgacggttctcaggagtgggaggaaacctgcgatccccgcaagtcccagctgcataagaaacgcgaggacggcgagttttggatgtcttgccaagattttcagcaaaaatttattgccatgtttatctgcagcgagattcctataaccctggatcacggcaatactcttcacgaaggatggagccaaattatgttccgcaagcaagtaatactggggaacacagcagggggaccaagaaatgacgcccagttcaatttctccgtacaagagcctatggaaggcactaatgtcgtggtgtgtgtcacagtcgctgtgacccctagtaacctgaaggccgaagacgccaaattcccattagattttcaggttattctagctggatcccaaagatttcgcgagaagttcccacctgtgttcttttcaagttttcggaataccgtccagtcttccaacaacaagtttaggagaaacttcacaatgacctatcatcttagcccaggaaactacgtcgtcgtggcgcagacacgtcgcaagtcggccgagtttctgttgagaatcttcttgaagatgcctgactctgatcgccacctaagcagtcacttcaatttgcgaatgaagggatctcctagtgaacacggatcacaacaatccatttttaatcggtatgcgcagcagcgtctagatattgacgcaactcagctgcagggcctgctcaatcaagaactgctcacaggcccccctggcgatatgttttctctcgacgaatgcaggagcttagtggccttgatggagctgaaagtgaatggtaggctggatcaggaagagtttgccaggctgtggaaacgactggtgcactaccagcacgtcttccagaaggttcagacatcccccggtgtcctgctgtccagcgacttatggaaggcgatcgagaacacagatttcctccgcgggatcttcataagtagagagctgctgcacctggtgacacttcgctactctgattcagtcgggagagtttccttcccatccctggtgtgtttcctgatgaggctggaagctatggcaaagaccttccgaaacctatcaaaagacgggaagggtctgtacctgaccgaaatggagtggatgtctttggtgatgtataactag

SEQ ID NO: 238956 - DNA, 2010 bp, Artificial Sequence
  derived and/or modified sequence
atggcctactaccaggaaccttcagtcgaaacttcaattatcaagttcaaggatcaagactttaccacactgcgggaccactgcctctcgatgggtaggactttcaaagacgagacctttccggctgcggacagctccataggccaaaagctacttcaggagaaacgcttgagtaatgtgatctggaaacgcccacaggatctgcctggggggccaccccatttcattctcgacgatattagtcgcttcgatattcagcaagggggagccgcagattgttggttcctggcagccctgggcagcctgacccagaacccacagtatcggcagaaaatactgatggtgcagtctttctcacaccagtacgccggaatctttcgtttccgtttttggcagtgtgggcaatgggtggaggttgtgattgatgaccgtcttcccgtgcagggagataagtgtctgttcgtccggccccgtcaccagaatcaggagttctggccctgcctccttgagaaagcatatgctaaactcctgggctcttactctgacttacattatggcttccttgaggacgccttggtcgacctgaccggaggcgtaattaccaacatacatcttcactcttcccctgtcgacttggtcaaggctgtgaagaccgcgaccaaagctgggtctcttatcacatgtgcaactccctccggccctaccgataccgctcaggccatggagaacggcctggtgtccttgcatgcgtataccgtcacgggggccgagcagatccagtataggcgcgggtgggaagagattatttctttgtggaatccgtggggttggggagaagctgagtggaggggacgttggtctgacggctcacaagagtgggaagagacctgcgaccctaggaaatcccagctgcataagaagagagaagacggggaattttggatgagttgccaggatttccaacagaagtttattgcaatgtttatctgctctgaaatcccaattacactggaccatggcaacacacttcatgaagggtggtcacagataatgttccggaagcaagttattttgggcaatacggcgggcggccccagaaatgacgcacagtttaattttagcgttcaagagcccatggagggtacgaacgttgttgtttgcgtcacggtagcagtcacccccagcaacttaaaggcagaagatgccaaattcccgcttgattttcaggtaatactaacctcggtccagaggttccgggaaaaattcccgcccgtcttttttagctcctttagaaatacagtccagagttcaaataataaatttcgcagaaattttaccatgacttaccacctatccccgggaaactatgtcgttgtcgcacagacacgcagaaaaagcgcggagtttctcctgcgtatttttctcaagatgccggactctgatagacatctctcctcgcactttaacctccgcatgaagggttcacccagtgaacacggatcccaacagagtattttcaatcggtacgcccagcagcggttagatattgacgccacacagctgcaggggcttttaaatcaagaactgttgaccggaccgccgggtgatatgttttccctagacgagtgtcgaagcctggtcgctctcatggaattgaaagtgaacggccggctggaccaggaggaatttgctcggctttggaagcggttagtgcactaccaacacgtgttccaaaaagttcagacatcacctggcgtgctcctgtctagtgatctctggaaagccatagagaacactgattttcttcgcggcatctttatcagtcgggagctgctgcacctggtcaccttgaggtactccgacagtgtgggaagggtgtcatttcccagtctggtttgtttcctcatgcgcttggaagccatggcgaagacgtttcgaaacttatcaaaagatggtaaaggactttacctcaccgaaatggagtggatgtcattggtcatgtacaattag

SEQ ID NO: 238957 - DNA, 2010 bp, Artificial Sequence
  derived and/or modified sequence
atggcctactaccaggagcccagcgtggagaccagcatcatcaagttcaaggaccaggacttcaccaccctgcgggaccactgcctgtccatgggccgcaccttcaaggatgagaccttccctgctgctgacagcagcatcggccagaagctgctgcaggagaagaggctgagcaatgtcatctggaagaggccccaggacctgcccggcggccccccccacttcatcctggatgacatcagcagatttgacatccagcagggcggcgctgctgactgctggttcctggccgccctgggcagcctgacccagaacccccagtaccggcagaagatcctgatggtgcagagcttcagccaccagtatgccggcatcttccgcttccgcttctggcagtgtggccagtgggtggaggtggtgattgatgaccggctgcctgtgcagggcgacaagtgcctgtttgtgcggcccaggcaccagaaccaggagttctggccctgcctgctggagaaggcctatgccaagctgctgggcagctacagcgacctgcactacggcttcctggaggatgccctggtggacctgaccggcggcgtcatcaccaacatccacctgcacagcagccctgtggacctggtgaaggctgtgaagacagccaccaaggccggcagcctcatcacctgtgccacccccagcggccccacagacacagcccaggccatggagaatggcctggtgtccctgcacgcctacacagtgactggagctgagcagatccagtaccgccggggctgggaggagatcatcagcctgtggaacccctggggctggggcgaggccgagtggaggggccgctggagcgatggcagccaggagtgggaggagacctgtgaccccaggaagagccagctgcacaagaagagagaagatggagagttctggatgagctgccaggacttccagcagaagttcatcgccatgttcatctgcagcgagatccccatcaccctggaccacggcaacaccctgcacgagggctggagccagatcatgttcaggaagcaggtgatcctgggcaacacagctgggggccccagaaatgatgcccagttcaacttctctgtgcaggagcccatggagggcaccaacgtggtggtgtgtgtgacagtggccgtgacccccagcaacctgaaggccgaggatgccaagttccccctggacttccaggtgatcctggccggcagccagcgcttccgggagaagtttcctcctgtgttcttcagcagcttcaggaacacagtgcagagcagcaacaacaagttcagaagaaacttcaccatgacctaccacctgagccctggcaactacgtggtggtggcccagaccaggaggaagtctgctgagttcctgctgcgcatcttcctgaagatgccagacagcgacagacacctgagcagccacttcaacctgaggatgaagggcagccccagcgagcacggcagccagcagagcatcttcaacagatatgcccagcagaggctggacattgatgccacccagctgcagggcctgctgaaccaggagctgctgactggacctcctggggacatgttcagcctggatgagtgccgcagcctggtggccctgatggagctgaaggtgaatggccgcctggaccaggaggagtttgcccggctgtggaagaggctggtgcactaccagcacgtgttccagaaggtgcagaccagccctggggtgctgctgagcagtgacctgtggaaggccattgaaaatacagacttcctgcggggcatcttcatcagccgggagctgctgcacctggtgaccctgcgctacagcgacagcgtgggccgggtgtccttccccagcctggtgtgcttcctgatgaggctggaggccatggccaagaccttcaggaacctgagcaaggatggcaagggcctgtacctgacagagatggagtggatgagcctggtgatgtacaactag

SEQ ID NO: 238958 - DNA, 2010 bp, Artificial Sequence
  derived and/or modified sequence
atggcctactaccaggagcccagcgtggagaccagcatcatcaagttcaaggaccaggacttcaccaccctgcgggaccactgcctgtccatgggccgcaccttcaaggatgagaccttccctgctgctgacagcagcatcggccagaagctgctgcaggagaagaggctgagcaatgtcatctggaagaggccccaggacctgcccggcggccccccccacttcatcctggatgacatcagcagatttgacatccagcagggcggcgctgctgactgctggttcctggccgccctgggcagcctgacccagaacccccagtaccggcagaagatcctgatggtgcagagcttcagccaccagtatgccggcatcttccgcttccgcttctggcagtgtggccagtgggtggaggtggtgattgatgaccggctgcctgtgcagggcgacaagtgcctgtttgtgcggcccaggcaccagaaccaggagttctggccctgcctgctggagaaggcctatgccaagctgctgggcagctacagcgacctgcactacggcttcctggaggatgccctggtggacctgaccggcggcgtcatcaccaacatccacctgcacagcagccctgtggacctggtgaaggctgtgaagacagccaccaaggccggcagcctcatcacctgtgccacccccagcggccccacagacacagcccaggccatggagaatggcctggtgtccctgcacgcctacacagtgactggagctgagcagatccagtaccgccggggctgggaggagatcatcagcctgtggaacccctggggctggggcgaggccgagtggaggggccgctggagcgatggcagccaggagtgggaggagacctgtgaccccaggaagagccagctgcacaagaagagagaagatggagagttctggatgagctgccaggacttccagcagaagttcatcgccatgttcatctgcagcgagatccccatcaccctggaccacggcaacaccctgcacgagggctggagccagatcatgttcaggaagcaggtgatcctgggcaacacagctgggggccccagaaatgatgcccagttcaacttctctgtgcaggagcccatggagggcaccaacgtggtggtgtgtgtgacagtggccgtgacccccagcaacctgaaggccgaggatgccaagttccccctggacttccaggtgatcctgacctctgtgcagcgcttccgggagaagtttcctcctgtgttcttcagcagcttcaggaacacagtgcagagcagcaacaacaagttcagaagaaacttcaccatgacctaccacctgagccctggcaactacgtggtggtggcccagaccaggaggaagtctgctgagttcctgctgcgcatcttcctgaagatgccagacagcgacagacacctgagcagccacttcaacctgaggatgaagggcagccccagcgagcacggcagccagcagagcatcttcaacagatatgcccagcagaggctggacattgatgccacccagctgcagggcctgctgaaccaggagctgctgactggacctcctggggacatgttcagcctggatgagtgccgcagcctggtggccctgatggagctgaaggtgaatggccgcctggaccaggaggagtttgcccggctgtggaagaggctggtgcactaccagcacgtgttccagaaggtgcagaccagccctggggtgctgctgagcagtgacctgtggaaggccattgaaaatacagacttcctgcggggcatcttcatcagccgggagctgctgcacctggtgaccctgcgctacagcgacagcgtgggccgggtgtccttccccagcctggtgtgcttcctgatgaggctggaggccatggccaagaccttcaggaacctgagcaaggatggcaagggcctgtacctgacagagatggagtggatgagcctggtgatgtacaactag

SEQ ID NO: 238959 - DNA, 2010 bp, Artificial Sequence
  derived and/or modified sequence
atggcctactaccaggagcccagcgtggagaccagcatcatcaagtttaaggaccaggactttacaacactgagggatcactgcctttcaatgggcagaactttcaaggacgagacgtttcctgccgccgactccagcatcggccagaagttgctacaggagaagcggttgagtaacgtgatctggaaacgccctcaggatctgcccggcgggccccctcactttattctggacgacatatcccgctttgatatccaacaaggtggagctgcagactgctggtttcttgctgctctgggtagcctgacacagaacccacagtacagacagaaaatcttgatggtgcagtccttcagccaccagtatgctggcatctttagattccggttttggcagtgcggccagtgggtcgaagtggttatagacgatcggctgccagttcagggtgataaatgtctattcgttaggccccgacaccaaaatcaggaattttggccatgtctgctcgagaaagcatatgccaaattactgggctcctattccgatctgcattacgggttccttgaagatgcactggtggatctcaccgggggagttattacaaacatacacctgcacagctcccctgttgacctcgttaaagcagtgaaaactgccaccaaggcagggagtctcataacgtgtgccacaccaagcggccccaccgataccgcgcaggccatggaaaatggtctggttagcctccacgcatacaccgtgaccggggcagagcaaatccaataccgcaggggctgggaggagattatttccctgtggaacccgtggggctggggtgaggcagagtggaggggccggtggtctgacggatcccaggaatgggaggaaacatgcgatccacgcaagtcccaattgcataaaaaacgcgaagacggagagttttggatgtcctgccaagattttcaacagaaatttatcgccatgtttatctgctccgagatccccataaccctggaccatggcaacacgctacacgaaggttggagccagatcatgttccggaagcaggtgatacttggaaatacagccggaggtccgaggaacgacgcccaattcaacttcagcgtccaggagccgatggagggaacaaacgtcgtagtgtgtgtaaccgtcgctgtcacgcccagcaatctcaaagctgaggacgccaaatttcccttggacttccaggtcatattggcaggaagccagcggtttagggagaaattccccccagtgtttttctcgtcatttagaaatactgtccagtcctccaacaataaattccgccgtaactttacaatgacatatcacttgtccccgggcaactatgtagtggtggcccaaaccagacgaaaaagtgccgagtttctgctgcgtatctttttaaaaatgccagattctgatcggcatctgtcatctcactttaacctcaggatgaagggcagcccttccgagcacggatcacagcagagtatatttaaccggtacgcccagcagcgactggatattgacgcgacacagctgcagggcctactcaatcaggagctgctcactgggcccccgggagacatgttctccctcgatgaatgcaggtccttagtagcccttatggaactcaaagttaatggcagactggatcaggaggaattcgctcggctctggaaaaggctcgtgcactaccagcacgtgtttcaaaaggtgcagactagtccaggcgtgctactatctagtgatctctggaaggccattgagaatacagatttcctgaggggcatttttatctctcgggagctacttcatcttgttacactacggtacagcgactctgtgggccgcgtgagcttcccctcactggtttgtttcctgatgagactggaagccatggccaagaccttcaggaacctgtctaaggacggtaaagggctatacctgacagaaatggaatggatgtccctcgttatgtacaattag

SEQ ID NO: 238960 - DNA, 2010 bp, Artificial Sequence
  derived and/or modified sequence
atggcctactaccaggagcccagcgtggagaccagcatcatcaagttcaaggaccaagacttcaccacactaagggatcattgtttatccatgggacgaacatttaaagacgagacctttccagcagcagactcatctatcggacagaaactgctgcaggagaaaaggctttcaaatgtaatttggaagcggcctcaggatttgcctggggggccacctcattttatcctggacgacatttctaggttcgatatccaacaagggggcgctgctgactgctggtttctggcagcactcggctctcttacgcagaatccacagtatcggcagaagatattgatggtgcaatccttctcacaccagtacgccggcatttttcgttttagattttggcaatgcggccagtgggtcgaagttgtgatcgatgaccgtctgccggtgcaaggagacaagtgtctgtttgttcgcccacggcaccagaatcaggagttctggccatgtctgctagagaaagcctacgcaaagctcttgggatcatactcggacttacattacgggttcctggaggatgctctggtagatctgaccggcggagtgatcactaatattcacctccattccagccctgtcgacctggttaaagcagtgaaaacggccacaaaagccggtagtctgataacatgtgcaacaccatcgggccccacagataccgcccaagccatggagaatggcctcgtctccctccacgcatatacggtaacaggggctgagcagattcagtatcgtaggggatgggaggaaattatctccttatggaatccctggggatggggggaagcagagtggcgcggccggtggtctgatggtagccaagagtgggaggagacttgcgaccccagaaagtctcagcttcacaagaagagagaagatggcgagttttggatgagctgtcaggattttcagcagaaattcatcgctatgttcatttgcagcgagatccccatcacgctggaccatggcaacactttgcacgaaggctggagccagatcatgttcagaaagcaggtcattctgggcaacacagctggcggaccaaggaatgacgcgcagttcaattttagtgtccaggaacctatggaggggacaaatgtagtggtttgtgtcaccgttgcagtcacaccctccaacttgaaggccgaggacgcaaaatttccattagatttccaagtaatcctcacaagcgtacaacgtttccgcgagaagtttccaccagtgtttttctctagttttcgaaatactgtgcagtcgagtaacaataagttcagacggaacttcaccatgacgtaccacttgtcccccgggaactacgtggtggtagcccagacgcgcagaaagtccgccgaatttctgttgagaatttttttgaagatgcccgactccgataggcacctctcctctcactttaacttgcgtatgaaaggctctccaagcgagcatgggagccagcagtccatttttaaccgttatgctcagcaaaggcttgacatcgatgccacccaactgcaggggctgctcaaccaggaactgctgacaggacccccaggagacatgttctccctcgacgaatgtagatccttggttgccctgatggagctgaaggtcaacggaaggcttgaccaggaggagtttgcccgattatggaagcgcttggtgcactatcagcatgtgtttcaaaaggttcagaccagccctggcgttctgttaagctctgacctgtggaaggctatagagaacactgactttctgcgcggaatctttatttcaagagaactgctgcaccttgtaacacttcgatacagcgatagcgttggacgggtatccttcccctcattggtctgcttcctcatgcgcttagaggcaatggctaaaacttttcgaaatttgtctaaggacggaaagggactctacttgactgaaatggaatggatgtcacttgtaatgtataactag

SEQ ID NO: 238961 - DNA, 2010 bp, Artificial Sequence
  derived and/or modified sequence
atggcctactaccaggagcctagtgtcgagacctccattattaaattcaaagatcaagacttcaccacactgcgggaccattgtcttagcatgggacgaactttcaaggacgaaactttcccagcagccgactcaagcatcgggcagaaactcctccaagagaagcgattgagcaacgtgatttggaagcgccctcaggatctccccggtggtccaccacacttcatcctggatgatatttctaggtttgatatccaacagggtggagccgcagactgttggttcctggccgcactgggtagcctaactcagaacccccagtaccgtcaaaagatcctaatggtccaaagtttctcgcatcagtatgctgggatcttcagattccgtttctggcaatgtggtcaatgggtcgaggtggtaatcgacgacaggttgccagtccagggcgacaagtgtctgttcgtaaggcctaggcaccagaatcaggagttctggccatgcttattggagaaggcgtatgccaagctgttgggttcttatagcgacttgcactatgggttcctcgaagacgccttggttgacctgactggcggagtgataactaatatacatctgcatagtagtccagtcgacttagtgaaagctgtcaaaacggccacaaaggcaggttcgctgatcacttgcgcaaccccgagtggacctactgacacagcacaggctatggagaacgggttggtgagccttcatgcctacaccgtcaccggagccgaacagatccagtaccgcagggggtgggaggaaatcatatcactgtggaacccctggggatggggtgaagcagaatggaggggacggtggtccgatggatctcaagaatgggaagagacatgcgaccctcgtaagagccagttgcataagaaacgagaggatggtgagttctggatgagctgtcaggactttcagcagaaatttatcgcaatgtttatatgttccgaaattcctataaccctcgatcacggcaataccctgcatgagggatggagccagatcatgttccgtaaacaggtgatcctgggcaataccgccggaggccctagaaatgatgcgcagtttaatttctcggtgcaggaacctatggaaggcactaatgtcgtagtatgcgtgactgtggctgtaacaccttccaatctgaaagcagaagacgccaagttccccttggactttcaagtgatcctggccggaagccagcggtttagagaaaagttcccacctgtcttcttttcttcttttagaaataccgttcagagttctaataataagttccgcaggaattttaccatgacttaccacctgagtcccggaaactatgtggtggtcgcacagacaagacgaaaaagcgctgagttcctgctgaggattttcctgaagatgcctgactctgatagacacttgtcctctcacttcaatctgcgaatgaaggggagccctagcgaacatgggtcccagcagtccatctttaacagatacgcacagcagaggctggacatcgatgcaacacagctccaaggcttgcttaaccaagagctgctgaccggacctcctggagatatgttctcacttgatgaatgtaggtcccttgttgctctgatggagctcaaagtcaatgggagattggatcaggaagaattcgcgagactttggaagcgactagtgcattaccagcatgtcttccaaaaggtccagacctcacctggtgtgctgctgagctccgatctttggaaagctattgagaacaccgactttcttcgcggaatatttatcagcagagagttgctacacctcgtgaccctccgctactctgattctgtaggtagggtgtctttcccttccctagtgtgctttctgatgcgcctggaagccatggccaaaacatttcggaacctgtctaaagatggaaaagggctctatctcaccgagatggaatggatgtctcttgtcatgtacaactag

SEQ ID NO: 238962 - DNA, 2010 bp, Artificial Sequence
  derived and/or modified sequence
atggcttactaccaggagcccagcgtggagaccagtattattaaatttaaggatcaagatttcaccaccctgcgcgaccactgtctgtctatggggagaactttcaaagatgagacctttcccgctgcggactcatcgatcggccaaaagctgctgcaggaaaaaaggctgtcaaacgtgatctggaaaagacctcaggacctacctgggggacctccacatttcattttagacgatatttcaagattcgatatacaacagggtggagctgccgattgttggtttctcgccgctttaggtagtttgacacaaaacccacagtacagacagaaaatcctcatggtgcagtccttttctcaccagtatgctgggatttttcggttcaggttctggcagtgtggccagtgggtggaggtggtaatagatgatcgtctgcctgtccagggggacaaatgtttgttcgttcgccctcgccatcaaaatcaagagttttggccctgcctgcttgaaaaggcctacgcaaaattgcttgggtcctacagtgatcttcactacggtttcttggaggatgctctggtcgacctgaccggaggagtcatcaccaatattcacctgcacagtagcccggtggaccttgtgaaagcggtgaaaaccgctaccaaagccggaagtctgatcacctgtgccacgccctctggacccactgatactgcacaagcaatggaaaacggtctggtgagcctgcatgcctacaccgtgaccggagccgaacagatccaatatcgcagagggtgggaagagattatctccctgtggaacccctgggggtggggcgaggccgaatggagaggacgctggagcgacggctcacaggaatgggaagaaacctgtgacccgcgaaaatcccagctgcataaaaaaagagaggacggggagttctggatgtcctgtcaggatttccagcagaagtttattgccatgttcatctgctccgagataccaatcactctggatcacggcaacactctgcatgaaggttggtctcagataatgttcagaaagcaagttattctcggcaatactgccggaggaccaaggaatgatgcccagttcaattttagtgtgcaggagcccatggaagggaccaacgtggtggtgtgcgtgaccgtcgccgtgaccccaagtaacctgaaggctgaggatgctaaatttccactggactttcaggtgattctgacctcagttcaacgcttcagagagaaattccccccagtgtttttttcgtccttccgcaacaccgtccagtctagcaacaataaatttaggcgcaatttcaccatgacttaccacctgagccctggcaactatgtggttgtcgcgcagactcggcgaaaaagcgcagaattcctcctgaggatctttctaaagatgcccgacagcgacaggcacttatcctctcactttaatctgcgtatgaagggcagtccttctgaacatggatcccagcagtcgatattcaacaggtacgcccagcaacgactggacattgatgctactcagttacagggactgctgaatcaggaactcctgactggcccaccaggcgatatgttctcactggacgagtgtaggtcacttgttgctctgatggagctcaaagtgaacggacgtctggaccaggaggagtttgcgcgactctggaagcgactggtgcactatcaacacgtctttcaaaaagtgcaaacctcgcccggagtgttgctatcttccgacttgtggaaagctattgagaatactgattttctgagaggaatttttatctcgagagagctcctccacctggtcacgctgagatactctgacagcgttggcagagtatctttcccgtccctcgtctgttttctgatgcgactcgaagctatggcgaagacttttcgcaacctgagtaaagatgggaagggtctctatctgaccgaaatggagtggatgtctctcgttatgtataactag

SEQ ID NO: 238963 - DNA, 2683 bp, Artificial Sequence
  derived and/or modified sequence
aagcagacaccagcactgctctttctccaagacggccggccatgctctcctcctctgccagtctcctccaccactctctaacctgagagcctgtggaacctgcccgtctcccctcctccatcagacacacctgcctaggaaacaggaaaggacctcggaagtcttctaaggagagtcatggcgtattaccaggagccttcagtggagacctccatcatcaagttcaaagaccaggactttaccaccttgcgggatcactgcctgagcatgggccggacgtttaaggatgagacattccctgcagcagattcttccataggccagaagctgctccaggaaaaacgcctctccaatgtgatatggaagcggccacaggatctaccagggggtcctcctcacttcatcctggatgatataagcagatttgacatccaacaaggaggcgcagctgactgctggttcctggcagcactgggatccttgactcagaacccacagtacaggcagaagatcctgatggtccaaagcttttcacaccagtatgctggcattttccgtttccggttctggcaatgtggccagtgggtggaagtggtgattgatgaccgcctacctgtccagggagataaatgcctctttgtgcgtcctcgccaccaaaaccaagagttctggccctgcctgctggagaaggcctatgccaagctgctcggatcctattccgatctgcactatggcttcctcgaggatgccctggtggacctcacaggaggcgtgatcaccaacatccatctgcactcttcccctgtggacctggtgaaggcagtgaagacagcgaccaaggcaggctccctgataacctgtgccactccaagtgggccaacagatacagcacaggcgatggagaatgggctggtgagtctccatgcctacactgtgactggggctgagcagattcaataccgaaggggctgggaagaaattatctccctgtggaacccctggggctggggcgaggccgaatggagagggcgctggagtgatgggtctcaggagtgggaggaaacctgtgatccgcggaaaagccagctacataagaaacgggaagatggcgagttttggatgtcgtgtcaagatttccaacagaaattcatcgccatgtttatatgtagcgaaattccaattaccctggaccatggaaacacactccacgaaggatggtcccaaataatgtttaggaagcaagtgattctaggaaacactgcaggaggacctcggaatgatgctcaattcaacttctctgtgcaagagccaatggaaggcaccaatgttgtcgtgtgcgtcacagttgctgtcacaccatcaaatttgaaagcagaagatgcaaaatttccactcgatttccaagtgattctggctggctcacagcggttccgggagaaatttccacccgtgtttttttcctcgttcagaaacactgtccaaagctcaaataataaattccgccgcaacttcaccatgacttaccatctgagccctgggaactatgttgtggttgcacagacacggagaaaatcagcggagttcttgctccgaatcttcctgaaaatgccagacagtgacaggcacctgagcagccatttcaacctcagaatgaagggaagcccttcagaacatggctcccaacaaagcattttcaacagatatgctcagcagaggctggacattgatgccacccagcttcagggccttctcaaccaggagcttctaacaggacctccaggggacatgttctccttagatgagtgccgcagcttggtggctctgatggaactgaaagtgaatgggcggctagaccaagaggagtttgcgcgactgtggaagcgccttgttcactaccagcatgttttccagaaggttcagacaagccctggagtcctcctgagctcggacttgtggaaggccatagagaatacagacttcctcagagggatcttcatcagccgtgagctgctgcatctggtgaccctcaggtacagcgacagcgtcggcagggtcagcttccccagcctggtctgcttcctgatgcggcttgaagccatggcaaagaccttccgcaacctctctaaggatggaaaaggactctacctgacagaaatggagtggatgagcctggtcatgtacaactgaagcaaagaggaaagcagacccatggctcaggacaagctcccagtgatcactcaagaatctggctctcattctaagaggctgtgctgcccagtatggtggttgtgataaatctaaaccagccctgcatgaaacagagtccaagctgtctcccaacagcctgggttcggtccttggctggcccaggcccagttaagcctgtggccaccaagcagctcatctgagcactttgggatgtattcagcctacgttgccctggaaaaggaagcaggagatgtctccctgtgggaaaggagaagagaagttgtctctgagtcccctgtcaccagttggattcatttcttggaagagccagaatgagccactttgaccaccctcgggtgctatgggtgacacaagagctgtccactgggtgtttgcagaataattacactatcttatgtctggatcctgatgatttcacagctaaatggcaaaaataaaacatgtttcccataaa

SEQ ID NO: 238964 - DNA, 2677 bp, Artificial Sequence
  derived and/or modified sequence
agcagacaccagcactgctctttctccaagacggccggccatgctctcctcctctgccagtctcctccaccactctctaacctgagagcctgtggaacctgcccgtctcccctcctccatcagacacacctgcctaggaaacaggaaaggacctcggaagtcttctaaggagagtcatggcgtattaccaggagccttcagtggagacctccatcatcaagttcaaagaccaggactttaccaccttgcgggatcactgcctgagcatgggccggacgtttaaggatgagacattccctgcagcagattcttccataggccagaagctgctccaggaaaaacgcctctccaatgtgatatggaagcggccacaggatctaccagggggtcctcctcacttcatcctggatgatataagcagatttgacatccaacaaggaggcgcagctgactgctggttcctggcagcactgggatccttgactcagaacccacagtacaggcagaagatcctgatggtccaaagcttttcacaccagtatgctggcattttccgtttccggttctggcaatgtggccagtgggtggaagtggtgattgatgaccgcctacctgtccagggagataaatgcctctttgtgcgtcctcgccaccaaaaccaagagttctggccctgcctgctggagaaggcctatgccaagctgctcggatcctattccgatctgcactatggcttcctcgaggatgccctggtggacctcacaggaggcgtgatcaccaacatccatctgcactcttcccctgtggacctggtgaaggcagtgaagacagcgaccaaggcaggctccctgataacctgtgccactccaagtgggccaacagatacagcacaggcgatggagaatgggctggtgagtctccatgcctacactgtgactggggctgagcagattcaataccgaaggggctgggaagaaattatctccctgtggaacccctggggctggggcgaggccgaatggagagggcgctggagtgatgggtctcaggagtgggaggaaacctgtgatccgcggaaaagccagctacataagaaacgggaagatggcgagttttggatgtcgtgtcaagatttccaacagaaattcatcgccatgtttatatgtagcgaaattccaattaccctggaccatggaaacacactccacgaaggatggtcccaaataatgtttaggaagcaagtgattctaggaaacactgcaggaggacctcggaatgatgctcaattcaacttctctgtgcaagagccaatggaaggcaccaatgttgtcgtgtgcgtcacagttgctgtcacaccatcaaatttgaaagcagaagatgcaaaatttccactcgatttccaagtgattctgacttcagtccagcggttccgggagaaatttccacccgtgtttttttcctcgttcagaaacactgtccaaagctcaaataataaattccgccgcaacttcaccatgacttaccatctgagccctgggaactatgttgtggttgcacagacacggagaaaatcagcggagttcttgctccgaatcttcctgaaaatgccagacagtgacaggcacctgagcagccatttcaacctcagaatgaagggaagcccttcagaacatggctcccaacaaagcattttcaacagatatgctcagcagaggctggacattgatgccacccagcttcagggccttctcaaccaggagcttctaacaggacctccaggggacatgttctccttagatgagtgccgcagcttggtggctctgatggaactgaaagtgaatgggcggctagaccaagaggagtttgcgcgactgtggaagcgccttgttcactaccagcatgttttccagaaggttcagacaagccctggagtcctcctgagctcggacttgtggaaggccatagagaatacagacttcctcagagggatcttcatcagccgtgagctgctgcatctggtgaccctcaggtacagcgacagcgtcggcagggtcagcttccccagcctggtctgcttcctgatgcggcttgaagccatggcaaagaccttccgcaacctctctaaggatggaaaaggactctacctgacagaaatggagtggatgagcctggtcatgtacaactgaagcaaagaggaaagcagacccatggctcaggacaagctcccagtgatcactcaagaatctggctctcattctaagaggctgtgctgcccagtatggtggttgtgataaatctaaaccagccctgcatgaaacagagtccaagctgtctcccaacagcctgggttcggtccttggctggcccaggcccagttaagcctgtggccaccaagcagctcatctgagcactttgggatgtattcagcctacgttgccctggaaaaggaagcaggagatgtctccctgtgggaaaggagaagagaagttgtctctgagtcccctgtcaccagttggattcatttcttggaagagccagaatgagccactttgaccaccctcgggtgctatgggtgacacaagagctgtccactgggtgtttgcagaataattacactatcttatgtctggatcctgatgatttcacagctaaatggcaaaaataaaacatgtttccc

SEQ ID NO: 238965 - protein, 670 aa, Artificial Sequence
  derived and/or modified sequence
MEGERRAYSKEVHQRINKQLEEIRRLEEVRGDLQVQISAAQNQVKRLRDSQRLENMDRLLKGRAQVQAEIEELQEQTRALDKQIQEWETRIFTHSKNVRSPGFILDQKVKIRRRIRILENQLDRVTCHFDNQLVRNAALREELDLLRIDRNRYLNVDRKLKKEIHHLHHLVSTLILSSTSAYAVREEAKAKMGLLRERAEKEEAQSEMEAQVLQRQILHLEQLHHFLKLKNNDRQPDPDVLEKREKQAGEVAEGVWKTSQERLVLCYEDALNKLSQLMGESDPDLLVQKYLEIEERNFAEFNFINEQNLELEHVQEEIKEMQEALVSARASKDDQHLLQEQQQKVLQQRMDKVHSEAERLEARFQDVRGQLEKLKADIQLLFTKAHCDSSMIDDLLGVKTSMGDRDMGLFLSLIEKRLVELLTVQAFLHAQSFTSLADAALLVLGQSLEDLPKKMAPLQPPDTLEDPPGFEASDDYPMSREELLSQVEKLVELQEQAEAQRQKDLAAAAAKLDGTLSVDLASTQRAGSSTVLVPTRHPHAIPGSILSHKTSRDRGSLGHVTFGGLSSSTGHLPSHITHGDPNTGHVTFGSTSASSGGHVTFRPVSASSYLGSTGYVGSSRGGENTEGGVESGGTASDSSGGLGSSRDHVSSTGPASSTGPGSSTSKDSRG

SEQ ID NO: 238966 - DNA, 2013 bp, Artificial Sequence
  derived and/or modified sequence
atggagggcgagagaagagcctacagcaaggaggtgcaccagagaatcaacaagcagctggaggagatcagaagactggaggaggtgagaggcgacctgcaggtgcagatcagcgccgcccagaaccaggtgaagagactgagagacagccagagactggagaacatggacagactgctgaagggcagagcccaggtgcaggccgagatcgaggagctgcaggagcagaccagagccctggacaagcagatccaggagtgggagaccagaatcttcacccacagcaagaacgtgagaagccccggcttcatcctggaccagaaggtgaagatcagaagaagaatcagaatcctggagaaccagctggacagagtgacctgccacttcgacaaccagctggtgagaaacgccgccctgagagaggagctggacctgctgagaatcgacagaaacagatacctgaacgtggacagaaagctgaagaaggagatccaccacctgcaccacctggtgagcaccctgatcctgagcagcaccagcgcctacgccgtgagagaggaggccaaggccaagatgggcctgctgagagagagagccgagaaggaggaggcccagagcgagatggaggcccaggtgctgcagagacagatcctgcacctggagcagctgcaccacttcctgaagctgaagaacaacgacagacagcccgaccccgacgtgctggagaagagagagaagcaggccggcgaggtggccgagggcgtgtggaagaccagccaggagagactggtgctgtgctacgaggacgccctgaacaagctgagccagctgatgggcgagagcgaccccgacctgctggtgcagaagtacctggagatcgaggagagaaacttcgccgagttcaacttcatcaacgagcagaacctggagctggagcacgtgcaggaggagatcaaggagatgcaggaggccctggtgagcgccagagccagcaaggacgaccagcacctgctgcaggagcagcagcagaaggtgctgcagcagagaatggacaaggtgcacagcgaggccgagagactggaggccagattccaggacgtgagaggccagctggagaagctgaaggccgacatccagctgctgttcaccaaggcccactgcgacagcagcatgatcgacgacctgctgggcgtgaagaccagcatgggcgacagagacatgggcctgttcctgagcctgatcgagaagagactggtggagctgctgaccgtgcaggccttcctgcacgcccagagcttcaccagcctggccgacgccgccctgctggtgctgggccagagcctggaggacctgcccaagaagatggcccccctgcagccccccgacaccctggaggacccccccggcttcgaggccagcgacgactaccccatgagcagagaggagctgctgagccaggtggagaagctggtggagctgcaggagcaggccgaggcccagagacagaaggacctggccgccgccgccgccaagctggacggcaccctgagcgtggacctggccagcacccagagagccggcagcagcaccgtgctggtgcccaccagacacccccacgccatccccggcagcatcctgagccacaagaccagcagagacagaggcagcctgggccacgtgaccttcggcggcctgagcagcagcaccggccacctgcccagccacatcacccacggcgaccccaacaccggccacgtgaccttcggcagcaccagcgccagcagcggcggccacgtgaccttcagacccgtgagcgccagcagctacctgggcagcaccggctacgtgggcagcagcagaggcggcgagaacaccgagggcggcgtggagagcggcggcaccgccagcgacagcagcggcggcctgggcagcagcagagaccacgtgagcagcaccggccccgccagcagcaccggccccggcagcagcaccagcaaggacagcagaggctag

SEQ ID NO: 238967 - DNA, 2013 bp, Artificial Sequence
  derived and/or modified sequence
atggagggagaaagacgggcctactcgaaggaagtccatcaaagaataaataagcagttggaagagatccggaggctcgaagaggtgaggggcgatctacaggtccaaatctcagccgcacaaaaccaggtgaaaaggttgagggactcccagcgtctggagaatatggaccgactgctgaagggtagggctcaggtgcaggccgaaatcgaggagctccaggaacagacaagggctctcgacaagcaaattcaagagtgggaaacacggatattcacccattctaagaacgtgagaagcccaggtttcatattggatcaaaaggtcaaaattagaaggagaatccgtatcttagaaaaccagcttgacagagttacttgtcacttcgataaccagctagtccggaatgccgccctgcgcgaggagctggatctgctgcgcatcgacagaaacagatacttaaatgtggaccgtaagttaaaaaaagagattcaccacctgcaccacctggtgagtacactgatactctctagcacctcagcatacgcagtgcgagaagaagccaaggccaagatgggcttgctccgcgagagagccgagaaagaagaggcccaatcagagatggaggcccaggtgctccagcgacagattctccatctggagcaactgcaccattttctgaaactgaaaaacaacgatagacagcctgaccccgatgtgctggagaaacgcgaaaaacaggcaggtgaagtggccgaaggcgtgtggaaaacctcccaggaacgcctggtgctttgttatgaggatgcactgaataagttgagtcaattgatgggagagtctgaccctgatcttcttgtgcaaaagtatctggagatcgaagagcggaacttcgccgaattcaatttcataaatgagcagaacctggaactggagcatgtacaggaggaaattaaagagatgcaggaagcattagtgagtgcacgtgctagtaaggacgaccaacacctcctccaggaacaacagcagaaagtattacaacaaaggatggacaaagttcacagcgaagccgagaggctagaagcacgatttcaggacgtgcgggggcagctggaaaaattgaaagccgacattcagctgttgttcaccaaagctcactgcgatagttcaatgatcgatgacctgctgggagtgaagacttctatgggggaccgagacatgggccttttcctgtccctgatcgagaaacgccttgtggagctgcttacggtacaagctttcctgcatgcccagtcatttacctcactagcggatgccgcccttctagtgctgggacagtctctggaggatcttcctaagaagatggcccctttgcaaccccctgacaccctggaagacccgcccggtttcgaggctagcgatgattaccccatgtcaagggaagaactgcttagccaggtcgagaaactggtggagctacaggaacaagccgaggcccaacgtcagaaagacttggcggccgccgctgcaaaattagacggcactctgtctgttgacctagcctctactcagcgcgcgggaagttccaccgttctagtaccaacccggcatcctcatgctattccaggctctatcctaagtcacaaaacctctagagatcgcggctctctcggccacgtgaccttcggcggcctgtcctccagcaccgggcacttgcccagtcacatcacccatggggatccaaatactggccatgtgacattcggtagcacttcagcatcctcaggcggccatgtgactttcagaccggtgtctgccagctcctatttgggctccacgggatacgttggatcgtcccgtgggggagaaaatacggaagggggggtggaaagtgggggtaccgcatccgactcatctggcggattaggcagttcacgtgaccatgtctctagcactggccccgccagctcaacaggccctggctcatctacttccaaggactcacggggctag

SEQ ID NO: 238968 - DNA, 2013 bp, Artificial Sequence
  derived and/or modified sequence
atggagggggagcggcgggcctacagcaaggaggtgcaccagaggatcaacaagcagctggaggagatccggcggctggaggaggtgcggggggacctgcaggtgcagatctctgctgcccagaaccaggtgaagaggctgcgggacagccagaggctggagaacatggaccggctgctgaagggccgggcccaggtgcaggccgagattgaggagctgcaggagcagacccgggccctggacaagcagatccaggagtgggagacccgcatcttcacccacagcaagaatgtgcgcagccctggcttcatcctggaccagaaggtgaagatcagaagacgcatccgcatcctggagaaccagctggacagagtgacctgccactttgacaaccagctggtgagaaatgctgccctgcgggaggagctggacctgctgagaattgacaggaaccgctacctgaatgtggacaggaagctgaagaaggagatccaccacctgcaccacctggtgtccaccctcatcctgagcagcaccagcgcctatgctgtgcgggaggaggccaaggccaagatgggcctgctgcgggagagagctgagaaggaggaggcccagagcgagatggaggcccaggtgctgcagaggcagatcctgcacctggagcagctgcaccacttcctgaagctgaagaacaatgaccggcagcctgaccctgatgtgctggagaagcgggagaagcaggccggggaggtggccgagggcgtgtggaagaccagccaggagcggctggtgctgtgctatgaagatgccctgaacaagctgagccagctgatgggagagagtgaccctgacctgctggtgcagaagtacctggagattgaggagaggaactttgctgagttcaacttcatcaatgagcagaacctggagctggagcacgtgcaggaggagatcaaggagatgcaggaggccctggtgtctgcccgggccagcaaggatgaccagcacctgctgcaggagcagcagcagaaggtgctgcagcagaggatggacaaggtgcacagcgaggccgagcggctggaggcccgcttccaggatgtgcggggccagctggagaagctgaaggctgacatccagctgctcttcaccaaggcccactgtgacagctccatgattgatgacctgctgggcgtgaagacctccatgggagaccgggacatgggcctcttcctgagcctcatcgagaagaggctggtggagctgctgactgtgcaggccttcctgcacgcccagagcttcaccagcctggctgatgctgccctgctggtgctgggccagagcctggaggacctgcccaagaagatggcccccctgcagcccccagacaccctggaggaccccccaggctttgaggccagtgatgactaccccatgagccgggaggagctgctgagccaggtggagaagctggtggagctgcaggagcaggccgaggcccagaggcagaaggacctggccgctgctgctgccaagctggatggcaccctgtctgtggacctggccagcacccagagagctggcagcagcacagtgctggtgcccaccaggcacccccacgccatccctggcagcatcctgagccacaagaccagccgggaccggggcagcctgggccacgtgaccttcggcggcctgagcagcagcacaggccacctgcccagccacatcacccacggggaccccaacacaggccacgtgaccttcggcagcaccagcgccagcagcggcggccacgtgaccttccggcctgtgtctgccagcagctacctgggcagcacaggctacgtgggcagcagcagaggaggagaaaatacagaaggaggagtggagagcggcggcacagccagtgacagcagcggcggcctgggcagcagccgggaccacgtgagcagcacaggccctgccagcagcacaggccctggcagcagcaccagcaaggacagccggggctag

SEQ ID NO: 238969 - DNA, 2013 bp, Artificial Sequence
  derived and/or modified sequence
atggagggcgagcggcgggcctacagcaaggaggtgcaccagcggatcaacaagcaactggaggagattcggcggctcgaagaagtgcgcggagatttgcaggtgcagatctcagccgcgcaaaaccaagtgaagagactgagagatagccaaagactggagaatatggaccgtcttctgaaaggcagggctcaagtgcaggccgagattgaggagctgcaggaacagacccgcgccctggataagcagatccaggaatgggaaactcgaatctttactcacagcaaaaacgtacgctcacccggttttattctcgaccaaaaagtgaagattagacggagaataagaatccttgagaatcaattggacagagtgacatgccatttcgacaatcagctcgttaggaatgccgctctgcgcgaggagctcgatctgttgagaattgatcggaatcgttacctgaatgtcgacagaaagctgaagaaagagatccatcacctccaccacctggtctccacgctgatcctgtccagtacatctgcctacgctgtgcgggaggaggcaaaggccaagatggggttgttgcgtgagagagccgagaaagaggaggcccaatcggagatggaagcccaggtcctgcaaaggcaaatcctccatctggaacaactgcatcactttctgaaactgaaaaacaatgatagacagcccgaccctgatgtgttggagaaacgagagaagcaggcaggagaggtcgcagagggagtctggaagacttcccaggagcggctcgttctgtgctacgaagacgccctgaacaagctctcccagctcatgggggaaagtgaccctgatctgctcgtgcaaaagtacctggagatcgaagaaaggaacttcgcggaatttaacttcatcaacgagcaaaacctcgaactcgaacatgttcaggaggagattaaggaaatgcaggaagccctggtgtcagcacgggcctcaaaagacgaccagcacttactccaagaacagcagcagaaggtgctccaacagaggatggataaggtgcacagcgaagccgagcgcttggaagccagatttcaagacgtccggggccagttggagaaacttaaagccgacatccaactgctgtttactaaggcgcactgcgactcctctatgatagatgacctgctcggagtgaagacatccatgggagatcgcgacatgggcctgttccttagcctgattgaaaaacgcttggtcgagttattgactgttcaagcttttttacacgctcagagcttcacatccctggctgatgccgctctgttggtgctcgggcagtccctcgaggacctccctaaaaaaatggcccccttgcagccccccgacacattagaggatccgccagggttcgaggccagcgacgactaccctatgtcacgagaagaacttctcagccaggtcgaaaaattagttgagcttcaagagcaggcagaggcacagagacagaaagatctggccgccgctgctgccaaactcgacggtaccctctcagtggatctggcctctacgcaacgcgcggggtcctcaaccgtgctggtacccacccgccatccacacgctattcccgggagtattttgtcacacaaaactagccgtgaccggggctcgctgggccatgtgactttcgggggcctgtcttcctcaacggggcatttgccgtctcatattacacacggcgaccctaacactggccacgtcacttttggtagcaccagtgcctcatctggcggacacgtgacatttcggccggtgtccgcatcttcatacctgggatccactgggtacgtggggagctcccgaggtggggagaacaccgagggcggagtggagtccggcggaactgcttccgactcatcaggaggcctgggcagcagtcgtgaccacgtcagctccacagggcctgcgagcagtacgggccctggatccagcacttctaaggacagcaggggctag

SEQ ID NO: 238970 - DNA, 2013 bp, Artificial Sequence
  derived and/or modified sequence
atggagggggagagaagagcttactccaaagaggtgcaccagagaataaataaacagctggaggagataagacgcctggaggaggtccgcggtgatctgcaggtgcagatctctgcagcccagaaccaggtgaaacgcttgagggactcccagcgtctggagaatatggatagattgctaaaggggcgtgcccaagttcaggccgagatcgaggagctgcaggaacaaaccagagcccttgataaacagatccaggagtgggagactcggattttcactcatagcaagaacgtccgctcccccggattcattttggaccagaaagttaaaattaggaggaggatccggattctggaaaaccagctcgaccgcgtgacttgccactttgataaccagttggtgcgtaatgcagccctgagagaggagcttgacttactgcgcatagatcggaaccggtacctgaatgtcgacagaaaactaaaaaaggagatccaccacctccatcacctcgtcagcacgctgattctgagctcaactagcgcctacgcggtacgggaagaagcgaaggccaagatggggttgctgcgcgagagggcggaaaaagaggaggcccagtccgagatggaagcccaggtgctgcagagacaaattttgcacttggaacaactgcatcactttttgaagcttaagaataatgatcggcagccggacccagacgtgttagaaaagagagagaaacaagctggtgaggtcgccgagggagtgtggaagacaagccaggagagactcgtgctctgctatgaagacgcgctcaacaagttgagccaactcatgggagagagcgatccagatcttctggtacagaaatatctggagattgaggagcgaaattttgctgagtttaacttcattaatgagcagaaccttgaattggaacacgtgcaggaagagatcaaggagatgcaggaggccctggttagtgctcgggcatcaaaggacgatcagcacctgcttcaagagcagcagcagaaggtgttacagcagagaatggacaaagtgcactccgaggcagagcgcctggaagcccgttttcaagatgtgcggggacagttggaaaagctgaaagccgatatacagctgctcttcactaaggcgcactgcgacagctccatgatcgatgacctcctgggagttaagaccagcatgggggacagagacatgggtttatttctgtccctgatcgagaagcgcctggtggagttgctcacagtgcaggccttcttgcacgctcaatcctttactagcctcgctgacgccgcactgctagttcttggccaaagcctggaggacttacccaagaagatggccccattgcagcccccagataccctcgaagaccccccagggtttgaggcttccgatgattatcctatgtcgagagaagagcttctgagtcaggtggaaaaactggtggaattacaagaacaggccgaagcacaaaggcaaaaggatctagctgccgctgcggcaaagttggatgggaccctctcagttgacctcgcctccacccaacgcgcaggctcaagcacagtcttagttcctacccgccatcctcatgcgatccccggaagcatcttgtcacataaaacttcccgagaccgcggtagcctaggacacgtgacattcgggggactgtccagctcaactgggcacctgcccagccatatcacccacggcgaccccaacacgggacacgtgactttcgggtcgacctcagcaagttctggcggtcacgtgaccttccgaccggtgtccgcctcctcatacctaggttccaccggctacgtcggatcctcccgtggcggtgagaacactgaagggggtgtggaatctggcggtactgcatcggacagttccgggggattgggctcttcccgagaccacgtatcaagcaccggcccagccagttctaccggacctggaagcagtacatcaaaagacagcagaggctag

SEQ ID NO: 238971 - protein, 553 aa, Artificial Sequence
  derived and/or modified sequence
MAFSELLDLVGGLGRFQVLQTMALMVSIMWLCTQSMLENFSAAVPSHRCWAPLLDNSTAQASILGSLSPEALLAISIPPGPNQRPHQCRRFRQPQWQLLDPNATATSWSEADTEPCVDGWVYDRSIFTSTIVAKWNLVCDSHALKPMAQSIYLAGILVGAAACGPASDRFGRRLVLTWSYLQMAVMGTAAAFAPAFPVYCLFRFLLAFAVAGVMMNTGTLLMEWTAARARPLVMTLNSLGFSFGHGLTAAVAYGVRDWTLLQLVVSVPFFLCFLYSWWLAESARWLLTTGRLDWGLQELWRVAAINGKGAVQDTLTPEVLLSAMREELSMGQPPASLGTLLRMPGLRFRTCISTLCWFAFGFTFFGLALDLQALGSNIFLLQMFIGVVDIPAKMGALLLLSHLGRRPTLAASLLLAGLCILANTLVPHEMGALRSALAVLGLGGVGAAFTCITIYSSELFPTVLRMTAVGLGQMAARGGAILGPLVRLLGVHGPWLPLLVYGTVPVLSGLAALLLPETQSLPLPDTIQDVQNQAVKKATHGTLGNSVLKSTQF

SEQ ID NO: 238972 - DNA, 1662 bp, Artificial Sequence
  derived and/or modified sequence
atggcattttcagagctgttggatctggtcggggggcttggccgcttccaggtgctgcaaaccatggcactgatggtctctattatgtggttgtgcacacaatctatgctggagaacttttccgccgcagtgccctcccatcggtgctgggctcctcttctggacaattctaccgcacaggcgtccatcttgggctcgttgtccccggaggccttgctggcaatcagcattccacccggccctaatcagagacctcatcagtgtaggcgcttccgacaacctcagtggcagttgctggacccaaatgccacagctacctcgtggagtgaagctgacaccgaaccctgtgtcgatggatgggtctatgaccggtctatatttacgagcacaattgtggcgaagtggaacttggtctgtgactcacacgcactcaagcctatggcacagtccatctaccttgcaggaattctggttggggccgccgcctgcggccctgcctctgatcggttcggcagacgtcttgtcctcacgtggtcatatctgcaaatggctgtaatgggaacggccgctgcattcgctcccgcctttcctgtctattgtctgttcagatttttgctggcttttgccgtcgctggcgtgatgatgaataccggtaccttattgatggagtggacagctgcccgggccaggccgctggtgatgaccctgaattctctcggattttccttcggccatggactcaccgccgccgtggcatacggcgtcagagattggaccttgttacagctcgtggtctccgtccctttctttctatgttttctgtacagctggtggctggcggagagtgcacgatggcttctgaccaccggccgcctcgactggggcttgcaagaattgtggagggtggccgccataaatggcaagggggcggtgcaagacacactgacccccgaagttctactcagtgccatgcgcgaagaactctcaatggggcagccacctgcgagtctgggcactctgctgcggatgcccggcctgcgcttcaggacttgtatctcaaccctgtgttggtttgcttttgggtttactttttttggcctggccctggaccttcaagccttggggtcaaatatatttctgttacagatgtttatcggtgtggttgacatccctgccaaaatgggcgccctcctattactatcacatctgggaaggcgcccaacgcttgccgcctctctgttattagctggactgtgtatacttgccaacacactggtccctcacgaaatgggtgccctgagatcagcattagctgtgctgggcctgggtggggtgggggccgcctttacttgtataaccatttactccagtgagctgtttcctaccgtgctccgcatgacggcagtggggctcggacaaatggccgcgagaggaggggcaatattagggcctctggtgcgcctcctcggagtgcacggaccctggctgcctttgctggtgtacggtacagtgcctgtcctgtcgggactggccgctctgcttctccctgagacccagtccttgccactgcccgacacaatccaagacgtgcagaatcaggccgtcaagaaggccactcatggcacgttgggcaatagcgtccttaagtcaactcagttttag

SEQ ID NO: 238973 - DNA, 1662 bp, Artificial Sequence
  derived and/or modified sequence
atggccttcagcgagctgctggacctggtgggcggcctgggccgcttccaggtgctgcagaccatggccctgatggtgtccatcatgtggctgtgcacccagagcatgctggagaacttctctgctgctgtgcccagccaccgctgctgggcccccctgctggacaacagcacagcccaggccagcatcctgggcagcctgagccctgaggccctgctggccatcagcatccccccaggccccaaccagaggccccaccagtgccgccgcttccggcagccccagtggcagctgctggaccccaatgccacagccacctcctggagcgaggccgacacagagccctgtgtggatggctgggtgtatgacaggagcatcttcaccagcaccatcgtggccaagtggaacctggtgtgtgacagccacgccctgaagcccatggcccagagcatctacctggccggcatcctggtgggcgctgctgcctgtggccctgccagtgaccgcttcggccggcggctggtgctgacctggagctacctgcagatggctgtgatgggcacagctgctgcctttgccccagccttccctgtgtactgcctcttccgcttcctgctggcctttgctgtggccggcgtgatgatgaacacaggcaccctgctgatggagtggacagctgcccgggcccggcccctggtgatgaccctgaacagcctgggcttctcctttggacatggcctgacagctgctgtggcctatggagtgcgggactggaccctgctgcagctggtggtgtctgtgcccttcttcctgtgcttcctgtacagctggtggctggccgagagcgcccgctggctgctgaccaccggccgcctggactggggcctgcaggagctgtggagggtggccgccatcaacgggaaaggagctgtgcaggacaccctgaccccagaggtgctgctgagcgccatgagggaggagctgtccatgggccagcccccagccagcctgggcaccctgctgaggatgcctggcctgcgcttccgcacctgcatcagcaccctgtgctggtttgccttcggcttcaccttcttcggcctggccctggacctgcaggccctgggcagcaacatcttcctgctgcagatgtttattggagtggtggacatcccagccaagatgggcgccctgctgctgctgagccacctgggcagaagacccaccctggccgccagcctgctgctggccggcctgtgcatcctggccaacaccctggtgccccatgagatgggcgccctgcggagcgccctggccgtgctgggcctgggcggcgtgggcgccgccttcacctgcatcaccatctacagcagcgagctgttccccaccgtgctgaggatgacagctgtgggcctgggccagatggccgcccggggcggggccatcctgggccccctggtgcggctgctgggcgtgcacggcccctggctgcccctgctggtgtatggaacagtgcctgtgctgagcggcctggccgccctgctgctgcctgagacccagagcctgcccctgcctgacaccatccaggatgtgcagaaccaggccgtgaagaaggccacccacggcaccctgggcaacagcgtgctgaagagcacccagttctag

SEQ ID NO: 238974 - DNA, 1662 bp, Artificial Sequence
  derived and/or modified sequence
atggccttcagcgagctgctggacctggtgggcggcctgggccggttccaggtcctccaaactatggctttgatggtcagtatcatgtggctctgcactcaaagtatgctggagaattttagcgccgctgtgccaagtcatcgctgttgggccccattgctggacaacagcacggcccaggcatccattctaggaagcctgtcccccgaggctttgctggcgatctctattcctcccgggcctaaccaacggccacatcagtgccgtcgctttaggcagccgcagtggcagttattagaccctaacgctaccgccactagctggagcgaagccgatacagagccatgtgttgatggatgggtctatgatcggagtatttttacatctaccatcgtggcaaagtggaacctggtgtgtgattctcatgcgctcaagcccatggcccagagcatctatctcgcaggtattctggtcggcgccgctgcctgcgggcccgcctctgatcgattcggccgccgactggtcttgacatggtcttacttgcagatggccgtaatgggcaccgcggctgcatttgccccagcattccccgtgtactgtctgttccgattcctgctagcattcgccgtcgccggcgtcatgatgaacactggcacgctcctgatggagtggactgccgcccgcgcacgccccctcgtgatgactctgaacagtctggggttcagcttcggccacggactgaccgctgcagttgcatacggtgtcagagactggactctgttgcagctggtggttagcgtacctttctttctgtgcttcctttattcatggtggctggcggagagcgcaaggtggctgctgaccacggggcggctcgactggggactccaagaactctggagagtggctgccattaatgggaagggggcagtacaggacacccttacgccagaagtactgctgtctgccatgagagaagaactcagcatgggacagcccccagcgtcactggggactcttctgagaatgccaggcttgagattccgtacgtgtatcagcactctgtgctggtttgccttcggctttaccttctttgggctggccctggacttacaagctctaggaagcaacatcttcctcctacagatgttcatcggggtggtcgatattcctgcgaagatgggagcgctgcttctcttgagccatctgggtagaaggcccaccctggctgcctctcttctactcgctggcctctgcatcctggctaacacgcttgtgcctcacgagatgggggcgctgcgaagcgcactcgccgtgttggggctgggaggggtcggtgccgcttttacctgtatcactatctacagcagtgaactgttccccactgtgctgcgcatgactgccgtgggtctggggcaaatggcagctcgtggcggcgctattttgggtcctctcgttaggttattgggcgtgcacggcccttggctccccctgctggtttatggcacggtcccagttttgtcaggtctggcagcgcttctgcttcctgagacccagtctctccctcttccggacactatacaggacgtccaaaaccaagccgtgaagaaggcaacacacggaactttggggaacagcgtgctaaaatctactcagttctag

SEQ ID NO: 238975 - DNA, 1662 bp, Artificial Sequence
  derived and/or modified sequence
atggcattcagcgaactgctcgatctcgtgggcggtctgggaagattccaggtcctccaaaccatggctctcatggtttctattatgtggttgtgtactcagagtatgctcgagaatttctccgccgcagttccctctcataggtgttgggcccctcttctggataattcaaccgcacaggcatccattttgggctccctgtcacctgaggccctccttgccatttcaatccccccaggtcctaatcagcgcccacatcagtgtcgccgattccggcagccccagtggcagctcttagacccaaatgctacagccacatcatggagtgaggctgacaccgagccttgtgtcgacggctgggtgtatgaccgatcaatctttacttcgaccatagtcgccaagtggaacctagtgtgcgacagccatgcactcaagcctatggcgcagtctatttacctcgctggaatcctcgttggtgctgcagcatgtgggcctgcctcagacaggttcggcaggcgcttggtgctaacctggtcttacctgcagatggccgtaatgggcactgccgcagccttcgcacctgcgtttcctgtgtactgtctgtttcgatttctgctggcctttgctgttgccggagtcatgatgaacacagggactctcctcatggagtggaccgccgcacgggctcgccctctggtaatgaccttgaacagtctgggctttagctttgggcatgggctgaccgccgcagtagcttatggtgtgagagactggacactacttcagcttgtggtgagcgtgcccttctttctctgcttcttatattcttggtggctggctgagtcagccagatggctgctgaccaccggccgactcgactgggggctccaggaactgtggagagtggcagccataaacggaaagggcgcagtccaggacactctcactcccgaggtactgctttcagcaatgcgggaggaattgagtatgggacagcctcctgctagccttgggacgctgctgcgcatgccgggactcaggttccggacatgtatttccacactttgttggttcgcatttggctttacgttcttcggccttgccctcgacctccaggcgctcggaagcaatatcttcctattgcagatgtttataggtgttgtagatattccagccaaaatgggcgctcttttattactgtcacatctcggacgtcgcccaacattagcagccagtctgcttttagcaggcctatgtattctggctaacactctagtgccgcacgagatgggtgccctccggagcgccttggctgtgttaggccttggaggcgttggagctgccttcacttgcattacaatttattccagcgagctgttccccaccgtactgcggatgacagctgtcgggttgggccagatggccgctagaggcggagccatattggggcctctggtgcgccttttgggcgtgcacgggccttggctgcccctcttggtgtacggcacagtgccggtgctttcaggcctggcagccctgctgttgcccgaaacacagtcactccctctgcccgacactattcaggacgtgcagaatcaggcggtcaaaaaggcgactcacggaaccctgggaaactctgtgttgaaaagcacacaattttag

SEQ ID NO: 238976 - DNA, 3206 bp, Artificial Sequence
  derived and/or modified sequence
ccacagcaggtgagtggaggcaggagccacgggtggggccaggccacacagcctgggaggcgcaggggctgggcagctgccagtgacccaagcccacacagagacttgcacagctgccccagccccaaattagggggatcccctggcccaccttctcttggctcagccactctgggaggtgggcacacaggggcaccgaagggagcaggcagccctggcatcccacagccgccaggagaaaaacttaggcctccccaagacctggcacagagcaggccggccctggcccccaagcagaggaggctgcacctccctcgcgtctgtgcctgcctcaacgcgggttaaactttgaccaaggaaatgattgctaaactcgattccataagtgtcaccggtcacactttaattccagtctaaaattaaagtcttcagtctccacattccctactttccaaattcagctttcccgggaggtctggagcagctgcctctctggggagatgctggaggtctcggaatcacctcacgcggcctcagggcccagttggagccaccccaagtgacaccagcaggcagatgaccagagagcctgagcctccggccccgagtctgtgaagcctagccgctgggctggagaagccactgtgggcaccaccgtgggggaaacaggcccgttgccctggcctctttgccctgggccagcctttgtgaagtgggcccctcttctgggccccttgagtaggttccatggcattttctgaactcctggacctcgtgggtggcctgggcaggttccaggttctccagacgatggctctgatggtctccatcatgtggctgtgtacccagagcatgctggagaacttctcggccgccgtgcccagccaccgctgctgggcacccctcctggacaacagcacggctcaggccagcatcctagggagcttgagtcctgaggccctcctggctatttccatcccgccgggccccaaccagaggccccaccagtgccgccgcttccgccagccacagtggcagctcttggaccccaatgccacggccaccagctggagcgaggccgacacggagccgtgtgtggatggctgggtctatgaccgcagcatcttcacctccacaatcgtggccaagtggaacctcgtgtgtgactctcatgctctgaagcccatggcccagtccatctacctggctgggattctggtgggagctgctgcgtgcggccctgcctcagacaggtttgggcgcaggctggtgctaacctggagctaccttcagatggctgtgatgggtacggcagctgccttcgcccctgccttccccgtgtactgcctgttccgcttcctgttggcctttgccgtggcaggcgtcatgatgaacacgggcactctcctgatggagtggacggcggcacgggcccgacccttggtgatgaccttgaactctctgggcttcagcttcggccatggcctgacagctgcagtggcctacggtgtgcgggactggacactgctgcagctggtggtctcggtccccttcttcctctgctttttgtactcctggtggctggcagagtcggcacgatggctcctcaccacaggcaggctggattggggcctgcaggagctgtggagggtggctgccatcaacggaaagggggcagtgcaggacaccctgacccctgaggtcttgctttcagccatgcgggaggagctgagcatgggccagcctcctgccagcctgggcaccctgctccgcatgcccggactgcgcttccggacctgtatctccacgttgtgctggttcgcctttggcttcaccttcttcggcctggccctggacctgcaggccctgggcagcaacatcttcctgctccaaatgttcattggtgtcgtggacatcccagccaagatgggcgccctgctgctgctgagccacctgggccgccgccccacgctggccgcatccctgttgctggcagggctctgcattctggccaacacgctggtgccccacgaaatgggggctctgcgctcagccttggccgtgctggggctgggcggggtgggggctgccttcacctgcatcaccatctacagcagcgagctcttccccactgtgctcaggatgacggcagtgggcttgggccagatggcagcccgtggaggagccatcctggggcctctggtccggctgctgggtgtccatggcccctggctgcccttgctggtgtatgggacggtgccagtgctgagtggcctggccgcactgcttctgcccgagacccagagcttgccgctgcccgacaccatccaagatgtgcagaaccaggcagtaaagaaggcaacacatggcacgctggggaactctgtcctaaaatccacacagttttagcctcctggggaacctgcgatgggacggtcagaggaagagacttcttctgttctctggagaaggcaggaggaaagcaaagacctccatttccagaggcccagaggctgccctctgaggtccccactctcccccagggctgcccctccaggtgagccctgcccctctcacagtccaaggggcccccttcaatactgaaggggaaaaggacagtttgattggcaggaggtgacccagtgcaccatcaccctgccctgccctcgtggcttcggagagcagaggggtcaggcccaggggaacgagctggccttgccaaccctctgcttgactccgcactgccacttgtccccccacacccgtccacctgcccagagctcagagctaaccaccatccatggtcaagacctctcctagctccacacaagcagtagagtctcagctccacagctttacccagaagccctgtaagcctggcccctggcccctccccatgtccctccaggcctcagccacctgcccgccacatcctctgcctgctgtccccttcccaccctcatccctgaccgactccacttaacccccaaacccagccccccttccaggggtccagggccagcctgagatgcccgtgaaactcctacccacagttacagccacaagcctgcctcctcccaccctgccagcctatgagttcccagagggttggggcagtcccatgaccccatgtcccagctccccacacagcgctgggccagagaggcattggtgcgagggattgaataaagaaacaaatgaatggc

SEQ ID NO: 238977 - DNA, 1662 bp, Artificial Sequence
  derived and/or modified sequence
atggccttcagcgagctgctggacctggtgggcggcctgggcagattccaggtgctgcagaccatggccctgatggtgagcatcatgtggctgtgcacccagagcatgctggagaacttcagcgccgccgtgcccagccacagatgctgggcccccctgctggacaacagcaccgcccaggccagcatcctgggcagcctgagccccgaggccctgctggccatcagcatcccccccggccccaaccagagaccccaccagtgcagaagattcagacagccccagtggcagctgctggaccccaacgccaccgccaccagctggagcgaggccgacaccgagccctgcgtggacggctgggtgtacgacagaagcatcttcaccagcaccatcgtggccaagtggaacctggtgtgcgacagccacgccctgaagcccatggcccagagcatctacctggccggcatcctggtgggcgccgccgcctgcggccccgccagcgacagattcggcagaagactggtgctgacctggagctacctgcagatggccgtgatgggcaccgccgccgccttcgcccccgccttccccgtgtactgcctgttcagattcctgctggccttcgccgtggccggcgtgatgatgaacaccggcaccctgctgatggagtggaccgccgccagagccagacccctggtgatgaccctgaacagcctgggcttcagcttcggccacggcctgaccgccgccgtggcctacggcgtgagagactggaccctgctgcagctggtggtgagcgtgcccttcttcctgtgcttcctgtacagctggtggctggccgagagcgccagatggctgctgaccaccggcagactggactggggcctgcaggagctgtggagagtggccgccatcaacggcaagggcgccgtgcaggacaccctgacccccgaggtgctgctgagcgccatgagagaggagctgagcatgggccagccccccgccagcctgggcaccctgctgagaatgcccggcctgagattcagaacctgcatcagcaccctgtgctggttcgccttcggcttcaccttcttcggcctggccctggacctgcaggccctgggcagcaacatcttcctgctgcagatgttcatcggcgtggtggacatccccgccaagatgggcgccctgctgctgctgagccacctgggcagaagacccaccctggccgccagcctgctgctggccggcctgtgcatcctggccaacaccctggtgccccacgagatgggcgccctgagaagcgccctggccgtgctgggcctgggcggcgtgggcgccgccttcacctgcatcaccatctacagcagcgagctgttccccaccgtgctgagaatgaccgccgtgggcctgggccagatggccgccagaggcggcgccatcctgggccccctggtgagactgctgggcgtgcacggcccctggctgcccctgctggtgtacggcaccgtgcccgtgctgagcggcctggccgccctgctgctgcccgagacccagagcctgcccctgcccgacaccatccaggacgtgcagaaccaggccgtgaagaaggccacccacggcaccctgggcaacagcgtgctgaagagcacccagttctag

SEQ ID NO: 238978 - protein, 141 aa, Artificial Sequence
  derived and/or modified sequence
MWVLGIAATFCGLFLLPGFALQIQCYQCEEFQLNNDCSSPEFIVNCTVNVQDMCQKEVMEQSAGIMYRKSCASSAACLIASAGYQSFCSPGKLNSVCISCCNTPLCNGPRPKKRGSSASALRPGLRTTILFLKLALFSAHC

SEQ ID NO: 238979 - protein, 164 aa, Artificial Sequence
  derived and/or modified sequence
MQAPRAAPAAPLSYDRRPRDSGRMWVLGIAATFCGLFLLPGFALQIQCYQCEEFQLNNDCSSPEFIVNCTVNVQDMCQKEVMEQSAGIMYRKSCASSAACLIASAGYQSFCSPGKLNSVCISCCNTPLCNGPRPKKRGSSASALRPGLRTTILFLKLALFSAHC

SEQ ID NO: 238980 - DNA, 426 bp, Artificial Sequence
  derived and/or modified sequence
atgtgggtgctgggcatcgccgccaccttctgcggcctgttcctgctgcccggcttcgccctgcagatccagtgctaccagtgcgaggagttccagctgaacaacgactgcagcagccccgagttcatcgtgaactgcaccgtgaacgtgcaggacatgtgccagaaggaggtgatggagcagagcgccggcatcatgtacagaaagagctgcgccagcagcgccgcctgcctgatcgccagcgccggctaccagagcttctgcagccccggcaagctgaacagcgtgtgcatcagctgctgcaacacccccctgtgcaacggccccagacccaagaagagaggcagcagcgccagcgccctgagacccggcctgagaaccaccatcctgttcctgaagctggccctgttcagcgcccactgctag

SEQ ID NO: 238981 - DNA, 426 bp, Artificial Sequence
  derived and/or modified sequence
atgtgggtactcggaattgctgctaccttttgcggcttgttcctgctgcccgggttcgccttgcagatccaatgttaccagtgtgaagagttccagctaaataacgactgctcctcacctgagtttatagtgaattgtacggtcaacgttcaggacatgtgtcagaaggaagtgatggaacagtccgccggcatcatgtacaggaagagctgtgcctcctccgctgcgtgtctcatcgcatctgccggctatcagagtttctgctctcctgggaaacttaattctgtgtgcatttcctgctgcaatacccccctctgcaacggacctaggcccaagaaacgggggagcagcgcttccgctttgagacccggcctcagaacgacaatcctgttcttgaagctagcactcttttctgctcactgttag

SEQ ID NO: 238982 - DNA, 1033 bp, Artificial Sequence
  derived and/or modified sequence
gaaatgaaagaagggggagagggagggagggagggagagaaggagcctgaggcagatatggaacgatctctgcagaggaattacaaagaaagtcatttaagcccctttacagaccagctctgctgggaggatgcagaaataaatgatcagcgtcccggcgtgagagagctgcccccagaagtggccgggggagaaaagggtgaagaggagctaaagcttaggaggcgatttccacggaaatggatgctccctaaggatgtgcggaaaggggatgggaatgtgcggattgggggcgggggcaccaacgcactccggcgggcaagcggtctcccgcaccacctgctgcaaggctcgggaaggaaggcgaagatagcaccggggcatccccgggagtccgcaaggctttgcgctgcaaatccagtgctaccagtgtgaagaattccagctgaacaacgactgctcctcccccgagttcattgtgaattgcacggtgaacgttcaagacatgtgtcagaaagaagtgatggagcaaagtgccgggatcatgtaccgcaagtcctgtgcatcatcagcggcctgtctcatcgcctctgccgggtaccagtccttctgctccccagggaaactgaactcagtttgcatcagctgctgcaacacccctctttgtaacgggccaaggcccaagaaaaggggaagttctgcctcggccctcaggccagggctccgcaccaccatcctgttcctcaaattagccctcttctcggcacactgctgaagctgaaggagatgccaccccctcctgcattgttcttccagccctcgcccccaaccccccacctccctgagtgagtttcttctgggtgtccttttattctgggtagggagcgggagtccgtgttctcttttgttcctgtgcaaataatgaaagagctcggtaaagcattctgaataaattcagcctgactgaattttcagtatgtacttgaaggaaggaggtggagtgaaagttcacccccatgtctgtgtaaccgga

SEQ ID NO: 238983 - DNA, 426 bp, Artificial Sequence
  derived and/or modified sequence
atgtgggtgctgggcattgctgccaccttctgtggcctcttcctgctgcccggctttgccctgcagatccagtgctaccagtgtgaggagttccagctgaacaatgactgcagcagccctgagttcatcgtgaactgcaccgtgaatgtgcaggacatgtgccagaaggaggtgatggagcagagcgctggcatcatgtacaggaagagctgtgccagcagcgctgcctgcctgattgccagcgctggctaccagagcttctgcagccctgggaagctgaacagcgtgtgcatcagctgctgcaacacccccctgtgcaatggcccccggcccaagaagaggggcagcagcgccagcgccctgcggcccggcctgcggaccaccatcctcttcctgaagctggccctcttcagcgcccactgctag

SEQ ID NO: 238984 - DNA, 426 bp, Artificial Sequence
  derived and/or modified sequence
atgtgggtgctgggcatcgccgccaccttctgcggcctgttcctgcttccgggtttcgccctacagatccagtgctatcagtgtgaagaattccagctgaacaacgattgcagctccccagagttcattgtgaactgtacagtcaacgtgcaggatatgtgtcagaaggaggtgatggagcagagcgctggcatcatgtaccggaagtcctgcgcttcatccgcagcatgtttgatagcatccgccgggtaccagagcttttgttccccgggcaaactgaactcagtttgtatctcatgctgtaacacacctctctgcaacgggcccaggccaaagaagagaggcagcagcgcgtccgcccttcgccccggacttagaaccacaatcctcttccttaagctcgcactcttttcagcacattgctag

SEQ ID NO: 238985 - DNA, 426 bp, Artificial Sequence
  derived and/or modified sequence
atgtgggtactcggcatcgcagcgactttttgtggtctcttcctcctgccaggcttcgctcttcagatacaatgttatcaatgcgaggagttccagctcaacaatgattgctctagtcccgagttcatagttaactgtaccgtcaatgtacaggatatgtgtcagaaggaagtgatggaacaaagcgctggaataatgtatcgaaagagttgtgcatcatcagccgcatgtctcattgcaagcgcaggctaccagtcattctgcagccccggtaagctgaattctgtttgtatttcttgctgtaatactcctctgtgcaacggtcccagaccgaagaagcgcggaagttccgccagcgccctacggccaggattacggactactatcttgttcctgaaattggcgctgttcagcgcacactgttag

SEQ ID NO: 238986 - protein, 506 aa, Artificial Sequence
  derived and/or modified sequence
MIMSNTHKARLERRVTGSTNRWRLPKQPFSGDLLSLSQMCKALSIDFEEALRNPDRLCISQIQKFFFENFKNKDIQSGEADVILECLGFKWELHQPQLFQSETLAKLYLKALAQGTTHPLRELEELLRAQSPKKTKEKSPAKRIIISLKINDPLVTKVAFATALKNLYMSEVEINLEDLLGVLASAHILQFSGLFQRCVDVMIARLKPSTIKKFYEAGCKYKEEQLTTGCEKWLEMNLVPLGGTQIHLHKIPQDLLHKVLKSPRLFTFSEFHLLKTMLLWVFLQLNYKIQAIPTYETVMTFFKSFPENCCFLDRDIGRSLRPLFLCLRLHGITKGKDLEVLRHLNFFPESWLDQVTVNHYHALENGGDMVHLKDLNTQAVRFGLLFNQENTTYSKTIALYGFFFKIKGLKHDTTSYSFYMQRIKHTDLESPSAVYEHNHVSLRAARLVKYEIRAEALVDGKWQEFRTNQIKQKFGLTTSSCKSHTLKIQTVGIPIYVSFAFIFPAS

SEQ ID NO: 238987 - DNA, 1521 bp, Artificial Sequence
  derived and/or modified sequence
atgatcatgagcaacacccacaaggccagactggagagaagagtgaccggcagcaccaacagatggagactgcccaagcagcccttcagcggcgacctgctgagcctgagccagatgtgcaaggccctgagcatcgacttcgaggaggccctgagaaaccccgacagactgtgcatcagccagatccagaagttcttcttcgagaacttcaagaacaaggacatccagagcggcgaggccgacgtgatcctggagtgcctgggcttcaagtgggagctgcaccagccccagctgttccagagcgagaccctggccaagctgtacctgaaggccctggcccagggcaccacccaccccctgagagagctggaggagctgctgagagcccagagccccaagaagaccaaggagaagagccccgccaagagaatcatcatcagcctgaagatcaacgaccccctggtgaccaaggtggccttcgccaccgccctgaagaacctgtacatgagcgaggtggagatcaacctggaggacctgctgggcgtgctggccagcgcccacatcctgcagttcagcggcctgttccagagatgcgtggacgtgatgatcgccagactgaagcccagcaccatcaagaagttctacgaggccggctgcaagtacaaggaggagcagctgaccaccggctgcgagaagtggctggagatgaacctggtgcccctgggcggcacccagatccacctgcacaagatcccccaggacctgctgcacaaggtgctgaagagccccagactgttcaccttcagcgagttccacctgctgaagaccatgctgctgtgggtgttcctgcagctgaactacaagatccaggccatccccacctacgagaccgtgatgaccttcttcaagagcttccccgagaactgctgcttcctggacagagacatcggcagaagcctgagacccctgttcctgtgcctgagactgcacggcatcaccaagggcaaggacctggaggtgctgagacacctgaacttcttccccgagagctggctggaccaggtgaccgtgaaccactaccacgccctggagaacggcggcgacatggtgcacctgaaggacctgaacacccaggccgtgagattcggcctgctgttcaaccaggagaacaccacctacagcaagaccatcgccctgtacggcttcttcttcaagatcaagggcctgaagcacgacaccaccagctacagcttctacatgcagagaatcaagcacaccgacctggagagccccagcgccgtgtacgagcacaaccacgtgagcctgagagccgccagactggtgaagtacgagatcagagccgaggccctggtggacggcaagtggcaggagttcagaaccaaccagatcaagcagaagttcggcctgaccaccagcagctgcaagagccacaccctgaagatccagaccgtgggcatccccatctacgtgagcttcgccttcatcttccccgccagctag

SEQ ID NO: 238988 - DNA, 1521 bp, Artificial Sequence
  derived and/or modified sequence
atgataatgagcaacacccataaggcccgcttggaacggagagttacaggcagcactaacagatggaggctgcccaaacaaccctttagcggcgacttgctttctctctcccagatgtgtaaggcactcagcatcgatttcgaggaggccctccggaaccctgaccgcctctgtatctcacagatccaaaagtttttcttcgaaaatttcaaaaacaaagatatccagtccggcgaggctgatgtgatcttggagtgtctgggctttaagtgggaacttcatcagcctcagctttttcagtctgaaacccttgcaaagctgtatctcaaggcattagcccaggggacaacacatcccctgagagaactagaagagctgctgcgagctcaatcacctaaaaagaccaaggagaaatccccagcaaaaaggattattatttcgttaaagattaacgatcccctcgtgaccaaggtggccttcgctactgcccttaaaaatctctacatgagcgaggttgagatcaacctggaagacctgctcggggtcctggcctccgcccacattctgcaattctctgggctgtttcagcgttgcgttgatgtgatgattgccaggcttaagcccagcactatcaaaaaattttacgaagccggatgcaaatacaaagaagagcagttaacgactggatgcgagaagtggctcgagatgaatttggttcctctcggaggcacacagattcatctccacaaaattccgcaagatcttttgcacaaggtgttgaaaagcccacgcctcttcaccttttccgagtttcatctcttaaagacaatgctcttgtgggtatttctacagctcaattacaagattcaggcaattccaacgtatgagactgtgatgactttctttaaatcatttccagaaaattgttgtttcctcgatagggacataggccggtcgctgcggcctctgtttttgtgcctccgcctgcacggcatcactaaaggcaaagatctggaagtgttgagacatttaaatttcttcccggaaagctggttggaccaggtgactgtcaaccactaccacgccttggagaacggcggtgacatggtgcatctgaaagacctcaatacacaggccgtccggttcggcctgctgtttaatcaggagaacacgacatatagcaagaccatcgcactgtatggcttttttttcaagattaagggtttgaaacacgacactacctcttacagtttctacatgcagcggattaaacacaccgatctggaatccccctccgctgtgtatgagcacaatcacgtctctctccgtgccgccaggttagtgaagtatgaaataagagcagaggccctagttgacgggaaatggcaagagtttcgtaccaaccagattaagcagaagtttggactgaccacctcatcttgtaagtcacacactctgaagatccagaccgtcggcattccaatctacgtgagtttcgcatttatatttccggcatcttag

SEQ ID NO: 238989 - DNA, 1521 bp, Artificial Sequence
  derived and/or modified sequence
atgatcatgagcaacacccacaaggcccggctggagaggagagtgacaggcagcaccaaccgctggaggctgcccaagcagcccttcagcggggacctgctgagcctgagccagatgtgcaaggccctgagcattgactttgaggaggccctgaggaacccagaccggctgtgcatcagccagatccagaagttcttctttgagaacttcaagaacaaggacatccagagcggggaggctgatgtgatcctggagtgcctgggcttcaagtgggagctgcaccagccccagctgttccagagcgagaccctggccaagctgtacctgaaggccctggcccagggcaccacccaccccctgcgggagctggaggagctgctgcgggcccagagccccaagaagaccaaggagaagagccctgccaagaggatcatcatcagcctgaagatcaatgaccccctggtgaccaaggtggcctttgccacagccctgaagaacctgtacatgtctgaggtggagatcaacctggaggacctgctgggcgtgctggccagcgcccacatcctgcagttcagcggcctcttccagagatgtgtggatgtgatgattgcccggctgaagcccagcaccatcaagaagttctatgaagctggctgcaagtacaaggaggagcagctgaccaccggctgtgagaagtggctggagatgaacctggtgcccctgggcggcacccagatccacctgcacaagatcccccaggacctgctgcacaaggtgctgaagagccccaggctcttcaccttcagcgagttccacctgctgaagaccatgctgctgtgggtgttcctgcagctgaactacaagatccaggccatccccacctatgaaacagtgatgaccttcttcaagagcttccctgagaactgctgcttcctggaccgggacatcggccgcagcctgcggcccctcttcctgtgcctgcggctgcacggcatcaccaagggcaaggacctggaggtgctgcggcacctgaacttcttccctgagagctggctggaccaggtgacagtgaaccactaccacgccctggagaatggaggagacatggtgcacctgaaggacctgaacacccaggccgtgcgcttcggcctgctcttcaaccaggagaacaccacctacagcaagaccatcgccctgtatggcttcttcttcaagatcaagggcctgaagcatgacaccaccagctacagcttctacatgcagaggatcaagcacacagacctggagagccccagcgctgtgtatgagcacaaccacgtgtccctgcgggccgcccggctggtgaagtatgagatccgggcagaggccctggtggatggcaagtggcaggagttccgcaccaaccagatcaagcagaagtttggcctgaccaccagcagctgcaagagccacaccctgaagatccagacagtgggcatccccatctacgtgtcctttgccttcatcttccctgccagctag

SEQ ID NO: 238990 - DNA, 1521 bp, Artificial Sequence
  derived and/or modified sequence
atgatcatgagcaacacccacaaggcccggctggagcggcgggtgacgggaagcacaaacaggtggaggctaccgaaacagccattctcaggtgacctgctttccctgagccagatgtgcaaggctctcagcatcgatttcgaagaggctttgcgcaaccccgatcgactgtgcatctcccagattcagaaattcttttttgagaactttaagaacaaagacatacagtctggggaagccgatgtgattctagagtgccttggcttcaagtgggagttacatcagcctcaactgttccagtctgaaacgctcgctaaactgtatctgaaagccctggcacaggggaccactcaccctctccgcgaactcgaggagttgctcagggcccagagcccaaagaaaacaaaagagaagagccccgctaaacggatcataatctctcttaagattaatgatccactcgtcacgaaagtcgcctttgccaccgcgctgaaaaatctctatatgagcgaagtagagataaatctcgaagacctgctcggtgtgcttgcatcagcgcatatcttacagttttcagggctgtttcagcggtgtgtcgatgtgatgatagctcggcttaagcccagcacgataaagaaattctacgaggcggggtgtaaatataaggaggagcaactgaccactggctgtgagaagtggcttgaaatgaacctggtgccccttggtggcactcagatccacctgcacaagatccctcaagacctcctgcacaaagtgctgaaaagccctcgcctcttcactttttctgagttccatctgttgaaaaccatgttgttgtgggtgttcctgcagttgaactataaaattcaggctatccctacttatgagactgtgatgactttctttaagtcatttcctgaaaattgttgttttctggatagagacattggccggagtctgcgaccactcttcctctgcctgagactccacggcatcactaaaggcaaagatcttgaggtgctccggcaccttaatttctttcctgagagctggctggaccaggtaactgtaaaccattatcatgccctggaaaacggaggcgacatggtccatctgaaggatctcaacacacaagccgtgagattcggtctcctgttcaatcaagaaaataccacttattcgaagaccatcgccctgtacggtttcttttttaaaatcaagggtctgaagcacgacaccaccagctactcgttttatatgcagcggataaaacacactgacttggaatcccctagcgccgtatatgaacataatcacgtctctttgcgggccgcccgcctggtgaaatacgaaatccgagccgaggcgctcgtcgacggaaaatggcaagagttccgaacaaatcagattaaacaaaagttcggtttgacaacgtcctcttgtaagtctcacaccctgaaaattcagacagtcggaattccaatttatgtgagtttcgcattcattttccccgccagctag

SEQ ID NO: 238991 - DNA, 1521 bp, Artificial Sequence
  derived and/or modified sequence
atgatcatgagtaatacgcataaagccagattagaaagacgcgtcacggggagcaccaacagatggagacttccgaagcagccgttttctggggatctgcttagcctatcccagatgtgcaaggctctgtctattgattttgaggaagcgctccgcaatccagatcgcctctgcatttcacaaatccagaagttcttctttgagaatttcaaaaacaaagatatccagagtggcgaggccgacgtcatactcgagtgtctgggcttcaagtgggagctccaccagccgcagctgtttcagtcggaaacactggctaaactctacctgaaagccctggcgcaaggtaccacccatcccctgagggagctcgaggagctgcttcgtgcgcagtccccgaagaagactaaggaaaaatctcccgctaagcgaattatcataagtttaaagattaatgacccactggtgacaaaggtcgccttcgctacagccctcaagaacttgtatatgtccgaggtggagatcaatctggaggatttgctgggtgtgctcgcttccgcacatatcctgcaatttagtggactgttccagcggtgcgtggacgtgatgattgctagactaaagccgagcaccattaaaaagttctatgaggcagggtgtaaatataaagaggaacaactgaccacagggtgcgagaaatggcttgagatgaatctagtccctcttgggggtactcagatccatctgcacaagattccgcaggacctgcttcataaggttctcaagtccccaagattgtttactttttctgagttccatctcctcaagactatgcttctctgggtgttccttcaactgaactataaaatccaggctatccccacgtacgagactgtgatgacgttttttaagtcctttcctgagaattgttgctttctggaccgggacattggtaggtcactccgcccactattcctctgtcttcggctgcacggaattaccaaaggcaaagatctggaagtgttgcgccatctcaatttttttcccgaatcttggctggaccaggttaccgtgaaccattaccacgccttggagaacggaggagacatggtgcatcttaaggacctcaatacgcaggccgtgaggtttggcctgctattcaaccaggagaataccacctattcgaagactatcgccctctatggattcttttttaaaatcaagggactcaagcatgataccacatcttacagcttctatatgcagcgcatcaaacacacggacctcgaatctccttctgcagtctacgaacataaccatgtgtccttaagggcagctaggctggtgaaatacgagataagggctgaagccctggtcgatgggaaatggcaagaatttcggaccaatcagattaaacaaaaatttggactaacaacgtcctcttgtaagagccacaccttgaaaatacagacagttggaattccgatctatgtatccttcgctttcatcttccccgcatcgtag

SEQ ID NO: 238992 - DNA, 1849 bp, Artificial Sequence
  derived and/or modified sequence
aggaaaccaaggcaagctccccctgtcaaagcaccttggcccataagaagaaaagggggagccccagatgtgatgagcgcttccaggcttcaggctcagaaggcgcccccagctctcctgtaactcagaggccagtgtgatgggagttcctccactcagcacacttcccctgtaaacacgcctgtggtgggcaaaagggctttggaacggttgcttgtcttttctctcctgcgtaatttccactttcattcatgataatgtcgaacacgcacaaagctcggctggaacgccgggtcactggctcaaccaaccggtggcgtttgcccaaacagcctttctctggggacctgctctcactttcccagatgtgcaaggctctgagcatagactttgaggaagctttgaggaacccagacaggttatgcatttcacaaatccagaagtttttctttgagaatttcaagaacaaggacatccaaagtggggaagcagatgtgattctcgagtgcctgggcttcaaatgggagctccatcagccccagctttttcagtctgagaccttggccaagctctacctgaaagccctggcgcagggcaccacacaccccctgagggagctggaggagcttctgcgagctcaatcacctaagaagaccaaagaaaaatcccctgcaaagaggatcatcatttccttgaagatcaatgacccactggtcactaaagtcgccttcgccacggccctgaagaacctctacatgagtgaggtggagattaacttggaagacctactgggagtgctggcttccgcccacatcctccagttcagtggcctgtttcaaaggtgcgtggatgtgatgatagccagactcaagccaagcaccatcaagaaattctacgaggccggctgcaagtacaaggaagagcagctcaccaccggctgcgagaagtggctggaaatgaacttggttcctctaggggggacgcagatccacctccacaaaatcccacaggacctgctccacaaagtgctgaagtcccccaggttatttacctttagtgaattccatcttctgaaaacaatgcttttgtgggtcttcttgcaactgaactacaagattcaggcaattccgacttatgaaaccgtgatgacattttttaagagctttcctgagaactgttgctttctggaccgggacataggacggagcttgaggccgctcttcctctgcttgcgtctgcacggcatcaccaaaggcaaggatctggaggtgctgcggcaccttaacttcttcccagagtcatggctcgaccaggttacagtcaaccattaccacgcactggagaatgggggcgacatggtccacctgaaagatcttaacacccaggctgtgagatttgggctgctctttaaccaggagaatacaacttattcgaaaacgattgctctatatggattcttctttaagataaagggactcaaacatgatactacctcttatagtttttacatgcagagaataaagcacacagacctggaatctccctctgcggtctacgagcacaaccacgtcagcctgcgagcggcacgcctggtgaagtatgagatcagagcagaggccctggttgacggcaagtggcaggagttcaggacaaaccagatcaagcagaagtttgggttgaccacgtcatcctgcaaaagccataccttgaaaatccaaactgtgggcatcccaatctatgtaagttttgcattcatcttcccagcatcttgacagtttccagaagaatctatgggattttccccccactggtctgcataaaagaaaataaaatgacataaaagggagca

SEQ ID NO: 238993 - protein, 411 aa, Artificial Sequence
  derived and/or modified sequence
MQTSEREGSGPELSPSVMPEAPLESPPFPTKSPAFDLFNLVLSYKRLEIYLEPLKDAGDGVRYLLRWQMPLCSLLTCLGLNVLFLTLNEGAWYSVGALMISVPALLGYLQEVCRARLPDSELMRRKYHSVRQEDLQRGRLSRPEAVAEVKSFLIQLEAFLSRLCCTCEAAYRVLHWENPVVSSQFYGALLGTVCMLYLLPLCWVLTLLNSTLFLGNVEFFRVVSEYRASLQQRMNPKQEEHAFESPPPPDVGGKDGLMDSTPALTPTEDLTPGSVEEAEEAEPDEEFKDAIEETHLVVLEDDEGAPCPAEDELALQDNGFLSKNEVLRSKVSRLTERLRKRYPTNNFGNCTGCSATFSVLKKRRSCSNCGNSFCSRCCSFKVPKSSMGATAPEAQRETVFVCASCNQTLSK

SEQ ID NO: 238994 - DNA, 1236 bp, Artificial Sequence
  derived and/or modified sequence
atgcagaccagcgagagagagggcagcggccccgagctgagccccagcgtgatgcccgaggcccccctggagagcccccccttccccaccaagagccccgccttcgacctgttcaacctggtgctgagctacaagagactggagatctacctggagcccctgaaggacgccggcgacggcgtgagatacctgctgagatggcagatgcccctgtgcagcctgctgacctgcctgggcctgaacgtgctgttcctgaccctgaacgagggcgcctggtacagcgtgggcgccctgatgatcagcgtgcccgccctgctgggctacctgcaggaggtgtgcagagccagactgcccgacagcgagctgatgagaagaaagtaccacagcgtgagacaggaggacctgcagagaggcagactgagcagacccgaggccgtggccgaggtgaagagcttcctgatccagctggaggccttcctgagcagactgtgctgcacctgcgaggccgcctacagagtgctgcactgggagaaccccgtggtgagcagccagttctacggcgccctgctgggcaccgtgtgcatgctgtacctgctgcccctgtgctgggtgctgaccctgctgaacagcaccctgttcctgggcaacgtggagttcttcagagtggtgagcgagtacagagccagcctgcagcagagaatgaaccccaagcaggaggagcacgccttcgagagcccccccccccccgacgtgggcggcaaggacggcctgatggacagcacccccgccctgacccccaccgaggacctgacccccggcagcgtggaggaggccgaggaggccgagcccgacgaggagttcaaggacgccatcgaggagacccacctggtggtgctggaggacgacgagggcgccccctgccccgccgaggacgagctggccctgcaggacaacggcttcctgagcaagaacgaggtgctgagaagcaaggtgagcagactgaccgagagactgagaaagagataccccaccaacaacttcggcaactgcaccggctgcagcgccaccttcagcgtgctgaagaagagaagaagctgcagcaactgcggcaacagcttctgcagcagatgctgcagcttcaaggtgcccaagagcagcatgggcgccaccgcccccgaggcccagagagagaccgtgttcgtgtgcgccagctgcaaccagaccctgagcaagtag

SEQ ID NO: 238995 - DNA, 1236 bp, Artificial Sequence
  derived and/or modified sequence
atgcagacaagcgagcgggaaggaagtgggcccgagctgtcgccttcagtgatgcctgaggcaccattggagagtcctccgttcccaactaaatctcccgccttcgacctgtttaatctagtgctgtcctataagcgtctcgaaatttatctggagccgctcaaagatgctggcgacggggtcagatacttgctgcgctggcagatgcctctgtgctcactcctgacttgccttggccttaacgtgctgttccttactctcaatgaaggtgcttggtacagcgtgggcgccctgatgatttctgtgcccgctctgttgggctatcttcaggaggtctgccgcgcaaggctgcccgattctgagctcatgcggagaaaatatcacagtgtgcggcaggaggacctgcaaagggggaggctctcacgacctgaggccgttgcagaagtcaaatcttttttgattcaactggaggccttcctgagcaggttgtgttgtacctgcgaggcggcttaccgggttctgcattgggaaaatccggtcgtgtcttcccagttctatggtgcactcctcgggactgtctgtatgctgtatctcctgcccctttgctgggtactgaccctccttaacagcactctgttcctgggcaatgtagagtttttccgggttgtgtcagaatatagggccagcttgcagcagcggatgaatcccaagcaagaggagcacgcctttgagagcccaccacccccggatgtaggcgggaaggacgggctgatggattctacacccgcgctgacacctactgaagatcttacacccggaagcgtagaagaagccgaagaagccgagccagacgaggaattcaaggacgctattgaagagactcatttagtcgtgctggaagacgatgagggcgctccttgtccggccgaagacgagttggccttacaagacaatggcttcctgagcaagaacgaagtgttgcgaagcaaggtgtctcgactgacagagcggttacggaagagataccctaccaataatttcggaaattgcaccggatgctcagcgacttttagtgtccttaaaaagcggcggagctgcagcaactgcggcaattccttctgttccaggtgttgcagtttcaaggtgccaaagtcatccatgggggcaacagcccctgaagcacaacgcgagacagtatttgtatgtgcttcctgtaatcaaacactttccaaatag

SEQ ID NO: 238996 - DNA, 1236 bp, Artificial Sequence
  derived and/or modified sequence
atgcagaccagcgagcgggagggcagcggccctgagctgagccccagcgtgatgcctgaggcccccctggagagcccccccttccccaccaagagccctgcctttgacctcttcaacctggtgctgagctacaagaggctggagatctacctggagcccctgaaggatgctggagatggagtgcgctacctgctgcgctggcagatgcccctgtgcagcctgctgacctgcctgggcctgaatgtgctcttcctgaccctgaatgaaggagcctggtacagcgtgggcgccctgatgatctctgtgcctgccctgctgggctacctgcaggaggtgtgccgggcccggctgcctgacagcgagctgatgaggaggaagtaccacagcgtgcggcaggaggacctgcagaggggccgcctgagcaggcctgaggccgtggccgaggtgaagagcttcctgatccagctggaggccttcctgagccggctgtgctgcacctgtgaggccgcctacagagtgctgcactgggagaaccctgtggtgagcagccagttctacggggccctgctgggcaccgtgtgcatgctgtacctgctgcccctgtgctgggtgctgaccctgctgaacagcaccctcttcctgggcaatgtggagttcttccgggtggtgtctgagtaccgggccagcctgcagcagaggatgaaccccaagcaggaggagcacgcctttgagagccccccacctccagatgtgggcggcaaggatggcctgatggacagcaccccagccctgacccccacagaggacctgaccccaggctctgtggaggaggccgaggaggccgagccagatgaggagttcaaggatgccatcgaggagacccacctggtggtgctggaggatgatgagggcgccccctgcccagcagaagatgagctggccctgcaggacaatggcttcctgagcaagaatgaggtgctgcggagcaaggtgtcccggctgacagagcggctgaggaagcgctaccccaccaacaactttggaaactgcaccggctgcagcgccaccttctctgtgctgaagaagagaagaagctgcagcaactgtggcaacagcttctgcagccgctgctgcagcttcaaggtgcccaagagctccatgggcgccacagcccctgaggcccagcgggagaccgtgtttgtgtgtgccagctgcaaccagaccctgagcaagtag

SEQ ID NO: 238997 - DNA, 1236 bp, Artificial Sequence
  derived and/or modified sequence
atgcagaccagcgagcgggagggcagcggccccgagctgagccccagcgtaatgcctgaggccccgctggagtcccctcctttcccaactaagagccccgcatttgacctctttaacttggtgctctcttacaagagactcgagatctacttagagccactcaaagatgcaggcgacggcgtgcgctaccttcttcggtggcaaatgcctctctgctcacttctaacttgcctcggtctcaatgtcctgttcttaacgctgaatgagggcgcatggtatagtgtaggggctctgatgatttctgtccccgccttgctgggatatctccaggaggtatgtagggcgagactccctgatagcgagttaatgcgtcggaagtatcacagcgtgaggcaggaagatctgcaaagaggaagactcagtcggcctgaggctgtcgcggaggtcaaaagcttcctgattcagttagaggcattcctctcacgtctgtgctgcacttgcgaagccgcttacagggttctgcactgggagaacccagtggtgagcagccagttttacggcgcattgttggggactgtatgcatgctatacctccttcctctctgctgggtgctgaccctgttaaacagcaccttgtttttgggaaacgtagagttcttccgggttgtttccgagtatcgggcaagcctgcaacagcggatgaacccaaagcaggaagagcatgcctttgagtccccaccgccaccagacgtgggaggaaaggacggactgatggactcaacaccggcccttacacctacagaagacttgacaccaggctcagtcgaagaggcagaagaagcagagcccgatgaggaatttaaggacgcaatcgaagaaacgcatctggtagtgctggaagatgacgaaggcgctccctgccccgccgaggacgagctcgcacttcaagacaatggcttcctatccaagaatgaggtgctgaggtcaaaagtgtcccggcttacagagcgtttaagaaagcgttaccctacgaacaacttcggtaattgcaccggctgttctgctacttttagtgtgctgaagaagaggagaagttgctcaaactgcggaaatagcttttgttcccgatgttgttccttcaaggtgcccaaaagttccatgggagccacggctccagaagcccagagagagacagtgtttgtgtgcgccagctgcaatcaaaccttgtcaaagtag

SEQ ID NO: 238998 - DNA, 1236 bp, Artificial Sequence
  derived and/or modified sequence
atgcagacatccgagcgcgaggggtcaggacccgagctgtccccaagcgtaatgccagaggcaccccttgagagcccaccgttcccaacgaagtctccggcttttgatctgtttaatctggtcttgtcttataaaaggctagaaatctacttggagccattgaaggatgcaggcgacggggtgcggtaccttttaagatggcagatgcctctttgctccctgctgacttgtctggggttgaatgtgctgttcttgaccttgaatgagggtgcttggtattcggtcggggcactaatgatttctgttcccgcactgttagggtatctccaagaagtgtgccgggctcgcctgcccgactcggaactgatgcgcaggaaataccactcggtccggcaggaagacctacagcggggaagactctcccgcccagaggcggtggcggaggttaaaagcttcctgattcagcttgaggctttccttagcaggctctgctgtacgtgtgaggccgcataccgggtgctgcactgggaaaaccccgttgtgtctagtcagttctacggtgcccttctagggacggtgtgtatgctttacttactgccgctgtgctgggtgctcacactccttaacagtactctgttcctagggaacgtcgagttttttagggtggtcagcgagtaccgggcaagcctgcagcagcggatgaatcccaagcaggaggagcatgcctttgaatcacctcctcctcctgatgtcggcggtaaggacggccttatggatagcacccccgctttgactcctactgaagatcttacccccggttctgtggaggaggccgaagaggctgaacccgatgaggagtttaaagatgccattgaggagacacatctggtcgtgttggaggacgacgaaggggcaccctgtcctgctgaggacgaactagccttgcaggataatgggttcctgtcgaagaatgaggtgctgcgttccaaggtgtccaggctgacagaaagactgcgtaaacgatatccgaccaataacttcggaaattgtaccggttgcagtgcgaccttttctgtgttaaagaagagacggtcctgctcaaactgtggtaactctttctgctcaagatgttgttcttttaaggttcccaagtcaagcatgggcgcaaccgcccctgaagcccaaagggaaacagtgttcgtgtgcgcatcctgtaatcagaccctgagcaagtag

SEQ ID NO: 238999 - DNA, 3035 bp, Artificial Sequence
  derived and/or modified sequence
agagcgattcgcgtcccggaagcggcggtggcggccgcggcgtaggcggaggagattttcggacctgcgacttccgaacaaccctggcaggaggagcggcgttcagccgggggaggcctgaagaaacgctccggggcccagtggctctacccctgctcctgcccgaccctgccgcctccctcacggagccagcggccgggtaggatgcagacatcagaacgtgaggggagtgggccggagctgagccccagcgtgatgcccgaggctcccctggagtctccaccttttcctaccaagtccccagcgtttgaccttttcaacttggttctctcctacaagaggctggagatctacctggaacccttgaaggatgcaggtgatggtgttcgatacttgctcaggtggcagatgcctttgtgttccttgctgacctgcctgggcctcaacgtcttgttcctcactttgaatgagggtgcatggtactcagtaggtgccctgatgatttcagtgcccgccctgctgggctaccttcaggaggtttgccgggcacggctgcctgattccgagctgatgcggaggaagtatcatagcgtgaggcaggaggacctgcagagaggtcgcctgtctcgtcccgaggccgtggctgaggtgaagagcttcttgatccagctggaggccttcctgagccgcctgtgctgcacatgtgaagccgcctaccgcgtgctgcactgggagaaccccgtcgtgtcctcacagttctatggggctcttctgggcacagtctgcatgctgtatttgctgccactctgctgggttctcacccttttaaacagcacgctctttctggggaatgtggagttcttccgagttgtgtctgagtacagggcatctctgcagcagaggatgaacccaaagcaggaagagcatgcctttgagagtcctccaccaccagatgttggggggaaggatggtctgatggacagcacgcctgccctcacacccacggaggacctcacaccgggcagcgtggaggaggctgaggaggctgagccagatgaagagtttaaagatgcgattgaggagacccacttggtggtgctggaggatgatgagggcgccccgtgcccagcagaggatgagctggccctgcaggacaacgggttcctgagcaagaatgaggtgctgcgcagcaaggtgtctcggctcacggagcggctccgcaagcgctaccccaccaacaacttcgggaactgcacgggctgctcggccaccttctcagtgctgaagaagaggcggagctgcagtaattgtggaaacagcttctgctctcgatgctgctccttcaaggtgcccaagtcctccatgggggccacagcccctgaagcccagagggagactgtgtttgtgtgtgcctcgtgtaaccagaccttgagcaagtgagaagagaggccagggtccaaccaggcacccgtccttgggaccagcagtagaccccccactctccccacccctggcccactgtggtgtgtgctgggcaaatgtggcctgaatgctaggtaggcttccccttccttcctcactctctccagctggattctggagctgttctccatccatgagagtggctggcaatggctgctctcaatcccttgagggagaagagcccctggagggcctggcatgtttgtcctgctctgcctgggactgagcgagtggacttagggctgggcaggcagtagccaccagagggcagcagcgaactaggccaggcctgactggggtctgaagatcagggtcagtgtggctgtgcctgggaattccagacctgaggttgggaaaagaggtttttctcctgcagggtactgggccaggccctcagcctcagagagcctgcagaagggcttgggagtgccacaccccatctctgctgattgaatgtccctccaggcaccaggatctcatcatttccccatcagagggtgtggccaggcctaacaagaccatgggtgcttctagaaacagggttgaagttcccagattccctgagaggagaatgtgtataggagggtttggctgagtccttcagcgttaagtggaggaaagcttggggaagccccaatagctggacagacctcggcctcccctcgaagacacctcaattcacagactctcagcccacacaatgccccagtgtccccagctccgctggagcagctgcagggcacttggatcacaacttctgcaccctctgtccagagtctagggcagtcctccactggcccagcactccagtttcctttccctgcctcttgtccaatggagtgggaggccaggtgagtggagcagaggtcctgaagcccttgacccctgggggcctgggtagtgtaggatctcgctgggctgggtcctggattccagggctattccctggaggacagtctcagttatgggataaggccccctgggggtctccatttctttccaacagtttcatgttcactactggactcttacgggctcagtatctctcccttagccatgagctggctcaggcatcccttcccttccctggagctgccctgcctttctcaagtatttatttatttattgcatggttcctgggaacatgtggcacaagtaatgggatgaggaggaattgggggtgggggtcttctacctaggactcttccctggagtcatgggctgcctgggacccaggacccatgagggggctgagaggtttctacactcgaggagcaggggtccagagaggcaggctggggaggcaagggacccatcctaggcccgctttcttgccgagccaagcagcttagctggggctgtgcagccaggggcttacccaggccagtggaggtgccacagccctggggagccagacaggctttggtatcgtatcgcctctgtgtccttttaagagaggagagttcagtaccccgtgctttctttacactggagaggaactaaaaggatctctgtgtctatggagaattgtcaataaaaaggcctcaagcttc

SEQ ID NO: 239000 - protein, 183 aa, Artificial Sequence
  derived and/or modified sequence
MPLVRYRKVVILGYRCVGKTSLAHQFVEGEFSEGYDPTVENTYSKIVTLGKDEFHLHLVDTAGQDEYSILPYSFIIGVHGYVLVYSVTSLHSFQVIESLYQKLHEGHGKTRVPVVLVGNKADLSPEREVQAVEGKKLAESWGATFMESSARENQLTQGIFTKVIQEIARVENSYGQERRCHLM

SEQ ID NO: 239001 - DNA, 552 bp, Artificial Sequence
  derived and/or modified sequence
atgcccctggtgagatacagaaaggtggtgatcctgggctacagatgcgtgggcaagaccagcctggcccaccagttcgtggagggcgagttcagcgagggctacgaccccaccgtggagaacacctacagcaagatcgtgaccctgggcaaggacgagttccacctgcacctggtggacaccgccggccaggacgagtacagcatcctgccctacagcttcatcatcggcgtgcacggctacgtgctggtgtacagcgtgaccagcctgcacagcttccaggtgatcgagagcctgtaccagaagctgcacgagggccacggcaagaccagagtgcccgtggtgctggtgggcaacaaggccgacctgagccccgagagagaggtgcaggccgtggagggcaagaagctggccgagagctggggcgccaccttcatggagagcagcgccagagagaaccagctgacccagggcatcttcaccaaggtgatccaggagatcgccagagtggagaacagctacggccaggagagaagatgccacctgatgtag

SEQ ID NO: 239002 - DNA, 552 bp, Artificial Sequence
  derived and/or modified sequence
atgcccctcgtgagatatcggaaagtagttatcctgggataccggtgtgtgggcaagacatctctcgcgcaccaattcgtggaaggagagttcagtgaaggatatgatcccactgtggagaacacatactccaaaatcgttactttggggaaagatgagttccatctgcatctcgttgatacggccggccaagatgagtacagtatcctgccctatagctttataatcggtgttcatgggtatgtcttggtctactctgtaacctccctccattctttccaggtcatagagtctctctatcagaagttgcacgaaggacacggaaaaactcgggtgcccgttgttctggtgggcaataaagctgatctttcccccgagagagaagttcaagccgtcgaaggcaagaaattggcagagtcctggggtgctacatttatggagtcctctgctcgagagaatcaactaactcaggggatattcaccaaagtgatccaggaaattgctagagtggaaaattcctatggccaggaacgtcgctgccatctgatgtag

SEQ ID NO: 239003 - DNA, 552 bp, Artificial Sequence
  derived and/or modified sequence
atgcccctggtgcgctacaggaaggtggtgatcctgggctaccgctgtgtgggcaagaccagcctggcccaccagtttgtggagggggagttcagcgagggctatgaccccaccgtggagaacacctacagcaagatcgtgaccctgggcaaggatgagttccacctgcacctggtggacacagctggccaggatgagtacagcatcctgccctacagcttcatcatcggcgtgcacggctacgtgctggtgtacagcgtgaccagcctgcacagcttccaggtgattgagagcctgtaccagaagctgcacgagggccacggcaagaccagggtgcctgtggtgctggtgggcaacaaggctgacctgagccctgagcgggaggtgcaggccgtggagggcaagaagctggccgagagctggggcgccaccttcatggagagcagcgcccgggagaaccagctgacccagggcatcttcaccaaggtgatccaggagatcgcccgggtggagaacagctatggccaggagcggcgctgccacctgatgtag

SEQ ID NO: 239004 - DNA, 552 bp, Artificial Sequence
  derived and/or modified sequence
atgcccctggtgcggtaccggaaggtggtgatcctgggctaccggtgcgttggcaaaacgtctctggctcaccagttcgtggaaggtgaatttagcgaaggttatgaccctactgtcgaaaatacttactccaagattgtgacgcttggaaaggatgaatttcaccttcacctggtcgacacagccggacaggacgagtactccatccttccttactcctttataataggcgtgcacgggtatgtgctcgtttactctgtgacatcattacactccttccaggttattgagagtctgtatcagaagcttcacgaaggtcacggaaagacacgggtccctgttgtgctagtgggtaataaggctgatctgtcccctgaacgcgaggttcaggccgtcgagggtaagaaactggccgagtcctggggagctacttttatggagtcaagtgcgagggagaaccagctgacgcagggcatatttactaaagtgattcaggagatcgcgcgtgtggagaacagctatggccaggagaggaggtgccatcttatgtag

SEQ ID NO: 239005 - DNA, 552 bp, Artificial Sequence
  derived and/or modified sequence
atgcccttggtgcggtatcggaaggtcgtgatcctggggtatcgctgcgttggaaaaaccagcctggctcatcagtttgtagaaggcgagttctcggagggctacgatccgaccgtggaaaatacgtactccaagattgtgacgttgggaaaagacgaattccatttacatctggtggacactgcaggtcaagatgagtacagcattcttccctactcgtttatcatcggtgtgcacggatacgtgctggtgtactccgtcacatccctacactcgtttcaggtgatcgagagtctgtaccaaaagctccatgagggacatgggaagactagggtgcccgtagttctcgtggggaacaaagcggacctgagtccagaacgcgaagtgcaggcagttgagggaaaaaagttggcagaatcttggggagccacattcatggagtcaagcgcccgagaaaatcagttgacccaaggaatcttcactaaagtaattcaggaaattgctcgggttgagaattcctacgggcaggagcgcagatgtcatctgatgtag

SEQ ID NO: 239006 - DNA, 1210 bp, Artificial Sequence
  derived and/or modified sequence
cggcgcggcgcggctcagtagttccccgggcgcccggctccctggcgttagacgtgctgtgttgtgatcacgtgggcagctccgggcgcggcgcttgttttggtttccttctaacttgcccacggcagcttcggggtgagcgactttcctgcaccagctgccgcgcctgctcacaccctgacctcgttttcgggctctctgagcccgcagttccgcaagcccctggggcgggctcctgccatgccgctagtccgctacaggaaggtggtcatcctcggataccgctgtgtagggaagacatctttggcacatcaatttgtggaaggcgagttctcggaaggctacgatcctacagtggagaatacttacagcaagatagtgactcttggcaaagatgagtttcacctacatctggtggacacagcagggcaggatgagtacagcattctgccctattcattcatcattggggtccatggttatgtgcttgtgtattctgtcacctctctgcatagcttccaagtcattgagagtctgtaccaaaagctacatgaaggccatgggaaaacccgggtgccagtggttctagtggggaacaaggcagatctctctccagagagagaggtacaggcagttgaaggaaagaagctggcagagtcctggggtgcgacatttatggagtcatctgctcgagagaatcagctgactcaaggcatcttcaccaaagtcatccaggagattgcccgtgtggagaattcctatgggcaagagcgtcgctgccatctcatgtgagcccttgggtgtggggtaactgccttgcttctgcccccggcacttgccatgttccagtggggggcagatcctcaggacttcacgggtatggttgccagctgtgttcctggcccctggacacacagtgtggcatcctcatgtttgcacactttccccaggctccagtggcctggatgtcaatgtttacaaaggggcaaggacctctcatggacactggcctctagccctctgtttttgtttgatgaattctgttataacctatggggtcaggatatgagtcctgggcattatttatccaggacccatcctcttgggtgggttttgggtgttggctgggtaaggggagccggggacttctgaaatagagctggctccctggggtgacaatgtatatatgcaaataaattgagaaatcttt

SEQ ID NO: 239007 - protein, 167 aa, Artificial Sequence
  derived and/or modified sequence
MEETYTDSLDPEKLLQCPYDKNHQIRACRFPYHLIKCRKNHPDVASKLATCPFNARHQVPRAEISHHISSCDDRSCIEQDVVNQTRSLRQETLAESTWQCPPCDEDWDKDLWEQTSTPFVWGTTHYSDNNSPASNIVTEHKNNLASGMRVPKSLPYVLPWKNNGNAQ

SEQ ID NO: 239008 - DNA, 504 bp, Artificial Sequence
  derived and/or modified sequence
atggaggaaacgtacaccgactctctcgatcccgagaagctcctacaatgcccctatgataagaatcaccagattagggcctgccgattcccataccacctcatcaagtgtaggaagaatcatccagacgtggcttcgaagctggcgacatgtcccttcaacgcacgtcatcaggtcccacgtgcggagatctcccatcacatctcctcctgcgacgatcgtagctgtattgagcaggatgtggtgaaccaaactcggtctctgagacaggaaaccctggccgaatccacctggcaatgccccccttgtgacgaggactgggacaaagatctgtgggagcagaccagtactccctttgtctggggaaccacacattattccgacaataacagtccggcctccaatatcgtgactgaacacaagaataaccttgctagtggtatgcgcgttcccaaatccctaccttatgtactgccctggaaaaacaacggtaatgcacagtag

SEQ ID NO: 239009 - DNA, 504 bp, Artificial Sequence
  derived and/or modified sequence
atggaagaaacatacacagatagcttagaccctgaaaagctcttgcagtgtccctatgacaagaaccaccagattagagcctgtcgttttccctaccatctcattaagtgccggaagaaccaccctgatgtggccagcaagctggccacatgcccatttaacgctcgtcaccaggtcccccgcgccgagatttcccatcatatttcatcttgtgacgataggtcttgcattgagcaggacgtggtcaatcagacacgctctctgagacaggagaccttggctgagtctacctggcaatgccccccatgcgacgaagactgggacaaggatctttgggagcaaacctctacgccttttgtgtggggtaccacccactatagcgacaacaattccccggctagtaatattgttactgagcacaaaaataaccttgcctcgggaatgcgagtgcccaagtccttgccctacgtgctcccttggaagaataatggcaacgctcagtag

SEQ ID NO: 239010 - DNA, 504 bp, Artificial Sequence
  derived and/or modified sequence
atggaggagacctacacagacagcctggaccctgagaagctgctgcagtgcccctatgacaagaaccaccagatccgggcctgccgcttcccctaccacctgatcaagtgcaggaagaaccacccagatgtggccagcaagctggccacctgccccttcaatgcccggcaccaggtgcccagggctgagatcagccaccacatcagcagctgtgatgacaggagctgcatcgagcaggatgtggtgaaccagaccaggagcctgcggcaggagaccctggccgagagcacctggcagtgccccccctgtgatgaggactgggacaaggacctgtgggagcagaccagcaccccatttgtgtggggcaccacccactacagcgacaacaacagccctgccagcaacatcgtgacagagcacaagaacaacctggccagcggcatgagggtgcccaagagcctgccctacgtgctgccctggaagaacaatggaaatgcccagtag

SEQ ID NO: 239011 - DNA, 504 bp, Artificial Sequence
  derived and/or modified sequence
atggaggagacctacaccgacagcctggaccccgagaagctgctgcaatgcccttatgataaaaatcatcagattcgggcatgtagattcccctatcacctcattaaatgtagaaagaatcaccctgatgtagccagtaaactggcgacctgtccattcaacgcgcggcatcaagtgcccagggccgaaatttcccaccatattagctcttgcgatgatcgcagctgtatcgagcaggatgtggtgaatcagactcgctctctgcgccaggaaaccttggcagaatctacatggcaatgtccgccatgtgatgaagactgggataaagatctatgggagcagacgagcacccccttcgtatggggtactactcactactcagacaacaatagtccggcttcaaacatagtgaccgaacacaagaataatcttgcaagcggcatgcgggtgcccaaaagtctaccctacgttctgccttggaagaataatggaaacgcccaatag

SEQ ID NO: 239012 - DNA, 504 bp, Artificial Sequence
  derived and/or modified sequence
atggaggagacctacaccgacagcctggaccccgagaagctgctgcagtgtccctacgacaaaaatcaccaaatcagggcttgccgctttccttatcaccttattaagtgcagaaagaatcatcctgacgtcgcaagcaaactggccacttgtccgtttaatgccagacaccaggtgccacgcgctgagatctcccaccatatttctagctgcgatgaccgctcttgcatcgagcaggatgtagttaatcaaacaagaagcttaagacaggaaacccttgccgaatctacatggcagtgtcccccctgtgacgaggactgggataaggatctctgggagcagacttcaacccctttcgtctgggggactacacattacagcgacaacaatagccccgctagtaacatcgtcacagagcataaaaacaacctggcttctggaatgcgggtgcccaagagcctgccctatgtcttgccatggaagaacaatgggaatgcccaatag

SEQ ID NO: 239013 - DNA, 504 bp, Artificial Sequence
  derived and/or modified sequence
atggaagaaacttatacggactcacttgacccagaaaagctgctgcaatgcccctatgataaaaaccaccagattcgagcgtgtcgcttcccgtaccacttgatcaagtgccggaagaatcacccggacgtcgcaagtaagctggctacatgtccttttaatgctcggcaccaagtgcctcgagcagagatctctcaccacatcagttcctgcgacgacaggtcatgtatcgaacaggacgtagtgaatcagactagatcactgagacaggagacgctggctgaatcgacgtggcaatgtccaccttgcgacgaagactgggataaggatctatgggagcagacctcaaccccttttgtgtggggtacaactcactatagcgacaataattccccagcatccaacatcgtcactgagcataaaaacaatttggcttccgggatgcgggttcctaagagcttgccctatgtcctgccttggaaaaacaatggcaatgcccagtag

SEQ ID NO: 239014 - DNA, 504 bp, Artificial Sequence
  derived and/or modified sequence
atggaggagacatacaccgacagcctagatcccgaaaagctgctccaatgcccatacgacaagaatcaccagatacgcgcatgtcgttttccttatcatctcattaaatgcagaaaaaaccatcctgacgtggccagcaagcttgctacatgtccattcaacgctcgtcatcaggtccctagagcagaaatttcacaccacatcagctcctgtgacgatcgcagctgtatagaacaggacgtagtcaatcagactcgatccctacgtcaggaaacgcttgccgagtctacttggcaatgtccgccatgcgacgaagactgggacaaggacctctgggagcagacgagcactccattcgtgtggggaacaacccactactcagataacaactctcccgctagcaatatagtgaccgaacacaagaataaccttgcaagtggcatgcgcgttcctaaaagcctcccttatgttctgccctggaagaacaacggcaatgcacagtag

SEQ ID NO: 239015 - DNA, 1621 bp, Artificial Sequence
  derived and/or modified sequence
aattttcagaagtttcgtatggggatggttttatataaattcaggtttttcccacaataataaatgtatttagtctcagtgctcaatagaagagatttctaatagaaaaggattcaaactgtgaaaccatttctcttttaatgtttcacattcctgttacagatttgttctcttgtgactctgttatccataatatggacagttcttgagtcctaacattgagaggttttcccttagtgcatagagggaatgagtattaattggagaagcttaaagtattgccactttagcactgaagattgggatgagaggaggtgaaacctcactagaaaaagggacaatgttagtgtggcccttcctgatcatgtttaagaaaagtcatgaaaatggtgaactagtgtttccaagcatattggaagggttgagtgtatactgtctgtcaaagacttccagcatttccaggtcctagagaggaacaagactggtaacctgcctatctgtatttttaagaacccaggaggaaagctttataatagaacattatttctgtgtttatgtataaggggttttttgtttttttaaagacaggatctcactccattgtccaggccaagtgcaatggcacgaacctcatagctcctggacttaagtgatctgcctgcctttgcctcctgagtagctgggactacaggcatgagcccccatgcctggctaagtttgtttttttgtttgtttgtttgtttgtttttgggggggggttgttttgttttttgtagagacgtagtcttgctttgttgccaggctagtctcaaactcctggcttcaagtgatcctcctgcctcagcctcccagagtgctaggattacagcacttggattcagcttcttcatttccaacatggaagaaacttacaccgactccctggaccctgagaagctattgcaatgcccctatgacaaaaaccatcaaatcagggcttgcaggtttccttatcatcttatcaagtgcagaaagaatcatcctgatgttgcaagcaaattggctacttgtcccttcaatgctcgccaccaggttcctcgagctgaaattagtcatcatatctcaagctgtgatgacagaagttgtattgagcaagatgttgtcaaccaaaccaggagccttagacaagagactctggctgagagcacttggcagtgccctccttgcgatgaagactgggataaagatttgtgggagcagaccagcaccccatttgtctggggcacaactcactactctgacaacaacagccctgcgagcaacatagttacagaacataagaataacctggcttcaggcatgcgagttcccaaatctctgccgtatgttctgccatggaaaaacaatggaaatgcacagtaactgaatacctatctcatcaaatgccagaccctagaagactgttgcttcttcttctaccagtgggttctcattttcctcctaatctaattatagaatggtaaactccctgtgactttccaaactgacaagcacacttttttcctccccccttgaatcctcatttaatgcaagaaccctcatactcagaagcttccaaataaacctttgatacagattgctt

SEQ ID NO: 239016 - DNA, 804 bp, Artificial Sequence
  derived and/or modified sequence
gctggggcttgcgtgggaggaaggtgactgtgaggaaggtgtgtgtccaccgagcacttggattcagcttcttcatttccaacatggaagaaacttacaccgactccctggaccctgagaagctattgcaatgcccctatgacaaaaaccatcaaatcagggcttgcaggtttccttatcatcttatcaagtgcagaaagaatcatcctgatgttgcaagcaaattggctacttgtcccttcaatgctcgccaccaggttcctcgagctgaaattagtcatcatatctcaagctgtgatgacagaagttgtattgagcaagatgttgtcaaccaaaccaggagccttagacaagagactctggctgagagcacttggcagtgccctccttgcgatgaagactgggataaagatttgtgggagcagaccagcaccccatttgtctggggcacaactcactactctgacaacaacagccctgcgagcaacatagttacagaacataagaataacctggcttcaggcatgcgagttcccaaatctctgccgtatgttctgccatggaaaaacaatggaaatgcacagtaactgaatacctatctcatcaaatgccagaccctagaagactgttgcttcttcttctaccagtgggttctcattttcctcctaatctaattatagaatggtaaactccctgtgactttccaaactgacaagcacacttttttcctccccccttgaatcctcatttaatgcaagaaccctcatactcagaagcttccaaataaacctttgatacagattg

SEQ ID NO: 239017 - DNA, 504 bp, Artificial Sequence
  derived and/or modified sequence
atggaggagacctacaccgacagcctggaccccgagaagctgctgcagtgcccctacgacaagaaccaccagatcagagcctgcagattcccctaccacctgatcaagtgcagaaagaaccaccccgacgtggccagcaagctggccacctgccccttcaacgccagacaccaggtgcccagagccgagatcagccaccacatcagcagctgcgacgacagaagctgcatcgagcaggacgtggtgaaccagaccagaagcctgagacaggagaccctggccgagagcacctggcagtgccccccctgcgacgaggactgggacaaggacctgtgggagcagaccagcacccccttcgtgtggggcaccacccactacagcgacaacaacagccccgccagcaacatcgtgaccgagcacaagaacaacctggccagcggcatgagagtgcccaagagcctgccctacgtgctgccctggaagaacaacggcaacgcccagtag

SEQ ID NO: 239018 - protein, 211 aa, Artificial Sequence
  derived and/or modified sequence
MSSEMEPLLLAWSYFRRRKFQLCADLCTQMLEKSPYDQKISWAWWHVPVIPATWEAEAGELLEPRKRRLQQAEITPLYSSLGNKSKTPSQKAAWILKARALTEMVYIDEIDVDQEGIAEMMLDENAIAQVPRPGTSLKLPGTNQTGGPSQAANHTSWKTHYRFPQAQHAEWKARHYGTGYQNTQNRLHSPPYHQLLRKICQAGNGFHAYKS

SEQ ID NO: 239019 - protein, 250 aa, Artificial Sequence
  derived and/or modified sequence
MSSEMEPLLLAWSYFRRRKFQLCADLCTQMLEKSPYDQEMNNMSSAAEYYKEVLKQDNTHVEAIACIGSNHFYSDQPEIALRFYRRLLQMGIYNGQLFNNLGLCCFYAQQYDMTLTSFERALSLAENEEEAADVWYNLGHVAVGIGDTNLAHQCFRLALVNNNNHAEAYNNLAVLEMRKGHVEQARALLQTASSLAPHMYEPHFNFATISDKIGDLQRSYVAAQKSEAAFPDHVDTQHLIKQLRQHFAML

SEQ ID NO: 239020 - protein, 515 aa, Artificial Sequence
  derived and/or modified sequence
MSSEMEPLLLAWSYFRRRKFQLCADLCTQMLEKSPYDQEPDPELPVHQAAWILKARALTEMVYIDEIDVDQEGIAEMMLDENAIAQVPRPGTSLKLPGTNQTGGPSQAVRPITQAGRPITGFLRPSTQSGRPGTMEQAIRTPRTAYTARPITSSSGRFVRLGTASMLTSPDGPFINLSRLNLTKYSQKPKLAKALFEYIFHHENDVKTALDLAALSTEHSQYKDWWWKVQIGKCYYRLGMYREAEKQFKSALKQQEMVDTFLYLAKVYVSLDQPVTALNLFKQGLDKFPGEVTLLCGIARIYEEMNNMSSAAEYYKEVLKQDNTHVEAIACIGSNHFYSDQPEIALRFYRRLLQMGIYNGQLFNNLGLCCFYAQQYDMTLTSFERALSLAENEEEAADVWYNLGHVAVGIGDTNLAHQCFRLALVNNNNHAEAYNNLAVLEMRKGHVEQARALLQTASSLAPHMYEPHFNFATISDKIGDLQRSYVAAQKSEAAFPDHVDTQHLIKQLRQHFAML

SEQ ID NO: 239021 - DNA, 636 bp, Artificial Sequence
  derived and/or modified sequence
atgagcagcgagatggagcccctgctgctggcctggagctacttcagaagaagaaagttccagctgtgcgccgacctgtgcacccagatgctggagaagagcccctacgaccagaagatcagctgggcctggtggcacgtgcccgtgatccccgccacctgggaggccgaggccggcgagctgctggagcccagaaagagaagactgcagcaggccgagatcacccccctgtacagcagcctgggcaacaagagcaagacccccagccagaaggccgcctggatcctgaaggccagagccctgaccgagatggtgtacatcgacgagatcgacgtggaccaggagggcatcgccgagatgatgctggacgagaacgccatcgcccaggtgcccagacccggcaccagcctgaagctgcccggcaccaaccagaccggcggccccagccaggccgccaaccacaccagctggaagacccactacagattcccccaggcccagcacgccgagtggaaggccagacactacggcaccggctaccagaacacccagaacagactgcacagccccccctaccaccagctgctgagaaagatctgccaggccggcaacggcttccacgcctacaagagctag

SEQ ID NO: 239022 - DNA, 1548 bp, Artificial Sequence
  derived and/or modified sequence
atgagcagcgagatggagcccctgctgctggcctggagctacttcagaagaagaaagttccagctgtgcgccgacctgtgcacccagatgctggagaagagcccctacgaccaggagcccgaccccgagctgcccgtgcaccaggccgcctggatcctgaaggccagagccctgaccgagatggtgtacatcgacgagatcgacgtggaccaggagggcatcgccgagatgatgctggacgagaacgccatcgcccaggtgcccagacccggcaccagcctgaagctgcccggcaccaaccagaccggcggccccagccaggccgtgagacccatcacccaggccggcagacccatcaccggcttcctgagacccagcacccagagcggcagacccggcaccatggagcaggccatcagaacccccagaaccgcctacaccgccagacccatcaccagcagcagcggcagattcgtgagactgggcaccgccagcatgctgaccagccccgacggccccttcatcaacctgagcagactgaacctgaccaagtacagccagaagcccaagctggccaaggccctgttcgagtacatcttccaccacgagaacgacgtgaagaccgccctggacctggccgccctgagcaccgagcacagccagtacaaggactggtggtggaaggtgcagatcggcaagtgctactacagactgggcatgtacagagaggccgagaagcagttcaagagcgccctgaagcagcaggagatggtggacaccttcctgtacctggccaaggtgtacgtgagcctggaccagcccgtgaccgccctgaacctgttcaagcagggcctggacaagttccccggcgaggtgaccctgctgtgcggcatcgccagaatctacgaggagatgaacaacatgagcagcgccgccgagtactacaaggaggtgctgaagcaggacaacacccacgtggaggccatcgcctgcatcggcagcaaccacttctacagcgaccagcccgagatcgccctgagattctacagaagactgctgcagatgggcatctacaacggccagctgttcaacaacctgggcctgtgctgcttctacgcccagcagtacgacatgaccctgaccagcttcgagagagccctgagcctggccgagaacgaggaggaggccgccgacgtgtggtacaacctgggccacgtggccgtgggcatcggcgacaccaacctggcccaccagtgcttcagactggccctggtgaacaacaacaaccacgccgaggcctacaacaacctggccgtgctggagatgagaaagggccacgtggagcaggccagagccctgctgcagaccgccagcagcctggccccccacatgtacgagccccacttcaacttcgccaccatcagcgacaagatcggcgacctgcagagaagctacgtggccgcccagaagagcgaggccgccttccccgaccacgtggacacccagcacctgatcaagcagctgagacagcacttcgccatgctgtag

SEQ ID NO: 239023 - DNA, 636 bp, Artificial Sequence
  derived and/or modified sequence
atgtcgtccgagatggagccattactcctcgcttggtcatattttcggagacggaaattccaactttgcgctgacctgtgtactcagatgctcgagaagagtccatatgatcagaagatttcctgggcctggtggcacgtacccgtcatcccagccacctgggaggccgaagccggcgagctgctggagccccggaagcgacggcttcaacaggccgaaataacccctctttactcatctctcggaaacaaaagtaagactcctagtcagaaggccgcatggattctgaaggcccgagctcttacagagatggtgtacattgacgagattgacgtcgatcaagagggtatcgcagagatgatgctggacgagaatgccatcgcccaggtcccaagaccaggcaccagccttaagttgcctggtaccaaccagaccgggggaccttctcaggcggcaaaccacacttcttggaagacacattaccgatttccgcaggcccagcacgcagaatggaaggccagacactatggaacaggctatcaaaatacgcagaatagactccatagcccaccatatcatcaactacttaggaagatctgtcaagccgggaatggttttcatgcctacaagtcatag

SEQ ID NO: 239024 - DNA, 1548 bp, Artificial Sequence
  derived and/or modified sequence
atgtctagcgagatggagccacttctactggcatggtcctattttaggcgacgaaaattccaattgtgtgccgatctatgtacgcagatgttagaaaaaagcccttatgatcaagagccggaccccgagctccctgttcatcaagccgcatggatcttaaaagcccgcgccctcaccgaaatggtctacatcgatgagattgacgtcgatcaggaaggaattgctgaaatgatgctggatgagaacgccatcgcccaggtgccccgtccaggaacctccctgaagcttccaggcacgaaccagaccggtgggccttcacaagccgttcggccaatcacccaggcgggccggcccatcacaggatttctccgtcccagcacacaaagcggtaggcccggcaccatggaacaggcaatccgcacccctagaacggcatataccgccagacctattacctcctcctcaggccgatttgtgcgcctgggtacagcctcaatgttaactagcccagacggcccttttatcaatctctccagattgaacctcactaaatactctcagaagcccaaactggctaaggcgttgttcgagtacatatttcaccacgagaacgatgtcaaaacggccctggatctagccgccctgagcactgaacactcccagtacaaagattggtggtggaaagtgcaaataggaaagtgttattatcggctagggatgtacagagaagctgaaaagcagttcaagtcagcactgaaacagcaggaaatggtcgacacgttcctgtatctcgctaaggtgtacgtgtctctggatcagccagtgacggcccttaatctgttcaaacaggggttagataagttccctggagaggttaccctgctatgcggtatcgctaggatctatgaggaaatgaataatatgagcagcgctgccgaatactacaaagaggtgctgaagcaggataacactcacgtcgaagctattgcctgcattggaagtaatcacttctactctgaccagcctgaaatcgcactgcgcttctatagacgcttgctccagatgggcatctacaacggacaattatttaataacctaggactttgctgcttctatgctcagcaatacgacatgaccttgacaagttttgaacgcgccctgtctctggcggagaacgaagaggaagctgcagatgtgtggtacaatctggggcacgtagccgtgggtatcggggacacaaacctcgcacaccagtgcttcaggctggccctggtgaataataataatcacgctgaggcgtataacaacctggcggtgctggagatgcgtaagggacacgtggaacaggctagggcactgcttcagaccgcctcatctctggcgcctcacatgtatgagcctcatttcaacttcgccacgattagcgataaaattggagatctccagcggtcatacgtcgccgcccagaaatccgaggcggcctttcccgatcatgtcgatactcagcatctgatcaagcagctgcggcaacacttcgcaatgctctag

SEQ ID NO: 239025 - DNA, 636 bp, Artificial Sequence
  derived and/or modified sequence
atgagcagcgagatggagcccctgctgctggcctggagctacttcagaagaaggaagttccagctgtgtgccgacctgtgcacccagatgctggagaagagcccctatgaccagaagatctcctgggcctggtggcacgtgcctgtgatcccagccacctgggaggccgaggccggggagctgctggagcccaggaagaggcggctgcagcaggccgagatcacccccctgtacagcagcctgggcaacaagagcaagacccccagccagaaggccgcctggatcctgaaggcccgggccctgacagagatggtgtacattgatgaaattgatgtggaccaggagggcattgctgagatgatgctggatgaaaatgccatcgcccaggtgcccaggcctggcaccagcctgaagctgcccggcaccaaccagacaggaggccccagccaggccgccaaccacacctcctggaagacccactaccgcttcccccaggcccagcacgccgagtggaaggcccggcactacggcaccggctaccagaacacccagaaccggctgcacagccccccctaccaccagctgctgaggaagatctgccaggccggaaatggcttccacgcctacaagagctag

SEQ ID NO: 239026 - DNA, 1548 bp, Artificial Sequence
  derived and/or modified sequence
atgagcagcgagatggagcccctgctgctggcctggagctacttcagaagaaggaagttccagctgtgtgccgacctgtgcacccagatgctggagaagagcccctatgaccaggagccagaccctgagctgcctgtgcaccaggccgcctggatcctgaaggcccgggccctgacagagatggtgtacattgatgaaattgatgtggaccaggagggcattgctgagatgatgctggatgaaaatgccatcgcccaggtgccccggcccggcaccagcctgaagctgcccggcaccaaccagacaggaggccccagccaggccgtgcggcccatcacccaggccggccggcccatcaccggcttcctgcggcccagcacccagagcggccggcccggcaccatggagcaggccatccgcacccccaggacagcctacacagcccggcccatcaccagcagcagcggccgctttgtgcggctgggcacagcctccatgctgaccagcccagatggccccttcatcaacctgagccggctgaacctgaccaagtacagccagaagcccaagctggccaaggccctgtttgagtacatcttccaccatgaaaatgatgtgaagacagccctggacctggccgccctgagcacagagcacagccagtacaaggactggtggtggaaggtgcagatcggcaagtgctactaccgcctgggcatgtaccgggaggccgagaagcagttcaagagcgccctgaagcagcaggagatggtggacaccttcctgtacctggccaaggtgtatgtgtccctggaccagcctgtgacagccctgaacctcttcaagcagggcctggacaagtttcctggagaggtgaccctgctgtgtggcatcgcccgcatctatgaggagatgaacaacatgagcagcgctgctgagtactacaaggaggtgctgaagcaggacaacacccacgtggaggccatcgcctgcatcggcagcaaccacttctacagcgaccagcctgagatcgccctgcgcttctaccgccgcctgctgcagatgggcatctacaacggccagctgttcaacaacctgggcctgtgctgcttctacgcccagcagtatgacatgaccctgaccagctttgagcgggccctgagcctggctgaaaatgaggaggaggccgcagatgtgtggtacaacctgggccacgtggccgtgggcatcggggacaccaacctggcccaccagtgcttccggctggccctggtgaacaacaacaaccacgccgaggcctacaacaacctggccgtgctggagatgaggaagggccacgtggagcaggcccgggccctgctgcagacagccagcagcctggccccccacatgtatgagccccacttcaactttgccaccatcagtgacaagatcggggacctgcagaggagctatgtggccgcccagaagtctgaggccgccttcccagaccacgtggacacccagcacctgatcaagcagctgcggcagcactttgccatgctgtag

SEQ ID NO: 239027 - DNA, 636 bp, Artificial Sequence
  derived and/or modified sequence
atgagcagcgagatggagcccctgctgctggcctggagctacttccgtaggcgaaaattccagctctgtgccgacttgtgtacacagatgttggaaaaatctccatatgatcagaagattagctgggcatggtggcatgtgccagttatcccagctacctgggaggccgaagcaggcgagttactcgaacccaggaaacgacgtttgcagcaggccgaaatcaccccgctgtatagttcactgggcaataagtcaaaaacaccttctcaaaaagccgcctggattctgaaggctagagcacttacggagatggtgtatatcgacgagatagatgtcgaccaggagggaattgctgaaatgatgctggacgaaaacgcgattgctcaggtgcctaggcctgggacttccctgaagttaccaggtaccaaccagacaggaggaccgtcccaggctgcgaatcatactagctggaaaacacattatagattccctcaggcccagcatgccgaatggaaagcccggcactacggcacaggttaccagaatactcagaatcgtctccatagcccgccttatcatcaactattacgaaaaatttgccaggcaggaaacggttttcatgcttacaaaagttag

SEQ ID NO: 239028 - DNA, 1548 bp, Artificial Sequence
  derived and/or modified sequence
atgagcagcgagatggagcccctgctgctggcctggagctacttccggaggcggaagtttcagctgtgtgctgatctctgcactcaaatgctcgaaaaatcaccttatgatcaagagccagatccagaattgcctgtgcaccaagccgcctggatactgaaagctcgagcactaactgaaatggtgtatattgacgagatcgatgttgatcaagaaggaatagcagagatgatgctggatgaaaacgccatcgcccaggtgccacggcccgggactagcctgaagctgcccgggactaaccagaccggcggcccatctcaggcggtaaggcccatcactcaagccgggagacccatcaccggctttttacgtccatctacacagagtgggcgtcctggcaccatggagcaggccatcagaacaccccggaccgcctatacagctaggccaattactagttcttcagggagatttgtgcgacttggcacggcgtctatgttgaccagcccagatggacctttcatcaatctctccagactcaatctgactaaatattcccagaaacctaagctggcaaaagcgctgttcgagtacatctttcatcacgagaacgatgtgaagacagctctggacctcgccgcactgtctacagaacatagccagtacaaggactggtggtggaaggtgcagatcggcaaatgttactataggttggggatgtatagggaagctgaaaaacagtttaaaagcgcattgaaacagcaggaaatggtagacacatttctatacctcgctaaggtctacgtctccctcgatcagcctgttactgccctaaacctcttcaaacagggactagataagttccccggagaggtgacactgttgtgtggtatcgcaaggatatacgaagaaatgaacaacatgtcatctgccgctgaatactataaagaggtgcttaaacaggacaatacacacgtagaagcgatagcctgcattggctcaaatcacttttacagtgaccagccagagatagccctgagattttacagaagactgctgcaaatggggatatataacggccagctgtttaacaacctcggcctctgttgcttttacgcacagcagtacgacatgaccctcaccagtttcgaaagagccctgtcattggctgagaatgaggaagaggctgcggacgtgtggtataacctgggacacgtggctgtcggaataggggatacgaatctggcccatcagtgttttcgactggccctggtgaacaataacaatcacgccgaggcctataataacctcgctgtgttagagatgcggaaaggtcatgtggaacaagcgcgagccctgctgcagaccgctagctcccttgcaccccatatgtatgagccacattttaatttcgccaccatctcagacaaaataggcgatctccagcggtcttacgtagctgcccagaaatccgaagccgcgtttcctgatcatgtggacacacagcatcttattaagcagcttaggcagcattttgccatgctctag

SEQ ID NO: 239029 - DNA, 636 bp, Artificial Sequence
  derived and/or modified sequence
atgagtagcgagatggaacccttgctgctggcgtggtcctattttaggcgaagaaagttccagttgtgtgctgacctctgcactcagatgctagagaaatcgccatacgaccagaaaattagttgggcttggtggcacgtccctgtgattcctgctacgtgggaagcggaggccggtgagcttctggagccaagaaaaagaagactccaacaggccgagattacccctctgtactcttccttggggaataagtcaaagactccttcacagaaagccgcatggatccttaaggcgagagctctcaccgaaatggtttatatagacgaaatagatgtggatcaggaggggatcgccgaaatgatgctggatgaaaatgccattgcccaggttcctaggcccggtacttcactgaaattacccggaactaaccaaaccggcggaccgagtcaagccgcaaatcacacaagttggaaaacacattacagatttccacaggctcaacacgccgaatggaaggcccgacattatggaaccggctatcagaacactcagaaccggttgcattctccaccttaccaccagcttctccgtaaaatctgccaggcgggaaatggcttccacgcatataaatcttag

SEQ ID NO: 239030 - DNA, 1548 bp, Artificial Sequence
  derived and/or modified sequence
atgtctagcgaaatggagcccttactgttggcgtggagctatttccggaggcgcaaatttcagctgtgcgctgacctgtgcacccagatgctcgagaaaagcccttacgaccaggagcctgaccctgaactgccagttcaccaggcagcgtggatcctgaaagccagagctctcaccgaaatggtgtacatagatgaaattgacgtggaccaggaaggcattgctgagatgatgctcgatgagaacgcaatcgcacaagtgccgcgaccaggtacatccctgaaactgcctgggaccaatcaaacaggaggcccatctcaggccgtgagaccgataacccaggcgggtcggcctataaccggcttccttcgaccctctacacagtccggccgaccaggtaccatggagcaagcaataagaactcccagaactgcttacacagcccgacccataacaagcagctctggcagatttgttagactgggcaccgctagcatgctcactagcccagacggaccatttatcaacctcagtagactaaaccttactaagtatagccaaaagccaaagctcgccaaagccttgtttgaatacattttccaccatgaaaacgacgtgaaaaccgcactagacctggccgctctgagtacagaacatagccaatacaaagactggtggtggaaggtacagatcggtaagtgttactaccgattgggaatgtaccgcgaggccgaaaaacagtttaaaagcgccctaaaacagcaggagatggtggatacttttctttacctggccaaagtctacgtgtctctggaccagcctgtaaccgcacttaacctttttaagcagggacttgataaatttcccggagaagtgacactcctgtgcggaatagccagaatatatgaggaaatgaacaacatgagtagcgccgctgagtactacaaggaggttctcaaacaggacaatactcacgttgaggcgatcgcgtgcattggctctaaccacttttattccgaccagccagagatcgcactacggttctacaggcgtcttctccagatgggaatttacaatggtcaactgttcaataacctcgggctctgctgcttttacgcacagcaatatgatatgaccctaacaagctttgaacgtgcattaagcctggccgaaaatgaggaggaagcagctgacgtgtggtataatctcggtcacgttgcggtcggcataggagacactaatctcgcccaccagtgctttcggctcgcattggtgaacaacaataaccacgcagaggcatataacaatctagccgtactagaaatgcgaaagggacacgttgagcaagccagagccctgctacagacagcatccagcttggcccctcacatgtatgaacctcactttaatttcgctacgatttctgacaaaattggcgatctccaaaggtcttacgtggcagctcagaaatccgaggccgctttcccagaccacgtcgacacccagcacttaatcaagcagctcagacagcacttcgccatgctgtag

SEQ ID NO: 239031 - DNA, 2171 bp, Artificial Sequence
  derived and/or modified sequence
acctctctcctggagcgctgggccttcgctggccgcaccggcagccatgagctcggagatggagccgctgctcctggcctggagctattttaggcgcaggaagttccagctctgcgccgatctatgcacgcagatgctggagaagtccccttatgaccaggaaccagatcctgaattgccagtgcatcaggcagcttggatcttaaaagcaagagcgctaacagaaatggtatacatagatgaaattgatgtagatcaggaaggaattgcagaaatgatgctggatgaaaatgctatagctcaagttccacgccctggaacgtctttgaaactccctggaactaatcagacaggagggcctagccaggccgttaggccaatcacacaagctggaagacccattacaggtttcctcaggcccagcacgcagagtggaaggccaggcactatggaacaggctatcagaacacccagaaccgcctacacagcccgccctatcaccagctcctccggaagatttgtcaggctgggaacggcttccatgcttacaagtcctgatggaccatttataaatttatctaggctgaatttaacaaagtattcccagaaacctaagttggcaaaggctttgtttgagtatatctttcatcatgaaaatgatgttaagactgctttggatctggctgccctctccacagaacattctcagtacaaggactggtggtggaaagtacagattggaaaatgttactacaggttgggaatgtatcgtgaagcagaaaaacagtttaaatcagccctgaagcagcaggaaatggtagatacatttctgtacttggcaaaagtttatgtctcattggatcaacctgtgactgctttaaatcttttcaaacaaggcttagataagtttccaggagaagtaaccctgctctgtggaattgcaagaatctatgaggaaatgaacaatatgtcatcagcagcagaatattacaaagaagttttgaaacaagacaatactcatgtggaagccatcgcatgcattggaagcaaccacttctattctgatcagccagaaatagctctccggttttacaggcggctgctgcagatgggcatttataacggccagctttttaacaatctggggctgtgttgcttctatgcccagcagtatgatatgactctgacctcatttgaacgtgccctttctttggctgaaaatgaagaagaggcagctgatgtctggtacaacttgggacatgtagctgtgggaataggagatacaaatttggcccatcagtgcttcaggctggctctggtcaacaacaacaaccacgccgaggcctacaacaacctggctgtgctggagatgcggaagggccacgttgaacaggcaagggcactattacaaactgcatcatcattagcaccccatatgtatgaaccgcattttaattttgcaacaatctctgataagattggagatctgcagagaagctatgttgctgcgcagaagtctgaagcagcatttccagaccatgtggacacacaacatttaattaaacaattaaggcagcattttgctatgctctgattgttccttagaccacatatgttcttatgaagcagcattatgcaaggggaaaaaagcactatgtctgtgtatgtatgtatatagtgtaatacgtatattttaacaaacctgtccttgatattagttaaggtgacacataagggtgacacagaatgtgtaatgcaaatttcatagtaatagtaactttataaaataatattataaaatacaggatttaaacctttctaaatagatcctgaaactgtctctcacattatatagtagatgtttgtttataatgtttacaaaacattttggtgaatttcctcaatgttttataaatgtacattttttaagtccttaagctgactcttagccatcatgtagcttaaggagtctgaaatctgccattaaaactgcacctttaagccaggtgtggtagcatgtgcctatagtcccagctacttgggaggtggaggtgggaggattataaatagagactttccttaagactttaaaaatgtatttaaaactattttttattaaatactttgtgatttcctattaagctttaaaataaatcattgtgtaaaacacc

SEQ ID NO: 239032 - protein, 329 aa, Artificial Sequence
  derived and/or modified sequence
MGTAAAAAAAAAAAAAGEGARSPSPAAVSLGLGVAVVSSLVNGSTFVLQKKGIVRAKRRGTSYLTDIVWWAGTIAMAVGQIGNFLAYTAVPTVLVTPLGALGVPFGSILASYLLKEKLNILGKLGCLLSCAGSVVLIIHSPKSESVTTQAELEEKLTNPVFVGYLCIVLLMLLLLIFWIAPAHGPTNIMVYISICSLLGSFTVPSTKGIGLAAQDILHNNPSSQRALCLCLVLLAVLGCSIIVQFRYINKALECFDSSVFGAIYYVVFTTLVLLASAILFREWSNVGLVDFLGMACGFTTVSVGIVLIQVFKEFNFNLGEMNKSNMKTD

SEQ ID NO: 239033 - protein, 254 aa, Artificial Sequence
  derived and/or modified sequence
MAVGQIGNFLAYTAVPTVLVTPLGALGVPFGSILASYLLKEKLNILGKLGCLLSCAGSVVLIIHSPKSESVTTQAELEEKLTNPVFVGYLCIVLLMLLLLIFWIAPAHGPTNIMVYISICSLLGSFTVPSTKGIGLAAQDILHNNPSSQRALCLCLVLLAVLGCSIIVQFRYINKALECFDSSVFGAIYYVVFTTLVLLASAILFREWSNVGLVDFLGMACGFTTVSVGIVLIQVFKEFNFNLGEMNKSNMKTD

SEQ ID NO: 239034 - protein, 159 aa, Artificial Sequence
  derived and/or modified sequence
MLLLLIFWIAPAHGPTNIMVYISICSLLGSFTVPSTKGIGLAAQDILHNNPSSQRALCLCLVLLAVLGCSIIVQFRYINKALECFDSSVFGAIYYVVFTTLVLLASAILFREWSNVGLVDFLGMACGFTTVSVGIVLIQVFKEFNFNLGEMNKSNMKTD

SEQ ID NO: 239035 - DNA, 990 bp, Artificial Sequence
  derived and/or modified sequence
atggggacagcggccgccgccgcggccgccgccgcagctgccgccgccggcgagggagcccgctcgccttcccccgcggcagtgagcctcggtcttggagtggctgtggtctccagcttggtgaatggatcgacatttgttctgcaaaaaaaggggatcgtgagggccaaacgaagaggtacctcttacctcaccgatatcgtgtggtgggctggcacaattgccatggccgtcggccagattgggaacttcctggcttacacagcagtgcctacagtgctagtcacgccactaggagctctgggggtgccttttggttctatattggccagttacctcctgaaggaaaagctaaatattctcgggaaactcggatgcctgctcagctgtgcaggctctgtcgtattgatcatccattcccccaaatccgaaagtgtgaccacacaggctgagcttgaagaaaaactgaccaaccccgtttttgtcgggtatttgtgcatcgtactcttgatgctgctgttgctcatcttctggatcgcaccagctcatggtcctacgaacattatggtgtatattagcatctgctccctattggggagttttacagtcccaagtacaaaggggatcggcctggccgcccaggatattcttcacaataatccatctagccagagggcactctgtctgtgtctcgttctactggccgtgttgggatgctccattatcgttcagttccgatatattaacaaggccttagaatgtttcgacagcagcgtatttggtgccatttattatgtcgtgtttaccactctggtcttactggctagcgcgattctcttcagggagtggagtaatgtaggcctggtcgattttctggggatggcatgtggttttaccacagtttcagtgggaatcgttctcattcaagtatttaaagagttcaatttcaatctcggagaaatgaacaaatccaatatgaagactgattag

SEQ ID NO: 239036 - DNA, 990 bp, Artificial Sequence
  derived and/or modified sequence
atgggcacagctgctgctgctgctgctgctgctgctgctgctgctgctggggagggcgcccggagccccagccctgctgctgtgtccctgggcctgggcgtggccgtggtgagcagcctggtgaatggcagcacctttgtgctgcagaagaagggcatcgtgcgggccaagaggcggggcaccagctacctgacagacatcgtgtggtgggccggcaccatcgccatggctgtgggccagatcggcaacttcctggcctacacagctgtgcccaccgtgctggtgacccccctgggcgccctgggcgtgcccttcggcagcatcctggccagctacctgctgaaggagaagctgaacatcctgggcaagctgggctgcctgctgagctgtgccggctctgtggtgctgatcatccacagccccaagtctgagagcgtgaccacccaggccgagctggaggagaagctgaccaaccctgtgtttgtgggctacctgtgcatcgtgctgctgatgctgctgctgctgatcttctggatcgccccagcccacggccccaccaacatcatggtgtacatcagcatctgcagcctgctgggcagcttcaccgtgcccagcaccaagggcatcggcctggccgcccaggacatcctgcacaacaaccccagcagccagagggccctgtgcctgtgcctggtgctgctggccgtgctgggctgcagcatcatcgtgcagttccgctacatcaacaaggccctggagtgctttgacagctctgtgtttggagccatctactacgtggtgttcaccaccctggtgctgctggccagcgccatcctcttccgggagtggagcaatgtgggcctggtggacttcctgggcatggcctgtggcttcaccaccgtgtctgtgggcatcgtgctgatccaggtgttcaaggagttcaacttcaacctgggggagatgaacaagagcaacatgaagacagactag

SEQ ID NO: 239037 - DNA, 990 bp, Artificial Sequence
  derived and/or modified sequence
atgggcaccgccgccgccgccgccgccgccgccgccgccgccgccgccggagagggggctcggagcccatcccctgctgctgtaagtctcgggctgggtgtggccgtggtctcttctttggtaaacgggagcacattcgtgctccagaaaaaaggcatcgtccgggctaaaaggcgggggacctcgtacctgactgatatcgtgtggtgggctggcactatcgccatggccgtcgggcagatcggcaatttcctcgcctataccgccgtcccaaccgtgctggtcactcccctgggcgccctcggagtaccatttggatctatcctcgccagctatcttcttaaagaaaaattgaatattctgggaaagctggggtgcttgcttagttgcgcagggagcgtggttctgatcattcattctcccaagtccgagagcgtcacaacacaggctgaactggaagaaaaactgaccaatcccgtgtttgtcggctatctgtgtattgtcctcctcatgttattactgctgattttctggattgcacctgcccatgggcccactaacatcatggtctacatttctatatgctcactcctggggagctttaccgttccttccactaaaggcattggattggctgcccaagacatcctgcataacaaccctagctctcagcgcgctctgtgcctatgcctagtgctgttggcggtgctcggctgtagcatcattgttcaatttagatatattaataaagccctggaatgcttcgattctagcgtgtttggtgccatttattatgtggtgttcacgaccctggtccttctagcatctgccattctgttccgcgagtggtccaatgttggtctcgtggacttcctggggatggcctgcggcttcactactgtaagtgttggtattgtactgattcaggtctttaaggagtttaatttcaatctgggtgagatgaacaagtcaaatatgaaaacagactag

SEQ ID NO: 239038 - DNA, 6567 bp, Artificial Sequence
  derived and/or modified sequence
ggctcggagggcgggcgcgggcggaatggggactgcagctgcggcagcggcggcggcggcggcggcggcggccggggagggggcgcgtagcccgagccccgccgccgtgtcgctcggcctgggcgtggccgtcgtgtcgagcctggtgaacgggtccacgttcgtgctacagaagaagggcatcgtgcgtgccaagcggcgaggtacttcctatttaacagacattgtgtggtgggctggcacaatcgcaatggctgttggccagattggaaacttcctggcttacacggcggtccccacggtcctggtaacccccctgggcgcccttggagtaccgttcgggtccattttagcttcctatctcctgaaggaaaagctcaacatcttgggcaagttggggtgcctgctaagctgtgcaggctccgtcgtgctgattatccactccccaaagtctgagagtgtgacaactcaggctgagctggaggaaaagctgaccaatccagtgtttgtgggctacctgtgcatcgtgctgctcatgctgctgctgctcatcttctggatcgcgccggcccatgggcccaccaacatcatggtctacatcagcatctgctccttgctgggcagtttcaccgtgccttccaccaagggcatcgggctggcggcccaagacatcttgcataacaacccgtccagtcagagagccctctgcctgtgcctggtactcctggccgtgctcggctgcagcatcatcgtccagttcaggtacatcaacaaggcgctggagtgcttcgactcctcggtgttcggggccatctactacgtcgtgtttaccacgctggtcctgctggcctcagccatcctcttccgggagtggagcaacgtgggcctggtggacttcttggggatggcctgtggattcacgaccgtctccgtggggattgtccttatacaggtgttcaaagagttcaatttcaaccttggggagatgaacaaatctaatatgaaaacagactagattgcaataggagcttggatggttcgaggaataggcattggaggtggtttctggccgtgattggatgtgaagtagaagaggtcctcgatcatggtgttagaattgactggatagtaacaggtggtctggtggatagcggggagcatggctcagcaccagagcagaggcccagccagccctctgcagcccaaacgtccccaacggttgcctggcaccatctctctctgatgagacgaatctcattttcatttccattaacctggaagctttcatgaatattctcttcttttaaaacattttaacattatttaaacagaaaaagatgggctctttctggttagttgttacatgatagcagagatatttttacttagattactttgggaatgagagattgttgtcttgaactctggcactgtacagtgaatgtgtctgtagttgtgttagtttgcattaagcatgtataacattcaagtatgtcatccaaataagaggcatatacattgaattgtttttaatcctctgacaagttgactcttcgacccccacccccacccaagacattttaatagtaaatagagagagagagaagagttaatgaacatgaggtagtgttccactggcaggatgacttttcaatagctcaaatcaatttcagtgcctttatcacttgaattattaacttaatttgactcttaatgtgtatatgttcttagattagaataatgcaacttcgagtatgctttaatatttcaatattcaagttacaaatgtataaggcagttagaaataatacagtcacatgtcacttaatgatagggaaacattctgagaaatgcattgtaaggtgactttattgtgtgaacatcatggagtgcacttatacaaacctagatgggacacctatgacccacccaggccagatggtacagcctgttgctcctgggccacacacctgtacagcatgtgaccgcactgaataccgcaggcaattgtaacacagtggtgagtatttgtgtttacaaacataggaaaggtacagtaaaactatggtattacaatgttatgggaccaccgtcatgtaagtggtatgtctttgacagaaacatggttacgtggttcatgactgtatattcactggaagatagtcaagactaaagacacattagagcaaattgacccctttaacatgtgattattgtccaattaaagacagttgatttaagtagcatgaggtattattttatttgtattcgatctgtgttacctgggatccagtatcaaatatatccacattctttatcagcaagcattcatggccattcagaagaaataaattaggtaacttgataataaggctaagtgggagagtacctgttcaatagctcatatatcgagtaccctgtcatacaggaacaagttaaaggacacaattgaggttaggctagcttctacaaattgcaatatgcagtttttgaaagattttctaacaaaaagccaataaatgtagccatctccttgttgtttgcaatggcagagcatcctagagttcctcagctaacctctcattatgtgtcttaaatgcaaaagagccattaattatgccagtatttgaatcaaagaggtcattctctgtctatagtgttcccatccatgtgttccaaatgggagcatagcatgaagtgatgcacatatttcaccacggtatcatgtacttcatggccagtgttttatctcagcagggaactacgccaagttgaaagatggggttgggtaaagtagattaggtgaagtagaacataaaattgaatagtacccaattaaagttcctcagtaagaaaaaaaatgtgtttttgtaggcaaaaagaacatttctaaagtctcaaggaatagcttcctaaagtgttgagtaaagaggctaaataaaatgagactagtttaatatagagagaaaaatacctttatggagtaaacgtgtacatgatgatcatgggttgtcagtgatttgtgaactgagagcagcaacaacattattttttaaaaatcttaaatcctctcaatggatggttaacaaatgctcaaagtccattactctttttattggctcttgcaggttttgtgttttatcatcagtgcttttagaaatgcaggccttaacttactgaactgaactttctgaaaacgtaatgtagcagtatcaatatacttttgggcataaaaatagtttcctaggtaaggggtgtgagatattcaaagaatacatgtggctaacaagtgtaatgagaaagttcatgtgtcacatgaaaatgatcatgtttgtgttgctacagcttttgtgggaaatttagtttaaaggcagctcttggtgtaccttagtatattttaatccacaattataccattgatactgagaggtgatacccgatgatcttctctataatattcttagagtaaaacaaaatctcaaaagtattaatagctcttctacccttgaaggtgactggtcctgggacagttagaatctttcaggtttacctctgttcagcagatacttcagtaggatacatagcttttcttccagtgaaacaaagttcatatcatccattgtttttcaagcacgtgacaccagcctcaaagtaaatgacatgaccagtggttgaacagtctaattttcaaatttaatatagagcatataacttctgatttgatagtatttattttaaaaaattatgttttcatcattcatttgaaaatgaaaaagccccaaagtgagaactttgggggagggcctagaacatggatagatctcttagtggtctttccaaaagtacatgtacttgaaatattttcattatcatactattctttgaaaaaaaagatgcttactgtatacttgttttcaagcatcctctaaaatcaaaggttttgatcacaatatgcagatttctcttgatagatacttaaataggctatttctctcctcttcttgggcaatgccttgttttctcctctgaatatttgcatttgaaaggattgcttcctgttctgctcattgatcaaaggtagggccaattaaggattctaaccctaacccagcaccacaaagcccccctggagcatcttcccggctggcaggaccatgccatctctgtggagaaggtgctggggagggaagtccttccagtgccacatggagtgaggccctgcccatgctggggactttggggaggaatttggtattctggtggccttgctcagctctcattgagatcttttcctatcagaatgttagtgaatatacttcgcagctctttgttcagcaataaggaatattctttcaattcctgctcttcaagccaatttactacacccagttgtctttccagaagttcatcccagcggtaatatgttggtgtttgttcttctttggatttcacatctgttttctggtagaagtgagcactgttcacttgtgcagtcgtcttattttccttcttcctagatgactcagctctttgtaaatgttgtgctcaacttctaggggccagttctagactttggagatgcagtgtctcccaggtgtgcacggacacctggtccgtggaaacaggtgtgatgggcacaggctgctgcccttctgtctggtcgggggattcctcttcttcaagctgctcagctaacccagaagaggggagagagtactccggtggttcccagagcccctcccgttgtgccgcttcgacctgacacctgctcgatgctgacttaggcttcctgccaccaagcaggaaactagaaagagaacatttcagtgtaaggtctgttcccgacagcatggattagcttccgtgttctgaagttgttcttttcatggtgtctgacaccgagggcgttgttcgtccatcaggcgggattggatggagtcttggtgttttgccttctcagggaccaaaaatgtatcattgactccttaacagtgaccttcctcccaaggacatatccgtgttcatttttcataggttttactcatattcataggtagattctgttaatgtgagttggaaagaaaagaccaatttgtacaccagtcacaccacaagacagtttatcatataaaatacctcaattttttgtattcctcatttccacctcacaattgtactggtgatgaattttaagggtctgtcctttagcttataggtgatgtttcacatctggccagattcttatacctccattgtatacttgaaaaggttcagaattacaggaacagcagtgagaatttggcccactaccacgactcatttgtttcattcacattcctcacgtgcaacaacataattatattttaagaaaatgtaactttgttacatcaaaatatgttgtctagtaaaaagttgatattcagtagaacaaggatcatgtaaataaacatctatttcacatgtacccaaaagcatttaaaaagcagaatccagggcccagagcatgagccagggaggaggatgtttttcttcttttctctatttttccctaaattgtgcaaacataggtgagtctcttaacctttctgtgcctcagtttttctacctctaaaggggtgggatggttcttcaaattgtttctaaaacaccggcactttcagcagtgttctggtggcctgagatgagagcaccgtgttcagaagtgcctgggagtggcacagtggaaactccgcttgcacggaccatggagtctgctcaggaccatgctgtaggacacacagcctcatgcgctgagaaagcaaaggaagtgctgggtgtaaagtttgcatgattccatgaagctttagttttcctttttttgttttaaaagaaagggttttatatgttctattgtaaaatatggaaattaaacagggacttcagaaagccgcacagaaagatcaccttccgatggtgtgatgtgctcctgacattcggccgaggtctgtattctgaaaaagatttaatggcctgtgaaacacgtggattctgttgcactggatttgtaataaatgacgctgaacttcctgcttccaagcagctcaaccctgatgctgaactgacaccaggcgaatgtcagggctcccaaaccactagtgccaaagggtcatgttgaaaagttcagaatatttatttgtcagaatataataattgccccccaccttagtatttttgcactttacagaaatttagatactgtttttcagtggcttgagcgttttgccttttcaaaggataactattattttcttgaaaatggaatataatcatgagaggaagaagatgtaaaaaatgtcaaatgttgattggttgtgtaaaagttttgtcatagacatgtattggggagcttccaattagcatacatagacacatgtgtcagtggccaagacctgcttatattttgctttatagatgtagtcatagcatgttgttattgcctcatgtaaataaaaaggctattaagttttccagtaatatttattaatctgtatgtgttttaaaataaaataacttatttctagctgaaca

SEQ ID NO: 239039 - DNA, 7613 bp, Artificial Sequence
  derived and/or modified sequence
gcaaagtgccaggaatgatgcaggcagcctgccagatccttggaatcttctggaatgagagaggttgagctgcagcccaaaggcctgtgaaagtgccaggttgaagggtgacggggtgcccagattcccaccttcaaatttcctggcagcatcctggctgtcatggagcgctgtctccagttcagttttctgacacataaggattcgtatggtatgatcctgggcctttgggagacaagaaaagcaagtgctgaaagagaagcaaagaaaccttctccagaggacaggagggaacttcacaccctccactcacctctagctgcctccttagggcttgctgatgttggtggcttgccttcttttcctatagaaaagaagaggaagacagagctcttactagagggaggcagagatggcacagcaagagacatgcccccagcatggcaccactgtcccaggacaggcccacccatgggaccaggttatcagggaccctgtggggatggggtggaagctgggaggtgagccttcctccccaggctgggagtaggcgagacgagactggggcctctacatctgagtgccccccaaacccagcggtcatgtcgtgagcaaagaaagaaaccatgttacctctttcagctgagctccgttctgttgtttctgtggggagagtcaaaggaaggtgactgagggtggcccctcgactctattgcccaggccaggaagcggtacgcaggggtcaggaatggattttaagggcaaagttctcagacccaatgggaacacaaactggtcaacttgccttaacgcccaaagaaaaaggatttgggtctttgttggtttttgcccacagccacagaactgaaagtctgaaactagattctctggaaaagacagtaacataaaccttccgacataagagtgtgagaaaagcccacccttctgccagcttgtgatggagaaagatgtgttcattcaacaagcattgagcaagcacataggggccggggacagttcttcacagctgggatataggacggaaaaggcagacaggagcccttggccccaaggtttccattctagtgaatctttaaatctcagactctcagagcaaacagaaccctctgatactctaactctacctcctcaggaaacggaagcccaaagaggaggggagcttacagcaggccctggactagggattaacacaaaaacaacagcaacaaatctgatttaagcttcacacatgtacttcctatttaacagacattgtgtggtgggctggcacaatcgcaatggctgttggccagattggaaacttcctggcttacacggcggtccccacggtcctggtaacccccctgggcgcccttggagtaccgttcgggtccattttagcttcctatctcctgaaggaaaagctcaacatcttgggcaagttggggtgcctgctaagctgtgcaggctccgtcgtgctgattatccactccccaaagtctgagagtgtgacaactcaggctgagctggaggaaaagctgaccaatccagtgtttgtgggctacctgtgcatcgtgctgctcatgctgctgctgctcatcttctggatcgcgccggcccatgggcccaccaacatcatggtctacatcagcatctgctccttgctgggcagtttcaccgtgccttccaccaagggcatcgggctggcggcccaagacatcttgcataacaacccgtccagtcagagagccctctgcctgtgcctggtactcctggccgtgctcggctgcagcatcatcgtccagttcaggtacatcaacaaggcgctggagtgcttcgactcctcggtgttcggggccatctactacgtcgtgtttaccacgctggtcctgctggcctcagccatcctcttccgggagtggagcaacgtgggcctggtggacttcttggggatggcctgtggattcacgaccgtctccgtggggattgtccttatacaggtgttcaaagagttcaatttcaaccttggggagatgaacaaatctaatatgaaaacagactagattgcaataggagcttggatggttcgaggaataggcattggaggtggtttctggccgtgattggatgtgaagtagaagaggtcctcgatcatggtgttagaattgactggatagtaacaggtggtctggtggatagcggggagcatggctcagcaccagagcagaggcccagccagccctctgcagcccaaacgtccccaacggttgcctggcaccatctctctctgatgagacgaatctcattttcatttccattaacctggaagctttcatgaatattctcttcttttaaaacattttaacattatttaaacagaaaaagatgggctctttctggttagttgttacatgatagcagagatatttttacttagattactttgggaatgagagattgttgtcttgaactctggcactgtacagtgaatgtgtctgtagttgtgttagtttgcattaagcatgtataacattcaagtatgtcatccaaataagaggcatatacattgaattgtttttaatcctctgacaagttgactcttcgacccccacccccacccaagacattttaatagtaaatagagagagagagaagagttaatgaacatgaggtagtgttccactggcaggatgacttttcaatagctcaaatcaatttcagtgcctttatcacttgaattattaacttaatttgactcttaatgtgtatatgttcttagattagaataatgcaacttcgagtatgctttaatatttcaatattcaagttacaaatgtataaggcagttagaaataatacagtcacatgtcacttaatgatagggaaacattctgagaaatgcattgtaaggtgactttattgtgtgaacatcatggagtgcacttatacaaacctagatgggacacctatgacccacccaggccagatggtacagcctgttgctcctgggccacacacctgtacagcatgtgaccgcactgaataccgcaggcaattgtaacacagtggtgagtatttgtgtttacaaacataggaaaggtacagtaaaactatggtattacaatgttatgggaccaccgtcatgtaagtggtatgtctttgacagaaacatggttacgtggttcatgactgtatattcactggaagatagtcaagactaaagacacattagagcaaattgacccctttaacatgtgattattgtccaattaaagacagttgatttaagtagcatgaggtattattttatttgtattcgatctgtgttacctgggatccagtatcaaatatatccacattctttatcagcaagcattcatggccattcagaagaaataaattaggtaacttgataataaggctaagtgggagagtacctgttcaatagctcatatatcgagtaccctgtcatacaggaacaagttaaaggacacaattgaggttaggctagcttctacaaattgcaatatgcagtttttgaaagattttctaacaaaaagccaataaatgtagccatctccttgttgtttgcaatggcagagcatcctagagttcctcagctaacctctcattatgtgtcttaaatgcaaaagagccattaattatgccagtatttgaatcaaagaggtcattctctgtctatagtgttcccatccatgtgttccaaatgggagcatagcatgaagtgatgcacatatttcaccacggtatcatgtacttcatggccagtgttttatctcagcagggaactacgccaagttgaaagatggggttgggtaaagtagattaggtgaagtagaacataaaattgaatagtacccaattaaagttcctcagtaagaaaaaaaatgtgtttttgtaggcaaaaagaacatttctaaagtctcaaggaatagcttcctaaagtgttgagtaaagaggctaaataaaatgagactagtttaatatagagagaaaaatacctttatggagtaaacgtgtacatgatgatcatgggttgtcagtgatttgtgaactgagagcagcaacaacattattttttaaaaatcttaaatcctctcaatggatggttaacaaatgctcaaagtccattactctttttattggctcttgcaggttttgtgttttatcatcagtgcttttagaaatgcaggccttaacttactgaactgaactttctgaaaacgtaatgtagcagtatcaatatacttttgggcataaaaatagtttcctaggtaaggggtgtgagatattcaaagaatacatgtggctaacaagtgtaatgagaaagttcatgtgtcacatgaaaatgatcatgtttgtgttgctacagcttttgtgggaaatttagtttaaaggcagctcttggtgtaccttagtatattttaatccacaattataccattgatactgagaggtgatacccgatgatcttctctataatattcttagagtaaaacaaaatctcaaaagtattaatagctcttctacccttgaaggtgactggtcctgggacagttagaatctttcaggtttacctctgttcagcagatacttcagtaggatacatagcttttcttccagtgaaacaaagttcatatcatccattgtttttcaagcacgtgacaccagcctcaaagtaaatgacatgaccagtggttgaacagtctaattttcaaatttaatatagagcatataacttctgatttgatagtatttattttaaaaaattatgttttcatcattcatttgaaaatgaaaaagccccaaagtgagaactttgggggagggcctagaacatggatagatctcttagtggtctttccaaaagtacatgtacttgaaatattttcattatcatactattctttgaaaaaaaagatgcttactgtatacttgttttcaagcatcctctaaaatcaaaggttttgatcacaatatgcagatttctcttgatagatacttaaataggctatttctctcctcttcttgggcaatgccttgttttctcctctgaatatttgcatttgaaaggattgcttcctgttctgctcattgatcaaaggtagggccaattaaggattctaaccctaacccagcaccacaaagcccccctggagcatcttcccggctggcaggaccatgccatctctgtggagaaggtgctggggagggaagtccttccagtgccacatggagtgaggccctgcccatgctggggactttggggaggaatttggtattctggtggccttgctcagctctcattgagatcttttcctatcagaatgttagtgaatatacttcgcagctctttgttcagcaataaggaatattctttcaattcctgctcttcaagccaatttactacacccagttgtctttccagaagttcatcccagcggtaatatgttggtgtttgttcttctttggatttcacatctgttttctggtagaagtgagcactgttcacttgtgcagtcgtcttattttccttcttcctagatgactcagctctttgtaaatgttgtgctcaacttctaggggccagttctagactttggagatgcagtgtctcccaggtgtgcacggacacctggtccgtggaaacaggtgtgatgggcacaggctgctgcccttctgtctggtcgggggattcctcttcttcaagctgctcagctaacccagaagaggggagagagtactccggtggttcccagagcccctcccgttgtgccgcttcgacctgacacctgctcgatgctgacttaggcttcctgccaccaagcaggaaactagaaagagaacatttcagtgtaaggtctgttcccgacagcatggattagcttccgtgttctgaagttgttcttttcatggtgtctgacaccgagggcgttgttcgtccatcaggcgggattggatggagtcttggtgttttgccttctcagggaccaaaaatgtatcattgactccttaacagtgaccttcctcccaaggacatatccgtgttcatttttcataggttttactcatattcataggtagattctgttaatgtgagttggaaagaaaagaccaatttgtacaccagtcacaccacaagacagtttatcatataaaatacctcaattttttgtattcctcatttccacctcacaattgtactggtgatgaattttaagggtctgtcctttagcttataggtgatgtttcacatctggccagattcttatacctccattgtatacttgaaaaggttcagaattacaggaacagcagtgagaatttggcccactaccacgactcatttgtttcattcacattcctcacgtgcaacaacataattatattttaagaaaatgtaactttgttacatcaaaatatgttgtctagtaaaaagttgatattcagtagaacaaggatcatgtaaataaacatctatttcacatgtacccaaaagcatttaaaaagcagaatccagggcccagagcatgagccagggaggaggatgtttttcttcttttctctatttttccctaaattgtgcaaacataggtgagtctcttaacctttctgtgcctcagtttttctacctctaaaggggtgggatggttcttcaaattgtttctaaaacaccggcactttcagcagtgttctggtggcctgagatgagagcaccgtgttcagaagtgcctgggagtggcacagtggaaactccgcttgcacggaccatggagtctgctcaggaccatgctgtaggacacacagcctcatgcgctgagaaagcaaaggaagtgctgggtgtaaagtttgcatgattccatgaagctttagttttcctttttttgttttaaaagaaagggttttatatgttctattgtaaaatatggaaattaaacagggacttcagaaagccgcacagaaagatcaccttccgatggtgtgatgtgctcctgacattcggccgaggtctgtattctgaaaaagatttaatggcctgtgaaacacgtggattctgttgcactggatttgtaataaatgacgctgaacttcctgcttccaagcagctcaaccctgatgctgaactgacaccaggcgaatgtcagggctcccaaaccactagtgccaaagggtcatgttgaaaagttcagaatatttatttgtcagaatataataattgccccccaccttagtatttttgcactttacagaaatttagatactgtttttcagtggcttgagcgttttgccttttcaaaggataactattattttcttgaaaatggaatataatcatgagaggaagaagatgtaaaaaatgtcaaatgttgattggttgtgtaaaagttttgtcatagacatgtattggggagcttccaattagcatacatagacacatgtgtcagtggccaagacctgcttatattttgctttatagatgtagtcatagcatgttgttattgcctcatgtaaataaaaaggctattaagttttccagtaatatttattaatctgtatgtgttttaaaataaaataacttatttctagctgaa

SEQ ID NO: 239040 - DNA, 1675 bp, Artificial Sequence
  derived and/or modified sequence
acccttctcctggctcagcctcccgagtagctgggactacaggcctccgccacgacgcccagctaattttttgtatttttagtagagacggggtttcactgtgttagccaggatggtctcgatctcctgaccttgtgatccacccgcctcggcctcccgaagtgctgggattacaggcgtgagccaccgcgcccggcttgttgtagtttattaaaacgaggaaactagactatgggatcacaagcccagagccccatgtagctgactctagcgccaagggcggaagagaaacgcccagcgccagggctctccttcgatctctgcagcggcgcgccgggcttcgcgctccggtacttcctatttaacagacattgtgtggtgggctggcacaatcgcaatggctgttggccagattggaaacttcctggcttacacggcggtccccacggtcctggtaacccccctgggcgcccttggagtaccgttcgggtccattttagcttcctatctcctgaaggaaaagctcaacatcttgggcaagttggggtgcctgctaagctgtgcaggctccgtcgtgctgattatccactccccaaagtctgagagtgtgacaactcaggctgagctggaggaaaagctgaccaatccagtgtttgtgggctacctgtgcatcgtgctgctcatgctgctgctgctcatcttctggatcgcgccggcccatgggcccaccaacatcatggtctacatcagcatctgctccttgctgggcagtttcaccgtgccttccaccaagggcatcgggctggcggcccaagacatcttgcataacaacccgtccagtcagagagccctctgcctgtgcctggtactcctggccgtgctcggctgcagcatcatcgtccagttcaggtacatcaacaaggcgctggagtgcttcgactcctcggtgttcggggccatctactacgtcgtgtttaccacgctggtcctgctggcctcagccatcctcttccgggagtggagcaacgtgggcctggtggacttcttggggatggcctgtggattcacgaccgtctccgtggggattgtccttatacaggtgttcaaagagttcaatttcaaccttggggagatgaacaaatctaatatgaaaacagactagattgcaataggagcttggatggttcgaggaataggcattggaggtggtttctggccgtgattggatgtgaagtagaagaggtcctcgatcatggtgttagaattgactggatagtaacaggtggtctggtggatagcggggagcatggctcagcaccagagcagaggcccagccagccctctgcagcccaaacgtccccaacggttgcctggcaccatctctctctgatgagacgaatctcattttcatttccattaacctggaagctttcatgaatattctcttcttttaaaacattttaacattatttaaacagaaaaagatgggctctttctggttagttgttacatgatagcagagatatttttacttagattactttgggaatgagagattgttgtcttgaactctggcactgtacagtgaatgtgtctgtagttgtgttagtttgcattaagcatgtataacattcaagtatgtcatccaaataagaggcatatacattgaattgtt

SEQ ID NO: 239041 - DNA, 990 bp, Artificial Sequence
  derived and/or modified sequence
atgggcacagctgctgccgctgcggcagccgctgctgctgccgcagctggcgagggggctaggagtcctagtcccgctgctgtgtctctaggccttggtgttgcggtagtaagctctctggttaatggttcgacctttgtgctccagaaaaaggggatcgtgcgcgctaagcgtcgcggaaccagttacctgacagatattgtgtggtgggccggtactatcgcaatggcagtggggcagattggaaacttcctagcctatacagccgtgcccacagtgttagttactcctctcggagcactgggagtccctttcggttccatccttgcctcttacctgcttaaagaaaagcttaacatcctaggaaagcttgggtgcctgctgtcctgcgccggaagtgtcgtcttgatcatccacagccctaagtcggaatccgtaaccacacaggcggagctggaagagaagctgacgaatcctgtttttgtggggtacctgtgcattgtattactgatgctcctcctcctcattttctggatagccccagctcacgggccaactaatataatggtgtatatctctatctgcagtctgttgggcagctttacagtgccatctaccaaagggatagggcttgccgctcaggatatactgcataacaatccgtcttcccagcgggcactgtgcctttgcctggtgttgctggcggtcctggggtgttctatcattgtgcagtttaggtacatcaacaaggctcttgaatgttttgatagttctgtgttcggggctatttattacgtcgtgttcactacgcttgtgctgttagctagcgcaatcctctttagggagtggtctaacgtaggcctcgtggacttcctgggaatggcttgcggctttaccactgtgtctgttggcattgtcctcattcaggtgttcaaggaattcaatttcaatctcggggagatgaacaaaagtaatatgaagactgactag

SEQ ID NO: 239042 - DNA, 990 bp, Artificial Sequence
  derived and/or modified sequence
atgggcaccgccgccgccgccgccgccgccgccgccgccgccgccgccggcgagggcgccagaagccccagccccgccgccgtgagcctgggcctgggcgtggccgtggtgagcagcctggtgaacggcagcaccttcgtgctgcagaagaagggcatcgtgagagccaagagaagaggcaccagctacctgaccgacatcgtgtggtgggccggcaccatcgccatggccgtgggccagatcggcaacttcctggcctacaccgccgtgcccaccgtgctggtgacccccctgggcgccctgggcgtgcccttcggcagcatcctggccagctacctgctgaaggagaagctgaacatcctgggcaagctgggctgcctgctgagctgcgccggcagcgtggtgctgatcatccacagccccaagagcgagagcgtgaccacccaggccgagctggaggagaagctgaccaaccccgtgttcgtgggctacctgtgcatcgtgctgctgatgctgctgctgctgatcttctggatcgcccccgcccacggccccaccaacatcatggtgtacatcagcatctgcagcctgctgggcagcttcaccgtgcccagcaccaagggcatcggcctggccgcccaggacatcctgcacaacaaccccagcagccagagagccctgtgcctgtgcctggtgctgctggccgtgctgggctgcagcatcatcgtgcagttcagatacatcaacaaggccctggagtgcttcgacagcagcgtgttcggcgccatctactacgtggtgttcaccaccctggtgctgctggccagcgccatcctgttcagagagtggagcaacgtgggcctggtggacttcctgggcatggcctgcggcttcaccaccgtgagcgtgggcatcgtgctgatccaggtgttcaaggagttcaacttcaacctgggcgagatgaacaagagcaacatgaagaccgactag

SEQ ID NO: 239043 - protein, 174 aa, Artificial Sequence
  derived and/or modified sequence
MATVAELKAVLKDTLEKKGVLGHLKARIRAEVFNALDDDREPRPSLSHENLLINELIREYLEFNKYKYTASVLIAESGQPVVPLDRQFLIHELNAFEESKDNTIPLLYGILAHFLRGTKDGIQNAFLKGPSLQPSDPSLGRQPSRRKPMDDHLRKEEQKSTNIEDLHVSQAVNR

SEQ ID NO: 239044 - DNA, 525 bp, Artificial Sequence
  derived and/or modified sequence
atggccaccgtggcggaactaaaggcagtgctgaaagatacactggagaagaagggtgtgcttggccatctgaaggctaggattagggcagaggtgttcaacgctctggatgacgaccgtgaaccgaggccttctctctctcatgagaacctgcttatcaatgaattgatcagagagtacctggagttcaacaagtacaaatatactgcttctgttctgattgctgaatcaggccaacctgtggttccactagatcgacaatttttgattcacgagctgaacgcgtttgaggagtctaaagacaatacaatacccctgttgtacggcatcctcgcacatttcctgcgggggaccaaggatgggattcagaatgcttttctcaaaggaccatccctgcagccttctgacccttccctgggccggcagccatcaagaaggaagccgatggatgaccacctgcgcaaagaagaacaaaagagcacaaacatcgaagatctacatgtgagtcaggctgttaaccgctag

SEQ ID NO: 239045 - DNA, 525 bp, Artificial Sequence
  derived and/or modified sequence
atggccaccgtggccgagctgaaggctgtgctgaaggacaccctggagaagaagggcgtgctgggccacctgaaggcccgcatccgggcagaggtgttcaatgccctggatgatgaccgggagccccggcccagcctgagccatgagaacctgctgatcaatgagctgatccgggagtacctggagttcaacaagtacaagtacacagcctctgtgctgattgctgagagcggccagcctgtggtgcccctggaccggcagttcctgattcatgagctgaatgcctttgaggagagcaaggacaacaccatccccctgctgtatggcatcctggcccacttcctgcggggcaccaaggatggcatccagaatgccttcctgaagggccccagcctgcagcccagcgaccccagcctgggccggcagcccagcaggaggaagcccatggatgaccacctgaggaaggaggagcagaagagcaccaacatcgaggacctgcacgtgtcccaggccgtgaacagatag

SEQ ID NO: 239046 - DNA, 525 bp, Artificial Sequence
  derived and/or modified sequence
atggccaccgtggccgagctgaaggccgtgctgaaggacaccctggagaagaagggggtgctaggccacttgaaggcacgaatccgggccgaagtttttaacgcactggacgacgacagggagcccagaccaagcctttcccacgaaaacctgttaatcaacgagctcatccgcgaatatcttgagttcaacaagtacaagtacacagcttccgttttgatcgccgagagcgggcaacctgtggttccactggacaggcaatttctcatacacgagcttaatgctttcgaagagtccaaagacaacactattccattgctgtatgggatcctggctcacttcttaaggggtactaaggacggcatacagaacgcctttctcaaaggcccttcattacagcctagcgatccttcgctcgggagacagccttcccgcagaaagcccatggacgaccatctgagaaaggaggagcagaaatccacaaacatagaggatttgcacgttagtcaggccgtgaatcgttag

SEQ ID NO: 239047 - DNA, 525 bp, Artificial Sequence
  derived and/or modified sequence
atggccaccgtggcagagctgaaggcagtgctgaaagatacactggaaaaaaaaggggtgctggggcacctgaaagctcgcattcgggcagaagtgtttaatgcacttgatgacgatcgggagccacgtccttcactttcacacgaaaatctcctcattaacgaactgattcgtgagtatttagaatttaacaaatacaagtatacagcaagcgtgttgatcgcagaaagcggacaaccagtggtgcctctggacagacagtttctgatccacgaactgaatgcattcgaggaatctaaggacaacacgataccattgctgtacggaattctggcccactttctccgcggaacaaaggacggaattcaaaatgcctttctgaaaggtcccagtctgcagccttccgatccgtcccttggccgtcaaccatctagaaggaaaccaatggacgatcatctaagaaaggaggagcaaaagtccacgaatattgaggacctgcatgtcagccaggccgtgaaccggtag

SEQ ID NO: 239048 - DNA, 2276 bp, Artificial Sequence
  derived and/or modified sequence
ccgcggtgcggccctggcggccgttgaaaaatggcgactgtggcagagttgaaggctgttttaaaggacaccttggaaaaaaagggggtattagggcatttaaaagcaaggatccgagctgaagttttcaatgccctagatgatgaccgtgaaccccgaccatcattgtctcatgaaaaccttctaattaatgaattaattcgagagtatttagaattcaacaaatataagtatacagcatctgtcctcatagcagaatctggtcaacctgtagttccgttggacagacagtttctcatccatgaactaaatgcatttgaagaatcaaaggataatacaatacctcttttatatgggattttagcccatttcttgcgtggaactaaggatggcatccagaatgcatttctgaaagggccttcacttcagccttcagacccaagtcttggcagacaacctagtagaagaaagccaatggatgaccacctaagaaaggaggaacagaaaagtactaacattgaagatcttcatgtttctcaggcagtcaacagataatgctttgtttggggtatcttttgtcttaaaattgtattattaattaaataacttatttattgtcccaatgttaccaaaatgcaccactaatgtttgtagaaattggagtttctacaaaacacccctcatgtttaactacatttgtgaataaaagctaactcttgtcatctagcttattggatttgacttgaaaaaaaaagtattgtttttacgaagtattttttgtttttttgagatggagtctcgctctgtcacccagactggagtgcagtggcacgatctcggctcactgcaatctctgcctcccggattcaagtgattctcctgcctcagcctcccaagtagctgggaaaacaggcctgtgccaccacaccggagtagtttttgtatttttagtagagatggggtttcaccatgctggccaggctggtcttgaactcctgacctcaggtgatctgtgtgccccagcctcccaaagcgctgggattacaggtgtgagccactgagcccagccatttaggaagtattataaaggcccttaaagtttgtaaggaaatgaaagggctttgtattaccttttcaataggcaacaatgtactttttctttccttagactttggcttactggaagatttaattaaaaggtagaggagaagtaaatttgctgtaataattttgctgtaaataaaacaaagagtttattttattagataaagaatgtgaagtaagcatgaagagacaggctttgggagaaataccagaaagggatttttcaaagatggcattgtttaatctccgtgtggccctcggttgtgcaatcacagatgagccagaagagggccagccccctacttgtttgggctccgaaactcttaccaaacatcaatttttattcttgggatagaaaaatagtatgtgctatctctaatacgctacttcgatatttattaaagaagtatttttaatgtagtgtccacaggctcatttcattgaaaacaactgactatgatgatagacagctcctgattggcaaaagttcgatggtatattcagaattaaattttgcctgcacacctaaacactgacaacatttagcttaaaggttttccatggagaagagtggtaagagctgtagttagcaaaattggcatcctctttagggtgtcaattctgtgctgctttgcaaattgttgaaacttttgattttctgtttggcaatgctagtcagtgttcacttcttacagattagccaagaatttttatctaaatgcagaaacttattaatgaaatccatttaaactatacttacacaacattttgggaggccctgctggtaaaattatatatggatgcagaagtattgcaagagtccattttccatttttaaatctgcaatatctgattacattgatgaattccgttgtattgtatgtgtgaatataaatatctgaattctcccgggggacttggttttcgtccaaggatgttggcagtggacacttagtttacctcaggaattgcaatcatgtaagactatattcggaaaaaatgctggagtatataattttggatactgatataaaatcatcaagatggaagttaagcagaattgtcacgtgtagtccatagcgcttttatatgcattattctgtaatttgtttgtactgcggcaactttttatactttcaatgtatcatttaataaaaaaaataagcaagtca

SEQ ID NO: 239049 - DNA, 525 bp, Artificial Sequence
  derived and/or modified sequence
atggccaccgtggccgagctgaaggccgtgctgaaggacaccctggagaagaagggcgtgctgggccacctgaaggccagaatcagagccgaggtgttcaacgccctggacgacgacagagagcccagacccagcctgagccacgagaacctgctgatcaacgagctgatcagagagtacctggagttcaacaagtacaagtacaccgccagcgtgctgatcgccgagagcggccagcccgtggtgcccctggacagacagttcctgatccacgagctgaacgccttcgaggagagcaaggacaacaccatccccctgctgtacggcatcctggcccacttcctgagaggcaccaaggacggcatccagaacgccttcctgaagggccccagcctgcagcccagcgaccccagcctgggcagacagcccagcagaagaaagcccatggacgaccacctgagaaaggaggagcagaagagcaccaacatcgaggacctgcacgtgagccaggccgtgaacagatag

SEQ ID NO: 239050 - protein, 265 aa, Artificial Sequence
  derived and/or modified sequence
MSEQQMDLKDLMPTKRKYMWKTAEDRRMSDLTCVLEWLERRQGKKKQAPEKQKPKVVTVLKRNKKKEEKKGKGLMTARGGNRRDTETSQQALGKRFRKDAASYRSLYGVEQKGKHLSMVPGSYIKDGPKKSDTDIKDAVDPESTQRPNPFRRQSIVLDPMLQEGTFNSQRATFIRDWSNKMPDMAYERKLKSLMEKSTEPKMETMRMLKPEEVLSCRYLRLSKENIRTLLKLCKDAGMNVDIHPHMVEEDIDAKKVFTGIPSMAL

SEQ ID NO: 239051 - DNA, 1068 bp, Artificial Sequence
  derived and/or modified sequence
catctggaggccacaccctaccttctaagtcaccaggccatcaagtccagacaaagggatcgaaagagtgagacagtgccagccacctcccacccaagccactagcaagactccacaatgtcagagcaacaaatggacctgaaggatttaatgcccacaaagaggaaatacatgtggaagactgctgaagataggcgcatgtctgacctcacctgtgtgctggagtggctggagcggaggcaggggaagaagaaacaagctcccgagaagcaaaagcccaaagtggtgacagtccttaaacgaaataagaagaaggaagagaagaaaggcaaaggcctcatgacagcacggggagggaaccgcagggacacggagacttcccagcaggccttaggaaagagattcaggaaggacgccgcctcctaccgaagcctctatggagtggagcaaaaggggaaacacctcagcatggtccctggcagctacatcaaggatggccccaagaaatctgatacagacatcaaggatgcagtcgacccagagtccactcagcggccaaacccattccgtcgacaaagcattgtcttagatcccatgttacaggagggtacctttaacagccagagggcaaccttcataagagactggtccaacaagatgcctgacatggcttacgaacgcaagctaaagagcctcatggagaaaagcaccgaacctaagatggaaaccatgaggatgttgaagccagaggaggtgctgagctgccgatacctgaggttatccaaggagaacattcggaccttgctcaagttgtgcaaggatgcaggaatgaatgtggatatccacccccacatggtcgaagaggacatagatgctaaaaaggtgttcaccggaatacccagcatggccctctaaatagctcctctcgccaccaccttcaggctccttctgtcatgggacccttcacctccagatgccatcctctggcacactacaagtggtccttccaacttagtgcatccctttagaaagtaagcaatcagaaaacaagcctcggctgtgtgatca

SEQ ID NO: 239052 - DNA, 798 bp, Artificial Sequence
  derived and/or modified sequence
atgagcgagcagcagatggacctgaaggacctgatgcccaccaagagaaagtacatgtggaagaccgccgaggacagaagaatgagcgacctgacctgcgtgctggagtggctggagagaagacagggcaagaagaagcaggcccccgagaagcagaagcccaaggtggtgaccgtgctgaagagaaacaagaagaaggaggagaagaagggcaagggcctgatgaccgccagaggcggcaacagaagagacaccgagaccagccagcaggccctgggcaagagattcagaaaggacgccgccagctacagaagcctgtacggcgtggagcagaagggcaagcacctgagcatggtgcccggcagctacatcaaggacggccccaagaagagcgacaccgacatcaaggacgccgtggaccccgagagcacccagagacccaaccccttcagaagacagagcatcgtgctggaccccatgctgcaggagggcaccttcaacagccagagagccaccttcatcagagactggagcaacaagatgcccgacatggcctacgagagaaagctgaagagcctgatggagaagagcaccgagcccaagatggagaccatgagaatgctgaagcccgaggaggtgctgagctgcagatacctgagactgagcaaggagaacatcagaaccctgctgaagctgtgcaaggacgccggcatgaacgtggacatccacccccacatggtggaggaggacatcgacgccaagaaggtgttcaccggcatccccagcatggccctgtag

SEQ ID NO: 239053 - DNA, 798 bp, Artificial Sequence
  derived and/or modified sequence
atgtccgagcagcagatggatctaaaggatctgatgcctacaaagagaaagtacatgtggaagactgccgaggaccgcagaatgtcggacctaacctgcgtgctggaatggcttgaaagacggcagggcaaaaagaagcaggcccctgaaaagcagaagccgaaagttgtcacggtgctgaagagaaacaaaaagaaagaggagaaaaaagggaagggactcatgaccgcacggggcggtaatagacgcgatactgagacatcacaacaggccctggggaagcgatttcgcaaagatgctgcttcctatcgctctctctacggggtcgagcagaagggtaagcacttaagcatggtccccggaagctacattaaggacggccccaaaaaatcggacaccgacatcaaggatgctgtggatccagaaagcacccagaggcccaatccttttcgaaggcaatcgatcgtgttagatccaatgctgcaggaggggacattcaatagccagcgggctacattcatccgtgattggagcaacaaaatgccagatatggcctacgaaagaaaattgaaaagcctgatggaaaagagcaccgagccgaagatggagaccatgaggatgctgaagccggaagaagttctgtcttgtcggtacctgaggctgtctaaagagaatattagaacactgctcaaattgtgcaaagacgccggcatgaacgtggatatacacccacatatggttgaggaggatatcgatgccaaaaaggtgttcaccgggatcccttcaatggcactatag

SEQ ID NO: 239054 - DNA, 798 bp, Artificial Sequence
  derived and/or modified sequence
atgtctgagcagcagatggacctgaaggacctgatgcccaccaagaggaagtacatgtggaagacagctgaggacaggaggatgtctgacctgacctgtgtgctggagtggctggagcggcggcagggcaagaagaagcaggcccctgagaagcagaagcccaaggtggtgacagtgctgaagaggaacaagaagaaggaggagaagaagggcaagggcctgatgacagcccggggcggcaacagaagagacacagagaccagccagcaggccctgggcaagcgcttcaggaaggatgctgccagctaccgcagcctgtatggagtggagcagaagggcaagcacctgtccatggtgcccggcagctacatcaaggatggccccaagaagagtgacacagacatcaaggatgctgtggaccctgagagcacccagaggcccaaccccttccggcggcagagcatcgtgctggaccccatgctgcaggagggcaccttcaacagccagagggccaccttcatccgggactggagcaacaagatgccagacatggcctatgaaaggaagctgaagagcctgatggagaagagcacagagcccaagatggagaccatgaggatgctgaagccagaggaggtgctgagctgccgctacctgcggctgagcaaggagaacatccgcaccctgctgaagctgtgcaaggatgctggcatgaatgtggacatccacccccacatggtggaggaggacattgatgccaagaaggtgttcaccggcatccccagcatggccctgtag

SEQ ID NO: 239055 - DNA, 798 bp, Artificial Sequence
  derived and/or modified sequence
atgagcgagcagcagatggacctgaaggacctgatgcccaccaagcgcaaatatatgtggaaaaccgccgaggaccggaggatgagcgacttgacatgtgttctggaatggctcgagcgcaggcaggggaaaaagaaacaggcccccgagaaacagaaaccaaaagtggtgacagtattgaaacgcaataaaaaaaaagaggaaaaaaaagggaagggcctcatgacagcccgcgggggcaataggcgcgataccgagacatcgcaacaagcgttaggcaagagatttagaaaggacgccgcgtcgtacaggtcactctatggtgttgaacaaaaaggaaagcacctgtccatggtgcccggaagctatatcaaggacggtcctaagaaatctgacactgacattaaggacgccgttgaccctgaaagtacccagcgcccaaacccatttcgtcgtcagtcaatagtgctggatcctatgctacaagagggcacatttaattcccagcgagccacctttattagggattggtcaaataagatgccagatatggcttatgaaagaaagctgaaatctctcatggaaaaaagtacagagcctaagatggagactatgcgaatgctcaaacctgaagaagtgctgtcttgtagatatctgcgcttgtccaaggagaacatacgcaccttgcttaagctctgcaaagacgcaggaatgaatgtagatatccatccccatatggtggaggaggacatcgatgccaagaaagtgttcaccggcataccttcgatggccttatag

SEQ ID NO: 239056 - DNA, 798 bp, Artificial Sequence
  derived and/or modified sequence
atgagcgaacagcaaatggatttaaaagacctcatgcctacaaagagaaaatacatgtggaagacagcagaggatagaaggatgagtgatctcacctgcgtcttggaatggctcgaaaggaggcaaggtaagaagaagcaagctcctgagaagcaaaaaccaaaggtcgtgactgtgctgaagaggaacaaaaagaaggaggaaaagaagggaaagggtttgatgaccgcccgaggcggaaacaggagagacaccgagacaagtcagcaggcattggggaaacgcttcagaaaggacgcagccagttacagaagcctttacggcgtcgaacagaagggtaagcacctcagcatggtgccagggtcatatatcaaggacggtccaaagaagtccgacaccgatattaaggatgcggtggatcctgaatccacacagaggcccaacccttttagacgccagtccattgtcctggaccctatgctgcaggaaggcacattcaacagccaacgggcaaccttcattcgcgactggtccaacaaaatgcctgacatggcctatgaaaggaaactgaagtccctaatggaaaagtctaccgaaccgaagatggagacaatgaggatgttgaaaccagaggaggtgcttagctgcagatacttgagactatccaaggagaatatcagaactctgctgaagctgtgtaaggacgctggcatgaacgttgatatccatccacatatggtagaagaggatattgacgccaaaaaggtatttaccggcatccccagcatggccctttag

SEQ ID NO: 239057 - protein, 370 aa, Artificial Sequence
  derived and/or modified sequence
MAGPRYPVSVQGAALVQIKRLQTFAFSVRWSDGSDTFVRRSWDEFRQLKTLKETFPVEAGLLRRSDRVLPKLLDAPLLGRVGRTSRGLARLQLLETYSRRLLATAERVARSPTITGFFAPQPLDLEPALPPGSRVILPTPEEQPLSRAAGRLSIHSLEAQSLRCLQPFCTQDTRDRPFQAQAQESLDVLLRHPSGWWLVENEDRQTAWFPAPYLEEAAPGQGREGGPSLGSSGPQFCASRAYESSRADELSVPAGARVRVLETSDRGWWLCRYGDRAGLLPAVLLRPEGLGALLSGTGFRGGDDPAGEARGFPEPSQATAPPPTVPTRPSPGAIQSRCCTVTRRALERRPRRQGRPRGCVDSVPHPTTEQ

SEQ ID NO: 239058 - DNA, 1113 bp, Artificial Sequence
  derived and/or modified sequence
atggccggccccagataccccgtgagcgtgcagggcgccgccctggtgcagatcaagagactgcagaccttcgccttcagcgtgagatggagcgacggcagcgacaccttcgtgagaagaagctgggacgagttcagacagctgaagaccctgaaggagaccttccccgtggaggccggcctgctgagaagaagcgacagagtgctgcccaagctgctggacgcccccctgctgggcagagtgggcagaaccagcagaggcctggccagactgcagctgctggagacctacagcagaagactgctggccaccgccgagagagtggccagaagccccaccatcaccggcttcttcgccccccagcccctggacctggagcccgccctgccccccggcagcagagtgatcctgcccacccccgaggagcagcccctgagcagagccgccggcagactgagcatccacagcctggaggcccagagcctgagatgcctgcagcccttctgcacccaggacaccagagacagacccttccaggcccaggcccaggagagcctggacgtgctgctgagacaccccagcggctggtggctggtggagaacgaggacagacagaccgcctggttccccgccccctacctggaggaggccgcccccggccagggcagagagggcggccccagcctgggcagcagcggcccccagttctgcgccagcagagcctacgagagcagcagagccgacgagctgagcgtgcccgccggcgccagagtgagagtgctggagaccagcgacagaggctggtggctgtgcagatacggcgacagagccggcctgctgcccgccgtgctgctgagacccgagggcctgggcgccctgctgagcggcaccggcttcagaggcggcgacgaccccgccggcgaggccagaggcttccccgagcccagccaggccaccgcccccccccccaccgtgcccaccagacccagccccggcgccatccagagcagatgctgcaccgtgaccagaagagccctggagagaagacccagaagacagggcagacccagaggctgcgtggacagcgtgccccaccccaccaccgagcagtag

SEQ ID NO: 239059 - DNA, 1113 bp, Artificial Sequence
  derived and/or modified sequence
atggcgggcccccgatacccagtttccgtgcagggagccgcgcttgtgcagataaaacgattacagactttcgccttttccgttcgctggagtgacgggagcgatacgttcgtcagacgttcttgggacgaattccgacagctgaaaacattgaaagagacattccccgtggaggcagggctgcttaggagatcggatcgcgtgctgcctaaacttctcgacgcaccattgttggggcgcgtcgggagaacctccaggggcctggccagactgcaactcttggagacgtactcacgtagattgctggccacagccgagagagttgctagatccccaacaattactgggttttttgcaccacaacccttggatctcgaacccgctctcccacctggtagccgagtcattttgcctacaccagaagaacaaccgctcagtcgtgccgcgggccgattaagcattcactctctcgaagcccagtccctcaggtgtcttcagccgttctgcacacaggacacccgcgatcggcccttccaagcacaggcacaggaaagtctagacgttctgctgcggcacccctccggctggtggctggtggagaacgaggatcggcagactgcatggtttcccgctccctacctcgaggaggcagctccaggacagggaagggagggaggaccgtctcttggctctagcggtcctcaattctgtgcctcacgtgcatacgaatcatcaagggcggatgagctgagtgtcccggctggggcacgggtgcgtgtactcgagacttctgaccgcggctggtggctctgtcgatatggagaccgtgcgggcctgctcccagctgtattgttgagaccggaaggcctcggagcattgctgagcggtactggtttcagggggggcgacgaccccgcaggagaggcccggggtttcccagaaccctctcaggctactgcgccaccaccgactgtaccaactaggccctcccctggagccatccagtcccgctgctgtacagttacccgtcgtgcgctcgagcggcgccctcggagacaaggaaggcccaggggatgtgtggacagtgtccctcaccctacaactgaacagtag

SEQ ID NO: 239060 - DNA, 1113 bp, Artificial Sequence
  derived and/or modified sequence
atggccggcccccgctaccctgtgtctgtgcagggcgccgccctggtgcagatcaagaggctgcagacctttgccttctctgtgcgctggagcgatggcagtgacacctttgtgagaagatcctgggatgagttccggcagctgaagaccctgaaggagaccttccctgtggaggccggcctgctgcggcggagtgacagagtgctgcccaagctgctggatgcccccctgctgggccgggtgggccgcaccagccggggcctggcccggctgcagctgctggagacctacagccggcggctgctggccacagctgagcgggtggcccggagccccaccatcaccggcttctttgccccccagcccctggacctggagcccgccctgcccccaggcagcagggtcatcctgcccaccccagaggagcagcccctgagcagagctgctggccgcctgagcatccacagcctggaggcccagagcctgcgctgcctgcagcccttctgcacccaggacacccgggaccggcccttccaggcccaggcccaggagagcctggatgtgctgctgcggcaccccagcggctggtggctggtggagaatgaagatcggcagacagcctggttccctgccccctacctggaggaggccgcccctggccagggccgggagggcggccccagcctgggcagcagcggcccccagttctgtgccagccgggcctatgagagcagcagagcagatgagctgtctgtgcctgctggggcccgggtgcgggtgctggagaccagtgaccggggctggtggctgtgccgctatggagacagagctggcctgctgcctgctgtgctgctgcggcctgagggcctgggcgccctgctgtctggaacaggcttcagaggaggagatgatcctgctggggaggcccggggcttccctgagcccagccaggccacagcccccccacccaccgtgcccacccggcccagccctggggccatccagagccgctgctgcaccgtgacccggcgggccctggagcggcggccccggcggcagggccggccccggggctgtgtggacagcgtgccccaccccaccacagagcagtag

SEQ ID NO: 239061 - DNA, 1521 bp, Artificial Sequence
  derived and/or modified sequence
gggctggaaagctcattcttcttcttcctcccagcagctctgcctggaagtcccccaatccctgtgctcctgcccccagatcgtgggcttgggggacagcaagaaagctgcaaaggactcagctggggcggctccacaaggaccccacaggcttgaggtgttgccaggattctatcccagggggttttctgggtcccccagagccctctcaagcacggggaggcagaagggtcctcgcccatttcaggaatctgcagcctggaagccacagccatggcaggcccccgatacccagtttcagtgcaaggggcagccctggtgcagatcaagaggctccaaacgtttgccttctctgtgcgctggtcagacggcagcgacaccttcgtgcgcaggagttgggacgaattcaggcagctcaagaccctcaaggagaccttcccggtggaggcgggcctgctgcggagatctgaccgcgttctcccaaagcttctcgatgcaccactgttgggacgcgtggggcgcacgagccgcggcctggcgcgcctgcagctgttggaaacctattctcggaggctgctggcgactgcagagcgcgtggcacggagcccgacgatcactggcttcttcgcaccgcaacccctggacctggagcccgcgctgccacccggcagccgggtgatcctgcccaccccagaggagcagcctctttctcgcgctgcgggccgcctctccatccacagtctggaggctcagagcctgcgctgcctgcagcccttctgtacccaggacacgcgggataggccttttcaggcgcaggcccaggagagcctggacgtgctgctgcggcacccctcaggctggtggctggtggagaacgaagaccggcagaccgcctggtttccagcgccctacctggaggaggcggccccgggccaaggccgggagggaggcccgtccctagggagcagcggtccccagttctgtgcttcccgcgcctacgagagcagccgcgcagatgagctgtccgtgcccgcgggggcgcgcgtgcgcgtgttggaaacgtcagaccgcggctggtggctatgcaggtacggcgaccgggcgggcctactccccgcggtgctgctgcggccggaagggctgggcgctctcctgagcgggacggggttccgtggaggagacgacccggcgggtgaggcccggggcttccctgaaccctcccaggccaccgcccctccccccaccgtgcccacccgaccttcgccgggcgccatccagagccgctgctgcaccgtcacacgcagggccctggagcggcgcccacggcgccagggccgccctcgagggtgcgtggactctgtgccgcaccccacgacggagcagtgagcgcgaggatcccgatgaggggatggaccgcgccatcccagggctggggaggagcggggagggcggatctccctggccagcagggatgggagggggccatttgctgttcctctgagtaaagcttgttctgcatga

SEQ ID NO: 239062 - DNA, 1113 bp, Artificial Sequence
  derived and/or modified sequence
atggccggcccccggtaccccgtgagcgtgcagggcgccgccctggtgcaaataaaacgattgcaaacctttgccttctctgtgaggtggagcgacggatccgacaccttcgtgaggcgctcctgggacgagtttagacagctgaaaacattgaaggaaacattcccagttgaagccggcttacttaggaggtcagaccgagtactgcccaagcttctggacgccccgctgctggggagggtggggagaactagtcgcggcttagctcgcctacaactactggaaacttacagccgtcgcctgctcgcaaccgccgagcgtgtggcccggagcccaacaataacggggtttttcgctccccaaccactggacctggaacccgctctgcccccgggatccagagtaatcctgccaacaccagaggaacagcccttgagccgggccgcaggtcggctctctatccatagcttggaagctcaatccctgaggtgtctgcagcctttctgcacccaggatactcgagaccgtcctttccaagctcaggcccaggagagtctcgacgtccttcttcgccaccctagtggctggtggttggtggagaacgaagaccggcagacagcctggttcccagccccatatctagaggaggccgctccgggccagggcagggagggcggcccttcgctcggctccagcggtcctcaattttgtgcatccagggcatacgaaagcagcagggccgatgaactaagtgtgcccgccggcgctcgcgtcagggtcctcgaaaccagcgataggggttggtggctttgtagatatggggacagagcgggtctgctacctgctgtcctgttaaggcctgaggggctcggcgcgctgctgtctggaactggcttccgggggggagacgacccagcgggtgaagccagggggtttcctgagccatctcaagctacagctccccccccaaccgtccccacacggccctctcccggagccatacagagcaggtgttgcaccgtgactaggcgcgcactagaacgcagaccacggcggcaaggtaggcctcggggttgcgtcgactccgtcccgcatccaaccaccgaacagtag

SEQ ID NO: 239063 - DNA, 1113 bp, Artificial Sequence
  derived and/or modified sequence
atggccggaccacggtaccctgtttccgtgcagggcgctgccctggttcagattaaaaggctgcagaccttcgccttcagtgttagatggtccgatggcagcgatactttcgtgagacgctcttgggatgagttccggcagttaaagaccttgaaggaaacatttcctgtcgaggcaggcctattgcgacggtccgaccgagtgctaccaaaattactcgatgcgccattgttggggagagtgggacgaaccagtcgtgggctggccaggttgcagctactcgaaacatactcccggcgtcttctggcgacagcagagcgggtggctcggtctcccacaattaccggtttcttcgcgccacaaccgttggatctggaacccgcattgccgcctggtagcagggttatattaccaacgcccgaagagcagccactctcccgcgctgccggacgtctttctatccatagtcttgaagcacagtcactgcgttgtctccagccattctgtacccaggacacccgggacaggcctttccaggctcaggctcaagagagtctcgatgtgctacttagacacccctcaggatggtggctggtcgagaacgaagatagacagacagcctggttccctgctccatatctcgaggaggctgcacctggacagggtcgggagggaggcccaagccttggttcatcaggccctcaattttgcgcaagtagggcctatgaaagcagtcgcgcagacgagctctctgttcctgccggtgcacgtgtccgcgtgctggaaacatccgataggggctggtggctctgccggtatggtgaccgagcagggcttctgccagccgttctcctgagacccgagggcctgggcgcactgttgtccggaacgggtttccgaggcggagacgatcctgccggagaagctagggggtttccagaaccctcccaggccacagctccccctccgacggtgccgacacggccttcacctggcgctatccagtccaggtgctgcaccgttacacgccgagctctggagaggaggcctcgacgccagggcagaccacgcggttgtgtggacagcgtgccacaccccaccacagagcaatag

SEQ ID NO: 239064 - protein, 358 aa, Artificial Sequence
  derived and/or modified sequence
MDPLRRSPSPCLSSQPSSPSTPPCEMLGPVGIEAVLDQLKIKAMKMGFEFNIMVVGQSGLGKSTMVNTLFKSKVWKSNPPGLGVPTPQTLQLHSLTHVIEEKGVKLKLTVTDTPGFGDQINNDNCWDPILGYINEQYEQYLQEEILITRQRHIPDTRVHCCVYFVPPTGHCLRPLDIEFLQRLCRTVNVVPVIARADSLTMEEREAFRRRIQQNLRTHCIDVYPQMCFDEDINDKILNSKLRDRIPFAVVGADQEHLVNGRCVLGRKTKWGIIEVENMAHCEFPLLRDLLIRSHLQDLKDITHNIHYENYRVIRLNESHLLPRGPGWVNLAPASPGQLTTPRTFKVCRGAHDDSDDEF

SEQ ID NO: 239065 - DNA, 1077 bp, Artificial Sequence
  derived and/or modified sequence
atggaccctctacggcggagtccaagcccctgtctttccagccagcccagcagcccatccacacctccttgtgagatgctggggccagtgggtatcgaagcggtgttggatcaactgaagattaaggccatgaagatgggctttgaatttaatatcatggtcgtggggcaatcaggactgggaaaaagtacgatggtaaatacactttttaagagtaaggtgtggaagtcaaaccctccagggctgggcgtgccaacccctcagacactgcagctccactctctgactcatgtgattgaagaaaaaggagtgaagctgaaactaaccgtgacagacactccggggtttggcgatcagattaataatgataactgttgggatcctattttaggctacattaacgaacagtacgaacagtacctgcaggaggaaatacttatcacacggcagcggcatattcccgacactcgcgtacactgttgtgtttactttgtacctccgaccgggcattgtctccggcctcttgacatagagttcctacagcgactgtgccggaccgtgaatgtagtgcctgtcatagctcgagccgattctctaaccatggaagagagagaggctttccgtcgcaggattcagcagaacctgcggacgcactgcatcgacgtgtatcctcagatgtgcttcgacgaggatatcaatgacaagattctgaattctaagctccgagacaggatcccttttgcagtcgttggagccgatcaggagcacctcgttaatggtagatgcgtgctcgggcgaaagacgaaatggggcattatcgaggtggagaacatggcccactgtgagtttccacttctgcgggacttactgattcgttctcacttgcaggaccttaaggacatcacacataatattcactacgagaactaccgtgttatcagactgaacgagagccatctgttgcctcgggggccaggatgggtgaatctggcgcccgcaagtccagggcaattaacaacccccagaacttttaaagtctgccgcggagctcacgacgactctgatgacgagttttag

SEQ ID NO: 239066 - DNA, 1077 bp, Artificial Sequence
  derived and/or modified sequence
atggaccccctgcggcgcagccccagcccctgcctgagcagccagcccagcagccccagcaccccaccctgtgagatgctgggccctgtgggcatcgaggccgtgctggaccagctgaagatcaaggccatgaagatgggctttgagttcaacatcatggtggtgggccagagcggcctgggcaagagcaccatggtgaacaccctcttcaagagcaaggtgtggaagagcaaccccccaggcctgggcgtgcccaccccccagaccctgcagctgcacagcctgacccacgtgattgaggagaagggcgtgaagctgaagctgactgtgacagacaccccaggctttggagaccagatcaacaatgacaactgctgggaccccatcctgggctacatcaatgagcagtatgagcagtacctgcaggaggagatcctgatcacccggcagaggcacatcccagacaccagggtgcactgctgcgtgtactttgtgccccccaccggccactgcctgcggcccctggacatcgagttcctgcagaggctgtgcaggacagtgaatgtggtgcctgtgattgcccgggctgacagcctgaccatggaggagcgggaggccttcagaagacgcatccagcagaacctgcggacccactgcattgatgtgtacccccagatgtgctttgatgaggacatcaatgacaagatcctgaacagcaagctgcgggaccgcatcccctttgctgtggtgggcgctgaccaggagcacctggtgaatggccgctgtgtgctgggcaggaagaccaagtggggcatcatcgaggtggagaacatggcccactgtgagttccccctgctgcgggacctgctgatccgcagccacctgcaggacctgaaggacatcacccacaacatccactatgagaactacagagtcatccggctgaatgaaagccacctgctgccccggggccctggctgggtgaacctggccccagccagccctggccagctgaccacccccaggaccttcaaggtgtgccgcggggcccatgatgacagtgatgatgagttctag

SEQ ID NO: 239067 - DNA, 1077 bp, Artificial Sequence
  derived and/or modified sequence
atggaccccctgcggcggagccccagcccctgcctgagcagccagccctcctcaccaagtacgccaccctgtgagatgcttgggccagtaggtatcgaagctgtgttggaccagctgaaaataaaagccatgaagatgggttttgagttcaatatcatggttgtcggacaatctggtctcggcaaatccacaatggtgaacacacttttcaagtcaaaggtgtggaaatccaatccacccggactaggagttcctacgccacaaactctgcagctccacagcctgacccacgtgattgaggagaagggcgtaaagctgaagttaactgtcacagacacacccggtttcggggatcagataaataatgacaactgttgggacccgatcctcggttacataaatgagcagtacgagcaatatttgcaggaagaaatcctgatcaccaggcagcgccatataccagacactagggttcactgctgtgtttatttcgttccaccgacaggccattgtctccgtcctttggacatcgagtttcttcaaagactatgccgaaccgttaacgtcgtaccggtcattgcacgggcggatagtctgacaatggaggagagggaagctttcagaaggagaatccagcagaatttacgaacccattgcatcgatgtgtatccgcagatgtgtttcgatgaggacataaacgataaaatccttaattcaaaacttagggacaggatcccttttgccgtggttggtgctgatcaggagcatctggtgaatggtcggtgcgtgcttggccgcaagacaaagtggggcatcatcgaggtggagaatatggcccattgtgagtttccactattgagagacctcctgattcgatcacaccttcaggatctcaaggatatcacacacaacattcactacgagaactatcgtgtcatccgactcaacgagtcccatctgctacctaggggaccaggttgggtaaatctggcaccagcgagtccgggccagcttactactccacgcaccttcaaggtgtgccgaggtgcacatgatgacagcgacgatgaattctag

SEQ ID NO: 239068 - DNA, 1077 bp, Artificial Sequence
  derived and/or modified sequence
atggatcccttgcgcaggtcgccatccccttgcctgtcctcccagccgtcatccccctctacacccccttgcgagatgttgggccctgtggggatcgaggcagttctggatcaacttaaaatcaaagctatgaagatgggcttcgagtttaatattatggtggtggggcagtcgggactgggcaaaagcaccatggtgaatactctgttcaagagtaaggtttggaaatcaaatccgcctggccttggagtgcctacgccgcagacactgcagctgcacagcctcactcacgttatagaagagaaaggcgtgaagctgaagctgactgtgactgatactccaggttttggagatcagataaacaacgacaattgttgggacccaatattaggctatatcaatgagcagtatgaacagtacttgcaggaggaaatccttattaccaggcagcgacatataccggacacacgggtacactgctgcgtctacttcgtgccccctactgggcattgcctgcgccctctcgatatcgagttcctgcagagactgtgtagaacagtcaatgtggtgcccgttattgctcgcgcagattcactcaccatggaggagagagaggcttttagacgcagaatacaacagaatctgaggacccattgtatcgatgtgtacccacagatgtgttttgacgaggatattaacgataaaattctaaattctaaattacgcgacaggattcctttcgccgtagtgggcgctgatcaggaacaccttgtgaatggacgctgcgttctcggtcgcaagactaagtggggaattatagaggtggaaaacatggcccattgtgagtttccactgttgagggatcttctcatccggagtcacctgcaggacctgaaggatatcacccacaacatccactacgagaattatcgcgtaattagattgaatgagtcacatcttctccccaggggcccagggtgggtcaacttggcacctgccagtccgggacagttgacaacaccgcgaacctttaaagtctgtcgtggtgctcacgatgatagcgacgatgagttctag

SEQ ID NO: 239069 - DNA, 1294 bp, Artificial Sequence
  derived and/or modified sequence
ccatcacacacaccaggccctgccaggacaaggcagctcctggaagctccaccaggacccacgtccaccaggcatctcgaacccttggcccccatggaccccctgaggcgctccccctctccctgcctgtcctcgcagccctccagccccagcaccccaccctgcgagatgcttggtcctgtgggcattgaggctgtgctggaccagctgaagatcaaggctatgaagatggggtttgagttcaacatcatggtggtggggcaaagcgggctgggcaagtccacgatggtgaacacgctgttcaagtccaaagtgtggaagtcaaacccaccgggcttgggggtgcccacaccccagacgctgcagctgcattcactgacccatgtcatagaggagaagggtgtgaagctgaagctgacggtgacggacacgcccggcttcggggaccagatcaacaatgacaactgctgggaccccatcctgggctacatcaacgagcaatacgagcagtacctgcaggaggagatcctcatcacccgccagcgccacatcccagacacccgggtgcactgctgcgtgtactttgtaccacccactgggcactgcctgcggcccctggacattgagttcctgcagcggctgtgccggactgtgaatgtggtgcccgtgattgccagggccgacagcctgaccatggaggagcgagaggccttcaggcgcaggatccagcagaacctgaggacccactgcatcgacgtctacccccagatgtgctttgacgaggacatcaatgacaaaatcctcaacagcaagttacgggaccgaatcccttttgccgtggtaggggctgaccaagagcacctggtgaacgggaggtgtgtcctgggccggaagaccaagtggggcatcattgaagtggagaacatggcgcactgtgaatttcctctcctgagagacctgcttatccgctcccacctccaagacctgaaggacataacccacaacatccactatgagaactaccgcgtcatcagactcaatgaaagccacctgctgccccgcgggcccggctgggtgaacctggccccggcctccccaggacagctgaccaccccccggaccttcaaggtctgcaggggggcccatgacgattctgatgatgagttctgaccaccggcggatcccggggctgctgggcttcctgagtccccagcggctctcaacacacacctatgtaccagagcatctattaaatgtgagccttgctttttatgaaaagctgtgctttgaaaac

SEQ ID NO: 239070 - DNA, 1077 bp, Artificial Sequence
  derived and/or modified sequence
atggaccccctgagaagaagccccagcccctgcctgagcagccagcccagcagccccagcacccccccctgcgagatgctgggccccgtgggcatcgaggccgtgctggaccagctgaagatcaaggccatgaagatgggcttcgagttcaacatcatggtggtgggccagagcggcctgggcaagagcaccatggtgaacaccctgttcaagagcaaggtgtggaagagcaacccccccggcctgggcgtgcccaccccccagaccctgcagctgcacagcctgacccacgtgatcgaggagaagggcgtgaagctgaagctgaccgtgaccgacacccccggcttcggcgaccagatcaacaacgacaactgctgggaccccatcctgggctacatcaacgagcagtacgagcagtacctgcaggaggagatcctgatcaccagacagagacacatccccgacaccagagtgcactgctgcgtgtacttcgtgccccccaccggccactgcctgagacccctggacatcgagttcctgcagagactgtgcagaaccgtgaacgtggtgcccgtgatcgccagagccgacagcctgaccatggaggagagagaggccttcagaagaagaatccagcagaacctgagaacccactgcatcgacgtgtacccccagatgtgcttcgacgaggacatcaacgacaagatcctgaacagcaagctgagagacagaatccccttcgccgtggtgggcgccgaccaggagcacctggtgaacggcagatgcgtgctgggcagaaagaccaagtggggcatcatcgaggtggagaacatggcccactgcgagttccccctgctgagagacctgctgatcagaagccacctgcaggacctgaaggacatcacccacaacatccactacgagaactacagagtgatcagactgaacgagagccacctgctgcccagaggccccggctgggtgaacctggcccccgccagccccggccagctgaccacccccagaaccttcaaggtgtgcagaggcgcccacgacgacagcgacgacgagttctag

SEQ ID NO: 239071 - protein, 342 aa, Artificial Sequence
  derived and/or modified sequence
MNAIVALCHFCELHGPRTLFCTEVLHAPLPQGDGNEDSPGQGEQAEEEEGGIQMNSRMRAHSPAEGASVESSSPGPKKSDMCEGCRSLAAGHPGYISHDKETSIKYVSHQHPSHPQLFSIVRQACVRSLSCEVCPGREGPIFFGDEQHGFVFSHTFFIKDSLARGFQRWYSIITIMMDRIYLINSWPFLLGKVRGIIDELQGKALKVFEAEQFGCPQRAQRMNTAFTPFLHQRNGNAARSLTSLTSDDNLWACLHTSFAWLLKACGSRLTEKLLEGAPTEDTLVQMEKLAGEAGVLLPGPWPGWPWGGTSCLLSWQESLREGNAALNQPRTSLREAHPPISV

SEQ ID NO: 239072 - DNA, 594 bp, Artificial Sequence
  derived and/or modified sequence
atgaacgccatcgtggccctgtgccacttctgcgagctgcacggccccagaaccctgttctgcaccgaggtgctgcacgcccccctgccccagggcgacggcaacgaggacagccccggccagggcgagcaggccgaggaggaggagggcggcatccagatgaacagcagaatgagagcccacagccccgccgagggcgccagcgtggagagcagcagccccggccccaagaagagcgacatgtgcgagggctgcagaagcctggccgccggccaccccggctacatcagccacgacaaggagaccagcatcaagtacgtgagccaccagcaccccagccacccccagctgttcagcatcgtgagacaggcctgcgtgagaagcctgagctgcgaggtgagcctggtggccaccgagcccgtgagcgtgggcgcccacatgctgcccggcgccctgggcggcctgggcgccagcatcgcccagggcggcagacactggagcagcctgagagccgacccccagatcagcaccgcccagggcaccggcagactgccctgccccgagctgagagaggagagctgctggacctgctag

SEQ ID NO: 239073 - DNA, 1029 bp, Artificial Sequence
  derived and/or modified sequence
atgaacgccatcgtggccctgtgccacttctgcgagctgcacggccccagaaccctgttctgcaccgaggtgctgcacgcccccctgccccagggcgacggcaacgaggacagccccggccagggcgagcaggccgaggaggaggagggcggcatccagatgaacagcagaatgagagcccacagccccgccgagggcgccagcgtggagagcagcagccccggccccaagaagagcgacatgtgcgagggctgcagaagcctggccgccggccaccccggctacatcagccacgacaaggagaccagcatcaagtacgtgagccaccagcaccccagccacccccagctgttcagcatcgtgagacaggcctgcgtgagaagcctgagctgcgaggtgtgccccggcagagagggccccatcttcttcggcgacgagcagcacggcttcgtgttcagccacaccttcttcatcaaggacagcctggccagaggcttccagagatggtacagcatcatcaccatcatgatggacagaatctacctgatcaacagctggcccttcctgctgggcaaggtgagaggcatcatcgacgagctgcagggcaaggccctgaaggtgttcgaggccgagcagttcggctgcccccagagagcccagagaatgaacaccgccttcacccccttcctgcaccagagaaacggcaacgccgccagaagcctgaccagcctgaccagcgacgacaacctgtgggcctgcctgcacaccagcttcgcctggctgctgaaggcctgcggcagcagactgaccgagaagctgctggagggcgcccccaccgaggacaccctggtgcagatggagaagctggccggcgaggccggcgtgctgctgcccggcccctggcccggctggccctggggcggcaccagctgcctgctgagctggcaggagagcctgagagagggcaacgccgccctgaaccagcccagaaccagcctgagagaggcccacccccccatcagcgtgtag

SEQ ID NO: 239074 - DNA, 462 bp, Artificial Sequence
  derived and/or modified sequence
atgaacagcagaatgagagcccacagccccgccgagggcgccagcgtggagagcagcagccccggccccaagaagagcgacatgtgcgagggctgcagaagcctggccgccggccaccccggctacatcagccacgacaaggagaccagcatcaagtacgtgagccaccagcaccccagccacccccagctgttcagcatcgtgagacaggcctgcgtgagaagcctgagctgcgaggtgtgccccggcagagagggccccatcttcttcggcgacgagcagcacggcttcgtgttcagccacaccttcttcatcaaggacagcctggccagaggcttccagagatggtacagcatcatcaccatcatgatggacagaatctacctgatcaacagctggcccttcctgctgggcaaggtgagaggcatcatcgacgagctgcagggcaaggccctgaagtag

SEQ ID NO: 239075 - DNA, 594 bp, Artificial Sequence
  derived and/or modified sequence
atgaacgctattgtagccttatgccatttttgtgaactgcacggccccaggactttattttgcaccgaagtgctccacgctccactgccacagggcgacggcaacgaagatagtcctgggcaaggcgaacaggctgaagaggaagagggagggatccagatgaattccagaatgcgcgcgcactcacctgctgagggcgcaagcgttgagtcgagttctcccggccccaaaaagagtgatatgtgcgagggttgccggtccctggccgctggacaccccgggtacatctctcatgacaaggagacatccataaagtatgtgtctcatcaacatccctcccatccccagttgttctctattgttcgccaggcgtgtgtcagatcgttatcatgcgaagtctccttggtggccacagagcctgtgtcagtgggggctcatatgttgcccggcgcactggggggcctcggagcatcgatcgcgcagggtggacgacattggtccagtttgcgagcggacccccaaatctcaaccgctcagggaacaggccgcctgccatgccccgaactgcgagaagagagttgttggacttgttag

SEQ ID NO: 239076 - DNA, 1029 bp, Artificial Sequence
  derived and/or modified sequence
atgaatgccattgtagctctgtgtcacttttgtgaactacacggacccaggacactcttctgcactgaagtattacacgctccactgccccagggcgacggaaatgaggatagccctggtcaaggggagcaggctgaagaagaggagggtggtatccaaatgaattcacgtatgagggcgcactctcctgcagaaggtgcaagcgtagagtcctctagtcccgggccaaaaaagtccgacatgtgcgagggctgccggagtctagccgcaggccatccgggctacatctcccatgataaagaaacatcgatcaaatacgtgtctcaccaacacccttctcacccgcagctattcagtattgtcaggcaggcatgcgttcggtccctgtcatgtgaagtgtgccccggcagagaaggccccatcttctttggggacgaacaacacggcttcgtgttttctcatacctttttcatcaaggattcactggcacgtggtttccagcgctggtacagtatcattaccattatgatggaccggatttacctcataaattcttggcctttcctgctgggcaaagtacgcggcatcattgatgagctgcagggaaaagcgctgaaagtcttcgaagctgagcagttcggatgccctcaacgtgctcagcgaatgaatactgccttcactcccttcctccaccaaagaaatggtaatgccgctcgcagcctcacttctctgacatccgatgacaacctgtgggcatgtctgcacacgtcttttgcctggttgcttaaggcttgcgggagccgcctgacggagaaactgctggagggcgctcctactgaggacacactcgtccagatggagaagctcgctggcgaagccggggttttactgcctggcccctggccgggttggccatggggaggaacctcttgcctcctgtcctggcaggaatctctgagggagggcaatgccgccttaaaccaacccagaacatctctccgcgaggctcatccacccatctcagtatag

SEQ ID NO: 239077 - DNA, 594 bp, Artificial Sequence
  derived and/or modified sequence
atgaatgccattgtagccctgtgccacttttgtgaacttcacggcccacgaaccctgttttgcacagaggtcctgcatgccccccttccccaaggggatggaaatgaggactctcccggccagggggaacaagcagaagaggaggaaggcgggatacagatgaactcacgcatgcgcgctcattctccagcagagggagcatcggtggagagcagctctcctggcccaaaaaagagtgacatgtgcgaaggctgtcgatccttggctgctggccatcccggatacatcagtcacgacaaggagacttctatcaaatacgtgtcacatcaacacccatcccacccccagcttttttctattgtacgccaggcatgtgtgagaagcctctcctgtgaagtctctctcgttgccacagaaccggtgtccgtcggtgcccacatgttacccggagcccttggcggcctgggagccagtatagcccaagggggccggcattggtcaagtctgcgagctgatccccaaatatcaaccgcccaggggacagggcggctgccatgcccggagctacgagaggaaagttgctggacctgctag

SEQ ID NO: 239078 - DNA, 462 bp, Artificial Sequence
  derived and/or modified sequence
atgaattcccgcatgcgtgctcactcccctgccgagggtgcctcggtcgaatcgtcaagtccaggacctaagaagtctgatatgtgtgagggatgtaggtcactggctgctggacatccaggctacatctctcacgacaaagaaaccagtatcaagtacgtgagccaccagcacccctcgcatccccagttattcagcatcgtcagacaggcttgcgtgaggtctctgagctgcgaggtgtgtcctgggcgcgaagggcctattttttttggtgatgagcagcacggatttgtgttttcccacacgttttttataaaggattccctggcgcgcggatttcagaggtggtactccattattacaataatgatggatcgcatctatttaattaactcatggccctttttgctgggaaaggttagaggcatcatcgacgagctccagggtaaagctctaaagtag

SEQ ID NO: 239079 - DNA, 3359 bp, Artificial Sequence
  derived and/or modified sequence
tttaagtggaatcctacagtgtttatccgtttgtgaccagtgtagatcatttcgtgtaatgtccttcagtttcagccgtgccgtagcttgtggcagggtttccttcctttttaaggccatgtgacattccagtcccaccttgctaaagcagtttacctggtcactggggtgactctggagctcccctctggcctcactgcctgtgcttggtcatgttggctagctgtcctcccttctccacctctgagtctacaagggctgcactccacggaggtcccatgcgtcagccccgaccgcagcgcttggctctgctgctgtgtcccgtccccgtgaaggctcagcaggcactcactgggccttctcccctgctcactgctccgcactctgcaccccacccgcactgtgcgtcttcaccctgcctggcctgggccactgtcccttcctgctcagatcagtcagcagggtgcctcagcttgttccccacctccaccctggccccctgccatcttttctgcacatgggcatgagtgaacctattcaagtgaaattcacattttctcatgtctcatcagaacccccaaagcctccccagtctctgataacacatccagggtctttcggtggcctggaggagctataagatctgcttcctacagcctccaccctgtctgctgctgctctttggacaccggaccttacacacccctcagacagtacagcacccaccctgcccttcaactcttgcttggccccgtaagccagtccttccaggctcctgcctcctctggtcattccctgcgtgggcctctcgcaggaagcagttttcctgtgtcccccgccgaccccctgcaggaggtaagctgcatgagggcagtatcatgttgcctagcaccttggcccacatggagcaggtgccaagcagatatgtattgggtggaggaccctctccctgtggccttttatctatttgttctcacagggtttgccaggtttggctgcagttcatgtcacttgaggacattcctttccagcgccgttggctttgtggctgtggctctgtcacagctccagctgtgctatcattggtccacattgtcccctcccctatttgctgtgactcccatgggaagatcctatctctgttcctctcgcactggggcaaagcagtgctggcagggggctggggaactggcgggtggcctctcctgggcaggaagtccatggcacccaggtgctccctgtgctccagaggggctggggaggtttcatggagtcaataggcattggcaagctgacatgtcccctgtcccacgcaggcctgttgcagtctccaaggcaccatgaatgccatcgtggctctctgccacttctgcgagctccacggcccccgcactctcttctgcacggaggtgctgcacgccccacttcctcaaggggatgggaatgaggacagtcctggccagggtgagcaggcggaagaagaggaaggtggcattcagatgaacagtcggatgcgtgcgcacagccccgcagagggggccagcgtcgagtccagcagcccggggcccaaaaagtcggacatgtgcgagggctgccggtcacttgctgcagggcacccgggatatatcagccatgataaagagacctccattaaatacgtcagccaccagcaccccagccacccccagctcttcagcattgtccgccaggcctgtgtccggagcctgagctgtgaggtgagccttgtggccacagagcctgtctctgtgggagcccacatgctcccaggtgctctgggtgggctcggagccagcattgcacagggaggcaggcactggtcctctctcagggcggacccgcagatcagcacagcacagggtacaggacgcctcccttgtccagaattgcgggaggagtcatgttggacttgctgagcattttctgattgagtgctagcttttgcactttaagcaccgaacttttattatttgtcctttctttattattattgttttcttttttccttcttttgtgtcagggtctcgctctgtcgtccagactggagtgcagtggtgccgtcatggttcactgcaacctcaaactcctgggctcaagcgatcctcccgccttagcctcccaggtggctgggaccactggtgtgtgccaccatgctcaactggggtttgttttttgttgttgttaagacagagtctcactcggttgcccaggctggagtgcagtggtgcaatctcggcttactgcaacctccaccctgggtttaagtgattcttctgtctcagctatcctgagtagctgggacaacaggcgtgtgccaccatgcccggctaattttttgtatttttagtagagaagagatttcaccatgttggccgagctggtcttgaactcctgaccttgtgatttgcccgcctcggcctcccgaagtgctgggattacaggtgggagccactgtgccccacctttttaaaatttttttgtagagatgaggtctcagtatgttgcccaggttggtctcgaactcaagcaatcctctggctcatcctcccaaagcactaggattacaggtgtgagccgccatgcccagccatgtgtgtctattcttgatggatgtattcctaagataggaagcatttctaggttaggtggttcattgcatcaacatcacctttttttattatctcagtcctcattccaagtctcagtgatgatcccgtgctgctctcagcctgctgaggtgtggatgatttcttcctaaactacgtcgctgctgctgttgctcttgactctgagctcaggtctttgttacaaagaattcgtcgttcagttactaaacttccttgtcattggtgtccacccagttcgacacaccaagctcccttactgttctcattcagtgtggctgtgtgcctgccctcaactgtcctctccttttaatttcctaccgctggtctgctagcaggcagctcggcatgtctgttagaattgtgtgttaaggaagagtaagtatgtaatgaggagggactgaaatcctcttataagaataaagtacgtggggctgggcatggtggcccactcctgtaatcccagccctttgggaggccaaggccggcagatcacctgaggtcaggagttcgagaccagcctggccaacatggtgaaaccccctctctaaaaaaaatacaaaaaaattagccaggcgtggtggcacactcttacaatcccagctactcaggaggctgaggcaggagaattgcttgaacccaggagacggaggttgcagtgggccaggatcacaccactgcattccagcctgggtgacaagagcgagactccatctc

SEQ ID NO: 239080 - DNA, 1692 bp, Artificial Sequence
  derived and/or modified sequence
ggtcgctcctggttctgccagctcccctgagagcctgaacccgggcttgagagcctcgccaccccgggtgacatccctgccgtgggcttgggggctctgggtgtgattccgccggtccgggtcccgcagcgaccacctacccagcgcagtcaggggcggggctgggacccagagcgggaccccggctgccgagtccaggtgtcccgcgggcctcgatttggggagcagaaaacgccaggtcttcaagggtgtctgccaccaccatgcctgacccatttggcagcagcctcgtgtgtggtggtctggtgtggacggtggaagcgtgattctgctgagtgtcagtgtgaccactcgtgctcagccgtatctcagcaggaggacaggtgccggagcagctcgtgcagctaagcagccaactgcagaaacgtcaggcctgttgcagtctccaaggcaccatgaatgccatcgtggctctctgccacttctgcgagctccacggcccccgcactctcttctgcacggaggtgctgcacgccccacttcctcaaggggatgggaatgaggacagtcctggccagggtgagcaggcggaagaagaggaaggtggcattcagatgaacagtcggatgcgtgcgcacagccccgcagagggggccagcgtcgagtccagcagcccggggcccaaaaagtcggacatgtgcgagggctgccggtcacttgctgcagggcacccgggatatatcagccatgataaagagacctccattaaatacgtcagccaccagcaccccagccacccccagctcttcagcattgtccgccaggcctgtgtccggagcctgagctgtgaggtctgccctggccgtgaaggccccatcttcttcggagatgagcagcacggctttgtgttcagccacaccttcttcatcaaggacagcctggccaggggcttccagcgctggtacagcatcatcaccatcatgatggaccggatctacctcatcaactcctggcccttcctgctggggaaggtccggggaatcatcgatgagctccagggcaaggcgctcaaggtgtttgaggcagagcagtttggatgcccacagcgtgctcagaggatgaacacagccttcacgccattcctacaccagaggaacggcaacgccgcccgctcgctgacatcgctgacaagtgatgacaacctgtgggcgtgcctgcacacctcctttgcctggctcctgaaggcgtgtggcagccggctgaccgagaagctcctggaaggtgctccgaccgaggataccttggtccagatggagaagctcgctggtgaggcaggggtgctgttgccggggccttggcccggatggccgtggggcggtaccagctgtctgctctcctggcaggaatcgctgagggagggaaacgcggctctgaatcagcccagaacgagccttcgggaagctcaccctccgatctcggtgtgattgttgtgattgttgtgatttcctgtctcgtttgccttgaccgccatgtgaaagaatctgttccccagctaggtggggaaaattcacaggtgggctgtctgtagagagaactggctgattaaaggcttctcgtcccgattttgtgatagccaagtgcttggcctggtcgacggtctttgctcctttacaaataaagtgttctgtttca

SEQ ID NO: 239081 - DNA, 2523 bp, Artificial Sequence
  derived and/or modified sequence
gagtcacgcgcctgggtgtcggcggggctgcgggaccgcgagtgagtgtggtcgctcctggttctgccagctcccctgagagcctgaacccgggcttgagagcctcgccaccccgggtgacatccctgccgtgggcttgggggctctgggtgtgattccgccggtccgggtcccgcagcgaccacctacccagcgcagtcaggggcggggctgggacccagagcgggaccccggctgccgagtccaggtgtcccgcgggcctcgatttggggagcagaaaacgccaggtcttcaagggtgtctgccaccaccatgcctgacccatttggcagcagcctcgtgtgtggtggtctggtgtggacggtggaagcgtgattctgctgagtgtcagtgtgaccactcgtgctcagccgtatctcagcaggaggacaggtgccggagcagctcgtgcagctaagcagccaactgcagaaacgtcaggcctgttgcagtctccaaggcaccatgaatgccatcgtggctctctgccacttctgcgagctccacggcccccgcactctcttctgcacggaggtgctgcacgccccacttcctcaaggggatgggaatgaggacagtcctggccagggtgagcaggcggaagaagaggaaggtggcattcagatgaacagtcggatgcgtgcgcacagccccgcagagggggccagcgtcgagtccagcagcccggggcccaaaaagtcggacatgtgcgagggctgccggtcacttgctgcagggcacccgggatatatcagccatgataaagagacctccattaaatacgtcagccaccagcaccccagccacccccagctcttcagcattgtccgccaggcctgtgtccggagcctgagctgtgaggtgagccttgtggccacagagcctgtctctgtgggagcccacatgctcccaggtgctctgggtgggctcggagccagcattgcacagggaggcaggcactggtcctctctcagggcggacccgcagatcagcacagcacagggtacaggacgcctcccttgtccagaattgcgggaggagtcatgttggacttgctgagcattttctgattgagtgctagcttttgcactttaagcaccgaacttttattatttgtcctttctttattattattgttttcttttttccttcttttgtgtcagggtctcgctctgtcgtccagactggagtgcagtggtgccgtcatggttcactgcaacctcaaactcctgggctcaagcgatcctcccgccttagcctcccaggtggctgggaccactggtgtgtgccaccatgctcaactggggtttgttttttgttgttgttaagacagagtctcactcggttgcccaggctggagtgcagtggtgcaatctcggcttactgcaacctccaccctgggtttaagtgattcttctgtctcagctatcctgagtagctgggacaacaggcgtgtgccaccatgcccggctaattttttgtatttttagtagagaagagatttcaccatgttggccgagctggtcttgaactcctgaccttgtgatttgcccgcctcggcctcccgaagtgctgggattacaggtgggagccactgtgccccacctttttaaaatttttttgtagagatgaggtctcagtatgttgcccaggttggtctcgaactcaagcaatcctctggctcatcctcccaaagcactaggattacaggtgtgagccgccatgcccagccatgtgtgtctattcttgatggatgtattcctaagataggaagcatttctaggttaggtggttcattgcatcaacatcacctttttttattatctcagtcctcattccaagtctcagtgatgatcccgtgctgctctcagcctgctgaggtgtggatgatttcttcctaaactacgtcgctgctgctgttgctcttgactctgagctcaggtctttgttacaaagaattcgtcgttcagttactaaacttccttgtcattggtgtccacccagttcgacacaccaagctcccttactgttctcattcagtgtggctgtgtgcctgccctcaactgtcctctccttttaatttcctaccgctggtctgctagcaggcagctcggcatgtctgttagaattgtgtgttaaggaagagtaagtatgtaatgaggagggactgaaatcctcttataagaataaagtacgtggggctgggcatggtggcccactcctgtaatcccagccctttgggaggccaaggccggcagatcacctgaggtcaggagttcgagaccagcctggccaacatggtgaaaccccctctctaaaaaaaatacaaaaaaattagccaggcgtggtggcacactcttacaatcccagctactcaggaggctgaggcaggagaattgcttgaacccaggagacggaggttgcagtgggccaggatcacaccactgcattccagcctgggtgacaagagcgagactccatctc

SEQ ID NO: 239082 - DNA, 757 bp, Artificial Sequence
  derived and/or modified sequence
cgcgcctgggtgtcggcggggctgcgggaccgcgagtgagtgtggtcgctcctggttctgccagctcccctgagagcctgaacccgggcttgagagcctcgccaccccgggtgacatccctgccgtgggcttgggggctctgggtgtgattccgccggtccgggtcccgcagcgaccacctacccagcgcagtcaggggcggggctgggacccagagcgggaccccggctgccgagtccaggtgtcccgcgggcctcgatttggggagcaggcggaagaagaggaaggtggcattcagatgaacagtcggatgcgtgcgcacagccccgcagagggggccagcgtcgagtccagcagcccggggcccaaaaagtcggacatgtgcgagggctgccggtcacttgctgcagggcacccgggatatatcagccatgataaagagacctccattaaatacgtcagccaccagcaccccagccacccccagctcttcagcattgtccgccaggcctgtgtccggagcctgagctgtgaggtctgccctggccgtgaaggccccatcttcttcggagatgagcagcacggctttgtgttcagccacaccttcttcatcaaggacagcctggccaggggcttccagcgctggtacagcatcatcaccatcatgatggaccggatctacctcatcaactcctggcccttcctgctggggaaggtccggggaatcatcgatgagctccagggcaaggcgctcaag

SEQ ID NO: 239083 - DNA, 594 bp, Artificial Sequence
  derived and/or modified sequence
atgaatgccatcgtggccctgtgccacttctgtgagctgcacggccccaggaccctcttctgcacagaggtgctgcacgcccccctgccccagggagatggaaatgaagacagccctggccagggcgagcaggccgaggaggaggagggcggcatccagatgaacagcaggatgagggcccacagccctgctgagggcgcctctgtggagagcagcagccctggccccaagaagagtgacatgtgtgagggctgccgcagcctggccgccggccaccctggctacatcagccatgacaaggagaccagcatcaagtatgtgagccaccagcaccccagccacccccagctgttcagcatcgtgcggcaggcctgtgtgcgcagcctgagctgtgaggtgtccctggtggccacagagcctgtgtctgtgggcgcccacatgctgcccggggccctgggcggcctgggcgccagcatcgcccagggcggccgccactggagcagcctgcgggctgacccccagatcagcacagcccagggcaccggccgcctgccctgcccagagctgcgggaggagagctgctggacctgctag

SEQ ID NO: 239084 - DNA, 1029 bp, Artificial Sequence
  derived and/or modified sequence
atgaatgccatcgtggccctgtgccacttctgtgagctgcacggccccaggaccctcttctgcacagaggtgctgcacgcccccctgccccagggagatggaaatgaagacagccctggccagggcgagcaggccgaggaggaggagggcggcatccagatgaacagcaggatgagggcccacagccctgctgagggcgcctctgtggagagcagcagccctggccccaagaagagtgacatgtgtgagggctgccgcagcctggccgccggccaccctggctacatcagccatgacaaggagaccagcatcaagtatgtgagccaccagcaccccagccacccccagctgttcagcatcgtgcggcaggcctgtgtgcgcagcctgagctgtgaggtgtgccccggccgggagggccccatcttctttggagatgagcagcacggctttgtgttcagccacaccttcttcatcaaggacagcctggcccggggcttccagcgctggtacagcatcatcaccatcatgatggaccgcatctacctgatcaacagctggcccttcctgctgggcaaggtgcggggcatcattgatgagctgcagggcaaggccctgaaggtgtttgaggccgagcagtttggctgcccccagagggcccagaggatgaacacagccttcacccccttcctgcaccagagaaatggaaatgctgcccggagcctgaccagcctgaccagtgatgacaacctgtgggcctgcctgcacaccagctttgcctggctgctgaaggcctgtggcagccggctgacagagaagctgctggagggcgcccccacagaggacaccctggtgcagatggagaagctggccggggaggccggcgtgctgctgcccggcccctggccaggctggccctggggcggcaccagctgcctgctgtcctggcaggagagcctgcgggagggcaatgctgccctgaaccagcccaggaccagcctgcgggaggcccacccccccatctctgtgtag

SEQ ID NO: 239085 - DNA, 462 bp, Artificial Sequence
  derived and/or modified sequence
atgaacagcaggatgagggcccacagccctgctgagggcgcctctgtggagagcagcagccctggccccaagaagagtgacatgtgtgagggctgccgcagcctggccgccggccaccctggctacatcagccatgacaaggagaccagcatcaagtatgtgagccaccagcaccccagccacccccagctgttcagcatcgtgcggcaggcctgtgtgcgcagcctgagctgtgaggtgtgccccggccgggagggccccatcttctttggagatgagcagcacggctttgtgttcagccacaccttcttcatcaaggacagcctggcccggggcttccagcgctggtacagcatcatcaccatcatgatggaccgcatctacctgatcaacagctggcccttcctgctgggcaaggtgcggggcatcattgatgagctgcagggcaaggccctgaagtag

SEQ ID NO: 239086 - DNA, 594 bp, Artificial Sequence
  derived and/or modified sequence
atgaacgccatcgtggccctgtgccacttctgcgagctgcacggccccagaactcttttttgcacagaggtcctgcacgctcccctccctcagggcgatggcaacgaggatagccccggacaaggcgagcaggctgaagaagaggaaggtgggatccagatgaactcaaggatgagggcacattccccggctgagggtgcgagtgtggagagctccagtccgggcccaaagaagtccgacatgtgtgagggctgtcgatccctcgcggccgggcatccaggatacataagtcatgacaaggaaacaagcattaaatatgtatcccaccagcacccatcacatccgcagctattttccatcgtccgccaggcttgcgtccggtcactgagctgcgaggtgtccttagtagctactgaaccagtctcggttggcgcccacatgctccctggagcactgggtggactgggtgccagtatcgcccagggtggtcgccattggagctcactcagggccgatccacagatatctaccgcccaaggcactggccgactgccgtgtcccgagctcagggaggaatcctgttggacttgttag

SEQ ID NO: 239087 - DNA, 1029 bp, Artificial Sequence
  derived and/or modified sequence
atgaacgccatcgtggccctgtgccacttctgcgagctgcacggccctcgcacactcttctgtactgaggtgctgcacgctcctcttcctcagggagacggtaacgaggatagccctggccagggggagcaggccgaagaggaggaaggcggaatccaaatgaactctaggatgagggcccactctcccgctgaaggagcctcagtcgagtcttcctctcctggcccgaagaagagcgacatgtgcgaaggttgtagatctctggcagccggccatccaggttacatctcacatgataaagagacttccatcaagtacgtgtcccatcagcatccatcccacccccagctgtttagcatcgtgcgccaggcttgcgtcagaagtctgtcctgtgaagtgtgtcctggacgagaaggcccaatctttttcggcgatgagcagcacggatttgtgttttcccatacctttttcattaaagactctctggctcggggtttccagagatggtattctattatcactattatgatggaccggatttatctgatcaactcttggccgtttctgctcggaaaagttagaggaattatcgacgagctccaggggaaggctctgaaggtgttcgaagcagagcaattcggctgcccacagagggctcagagaatgaacacagctttcacaccattcctccatcagcgcaatggaaatgcagccagaagcctgacaagcctgaccagcgatgataacttatgggcttgtctccacaccagtttcgcttggcttctgaaagcctgcggaagccgcctgaccgaaaagctcctcgaaggcgccccaactgaagatacactagtccagatggagaaactggccggcgaagccggcgttttactgcccggcccctggcccgggtggccctggggcggaacctcatgtctgctctcatggcaggagtctctccgtgaaggaaatgccgctttgaaccaaccacggacaagtctgcgcgaggctcatcctcccataagtgtctag

SEQ ID NO: 239088 - DNA, 594 bp, Artificial Sequence
  derived and/or modified sequence
atgaacgccatcgtggccctgtgccacttctgcgagctgcacggccctcggaccctgttttgtactgaggtgcttcatgcccctctgcctcagggcgacggtaatgaagattcacccggacaaggagagcaagccgaagaggaagaggggggcattcaaatgaattcccgcatgcgggctcatagtccggctgagggagcctctgtggaaagcagttcccccggcccgaagaaaagcgatatgtgtgagggatgcaggtccttagctgccgggcatcccgggtatatcagccacgacaaagagacgtcaatcaaatacgtgagccatcagcatccatcgcatccacagctcttttctatcgtgcgccaggcttgcgtgcggtccctgtcctgtgaggtgtccttggtggcaacagagccagtaagcgtgggtgctcatatgctcccgggcgctctgggaggcctcggagcttctatcgctcagggcggcagacattggtcctctctgagggcggatccacagatttcaacggcccaggggaccggacggctcccttgtcctgagctcagagaagagtcatgctggacatgctag

SEQ ID NO: 239089 - DNA, 462 bp, Artificial Sequence
  derived and/or modified sequence
atgaacagccggatgcgggcccacagccccgccgagggcgccagcgtagagagtagcagcccaggccccaagaagtctgacatgtgcgaaggatgcaggtccctggccgcagggcacccaggctatatctcacatgacaaggagaccagcattaagtatgtaagccaccagcatccttcacatcctcagctgttctctatagttaggcaggcctgtgtgagatccctatcctgtgaggtttgtcctgggcgagagggccctattttcttcggcgacgaacaacacggcttcgtgttctcccatacattcttcatcaaagactcgctcgcccgagggtttcagagatggtattctattattactattatgatggaccgcatatatctcattaactcttggccttttctgcttggaaaggtgcgcgggatcattgatgaacttcagggcaaggccttgaagtag

SEQ ID NO: 239090 - DNA, 594 bp, Artificial Sequence
  derived and/or modified sequence
atgaatgccatagtcgccctctgccatttctgcgagctacatgggccaagaactctgttttgtactgaggtgctccacgctcccctccctcagggtgacggcaacgaagattctcctgggcaaggggagcaagccgaagaggaagagggcggtattcagatgaacagtcgaatgcgggcacactcacccgctgaaggggcttctgtcgagagttcctcacctggcccaaaaaagtccgatatgtgtgaaggctgccggtcactcgctgcaggtcacccaggatatataagccatgataaggaaacctccattaaatatgtgtcccaccagcatccctcccacccgcaactgttctcaatcgtgaggcaggcctgcgtgaggtcactgtcttgcgaggtctccctggtcgcaaccgaaccagtgtcagtcggcgctcacatgctgcccggagcattggggggtctcggagcgtccattgcacagggcggtcgccactggtcttcgttgcgtgcagacccacagatatctacggctcaaggaaccggcaggctgccctgcccggagctaagggaggagagctgttggacctgctag

SEQ ID NO: 239091 - DNA, 1029 bp, Artificial Sequence
  derived and/or modified sequence
atgaacgctattgtggccctatgccatttctgtgagctgcatggtccacgaaccctgttttgtacagaggttctgcatgccccactgccccagggagacggtaacgaggatagtccaggacagggtgaacaggcagaggaagaagaagggggtattcagatgaacagtcggatgcgcgctcacagccctgctgagggcgcatccgtagagtcctcgtctcccggtccaaaaaagtcagacatgtgcgaggggtgtaggtctctcgcagctgggcaccctggctatatttcccacgataaagaaacctccatcaagtacgtttcccatcagcacccatcccacccccagctattcagtatcgttcggcaagcgtgcgtgcgcagcttgtcttgtgaggtgtgtccgggaagagaggggcctatcttctttggcgacgaacagcatgggtttgtgttctctcataccttctttattaaggactctctggcacgcggatttcagcgttggtattcaataatcaccataatgatggatcgcatctacctaatcaactcttggcctttcctgcttggaaaggttagaggtatcattgatgagctccaaggaaaggccctcaaagtgtttgaggccgaacagttcggatgcccgcagcgagcccagcggatgaatacagcgtttacgccctttttacaccaaaggaacgggaacgctgcaaggtctcttacctccctgacatctgatgacaacttgtgggcatgtttgcataccagctttgcctggctgctcaaagcctgtggcagccggctaaccgaaaagctgctggagggagcgcctacagaggacaccttggttcagatggagaaactggccggagaggctggtgtgttacttcctggtccatggcctggctggccttgggggggtactagctgcctgctatcatggcaggagtccttgagagaaggaaatgctgcactcaatcagcccagaactagcctacgggaagcccatccacctatatctgtctag

SEQ ID NO: 239092 - DNA, 594 bp, Artificial Sequence
  derived and/or modified sequence
atgaatgcaattgtggccctgtgtcacttttgcgagttacatgggcctagaaccctgttttgcaccgaggtgctgcacgccccactgcctcagggtgatgggaatgaagatagtccagggcagggcgaacaggccgaagaagaggagggaggcattcagatgaatagcaggatgcgcgctcactctcctgccgagggcgcttcagtagagtctagctctcctggtccgaagaaatctgacatgtgtgagggatgccggagcctggccgcaggacatccaggctatatttctcatgacaaagaaacatccatcaagtatgtgagccaccaacaccctagtcatccccagctgtttagcattgtacggcaggcatgcgtgaggagcctgagttgcgaggtgtccttagtcgcaactgaaccagtgtcagttggagcacatatgttaccaggcgcacttgggggtcttggagcaagtatcgctcagggaggtcggcactggtcctcattgcgcgctgatcctcagatcagtaccgcccaggggacgggccgtctcccatgcccagagcttcgtgaagagtcctgttggacctgctag

SEQ ID NO: 239093 - DNA, 462 bp, Artificial Sequence
  derived and/or modified sequence
atgaattcgcggatgagagcccactcaccggcagaaggcgctagtgtcgagtcctcttcgccgggacccaagaaatctgacatgtgcgaaggctgccgctcactggctgctggccacccagggtacatatcccacgacaaggaaactagtatcaaatacgtgtcccaccaacaccctagccatccccaactgttttcaatagttagacaggcctgtgttagatctttgtcatgtgaagtctgtcctggacgtgaaggacccatatttttcggagatgaacaacacggcttcgtcttctcacacacctttttcatcaaagattcattagccagagggttccagaggtggtacagcattatcaccataatgatggacaggatctacctgattaattcctggccgtttctcctcggaaaggtgcggggaatcatcgacgagctgcagggaaaggcactgaagtag

SEQ ID NO: 239094 - protein, 1533 aa, Artificial Sequence
  derived and/or modified sequence
MMQLTLNTLFPVVSTPAITYIVTVFTGDVRGAGTKSKIYLVMYGARGNKNSGKIFLEGGVFDRGRTDIFHIELAVLLSPLSRVSVGHGNVGVNRGWFCEKVVILCPFTGIQQTFPCSNWLDEKKADGLIERQLYEMVSLRKKRLKKFPWSLWVWTTDLKKAGTNSPIFIQIYGQKGRTDEILLNPNNKWFKPGIIEKFRIELPDLGRFYKIRVWHDKRSSGSGWHLERMTLMNTLNKDKYNFNCNRWLDANEDDNEIVREMTAEGPTVRRIMGMARYHVTVCTGELEGAGTDANVYLCLFGDVGDTGERLLYNCRNNTDLFEKGNADEFTIESVTMRNVRRVRIRHDGKGSGSGWYLDRVLVREEGQPESDNVEFPCLRWLDKDKDDGQLVRELLPSDSSATLKNFRYHISLKTGDVSGASTDSRVYIKLYGDKSDTIKQVLLVSDNNLKDYFERGRVDEFTLETLNIGNINRLVIGHDSTGMHASWFLGSVQIRVPRQGKQYTFPANRWLDKNQADGRLEVELYPSEVVEIQKLVHYEVEIWTGDVGGAGTSARVYMQIYGEKGKTEVLFLSSRSKVFERASKDTFQLEAADVGEVYKLRLGHTGEGFGPSWFVDTVWLRHLVVREVDLTPEEEARKKKEKDKLRQLLKKERLKAKLQRKKKKRKGSDEEDEGEEEESSSSEESSSEEEEMEEEEEEEEFGPGMQEVIEQHKFEAHRWLARGKEDNELVVELVPAGKPGPERNTYEVQVVTGNVPKAGTDANVYLTIYGEEYGDTGERPLKKSDKSNKFEQGQTDTFTIYAIDLGALTKIRIRHDNTGNRAGWFLDRIDITDMNNEITYYFPCQRWLAVEEDDGQLSRELLPVDESYVLPQSEEGRGGGDNNPLDNLALEQKDKSTTFSVTIKTGVKKNAGTDANVFITLFGTQDDTGMTLLKSSKTNSDKFERDSIEIFTVETLDLGDLWKVRLGHDNTGKAPGWFVDWVEVDAPSLGKCMTFPCGRWLAKNEDDGSIIRDLFHAELQTRLYTPFVPYEITLYTSDVFAAGTDANIFIIIYGCDAVCTQQKYLCTNKREQKQFFERKSASRFIVELEDVGEIIEKIRIGHNNTGMNPGWHCSHVDIRRLLPDKDGAETLTFPCDRWLATSEDDKKTIRELVPYDIFTEKYMKDGSLRQVYKEVEEPLDIVLYSVQIFTGNIPGAGTDAKVYITIYGDLGDTGERYLGKSENRTNKFERGTADTFIIEAADLGVIYKIKLRHDNSKWCADWYVEKVEIWNDTNEDEFLFLCGRWLSLKKEDGRLERLFYEKEYTGDRSSNCSSPADFWEIALSSKMADVDISTVTGPMADYVQEGPIIPYYVSVTTGKHKDAATDSRAFIFLIGEDDERSKRIWLDYPRGKRGFSRGSVEEFYVAGLDVGIIKKIEVLYEMTVWTGDVVGGGTDSNIFMTLYGINGSTEEMQLDKKKARFEREQNDTFIMEILDIAPFTKMRIRIDGLGSRPEWFLERVKCLDPHSSFQPPPTPSPGSSGLSMDLVKAQMSL

SEQ ID NO: 239095 - protein, 306 aa, Artificial Sequence
  derived and/or modified sequence
MRLGTNCEHPQLPLAAPSGYYFPCQRWLAVEEDDGQLSRELLPVDESYVLPQSEEGRGGGDNNPLDNLALEQKDKSTTFSVTIKTGVKKNAGTDANVFITLFGTQDDTGMTLLKSSKTNSDKFERDSIEIFTVETLDLGDLWKVRLGHDNTGKAPGWFVDWVEVDAPSLGKCMTFPCGRWLAKNEDDGSIIRDLFHAELQTRLYTPFVPYEITLYTSDVFAAGTDANIFIIIYGCDAVCTQQKYLCTNKREQKQFFERKSASRFIVELEDVGEIIEKIRIGHNNTGMNPGWHCSHVDIRRLLPDKD

SEQ ID NO: 239096 - protein, 2211 aa, Artificial Sequence
  derived and/or modified sequence
MMPQKKRRRKKDIDFLALYEAELLNYASEDDEGELEHEYYKARVYEVVTATGDVRGAGTDANVFITLFGENGLSPKLQLTSKSKSAFEKGNVDVFRVRTNNVGLIYKVRIEHDNTGLNASWYLDHVIVTDMKRPHLRYYFNCNNWLSKVEGDRQWCRDLLASFNPMDMPRGNKYEVKVYTGDVIGAGTDADVFINIFGEYGDTGERRLENEKDNFEKGAEDRFILDAPDLGQLMKINVGHNNKGGSAGWFLSQIVIEDIGNKRKYDFPLNRWLALDEDDGKIQRDILVGGAETTAITYIVTVFTGDVRGAGTKSKIYLVMYGARGNKNSGKIFLEGGVFDRGRTDIFHIELAVLLSPLSRVSVGHGNVGVNRGWFCEKVVILCPFTGIQQTFPCSNWLDEKKADGLIERQLYEMVSLRKKRLKKFPWSLWVWTTDLKKAGTNSPIFIQIYGQKGRTDEILLNPNNKWFKPGIIEKFRIELPDLGRFYKIRVWHDKRSSGSGWHLERMTLMNTLNKDKYNFNCNRWLDANEDDNEIVREMTAEGPTVRRIMGMARYHVTVCTGELEGAGTDANVYLCLFGDVGDTGERLLYNCRNNTDLFEKGNADEFTIESVTMRNVRRVRIRHDGKGSGSGWYLDRVLVREEGQPESDNVEFPCLRWLDKDKDDGQLVRELLPSDSSATLKNFRYHISLKTGDVSGASTDSRVYIKLYGDKSDTIKQVLLVSDNNLKDYFERGRVDEFTLETLNIGNINRLVIGHDSTGMHASWFLGSVQIRVPRQGKQYTFPANRWLDKNQADGRLEVELYPSEVVEIQKLVHYEVEIWTGDVGGAGTSARVYMQIYGEKGKTEVLFLSSRSKVFERASKDTFQLEAADVGEVYKLRLGHTGEGFGPSWFVDTVWLRHLVVREVDLTPEEEARKKKEKDKLRQLLKKERLKAKLQRKKKKRKGSDEEDEGEEEESSSSEESSSEEEEMEEEEEEEEFGPGMQEVIEQHKFEAHRWLARGKEDNELVVELVPAGKPGPERNTYEVQVVTGNVPKAGTDANVYLTIYGEEYGDTGERPLKKSDKSNKFEQGQTDTFTIYAIDLGALTKIRIRHDNTGNRAGWFLDRIDITDMNNEITYYFPCQRWLAVEEDDGQLSRELLPVDESYVLPQSEEGRGGGDNNPLDNLALEQKDKSTTFSVTIKTGVKKNAGTDANVFITLFGTQDDTGMTLLKSSKTNSDKFERDSIEIFTVETLDLGDLWKVRLGHDNTGKAPGWFVDWVEVDAPSLGKCMTFPCGRWLAKNEDDGSIIRDLFHAELQTRLYTPFVPYEITLYTSDVFAAGTDANIFIIIYGCDAVCTQQKYLCTNKREQKQFFERKSASRFIVELEDVGEIIEKIRIGHNNTGMNPGWHCSHVDIRRLLPDKDGAETLTFPCDRWLATSEDDKKTIRELVPYDIFTEKYMKDGSLRQVYKEVEEPLDIVLYSVQIFTGNIPGAGTDAKVYITIYGDLGDTGERYLGKSENRTNKFERGTADTFIIEAADLGVIYKIKLRHDNSKWCADWYVEKVEIWNDTNEDEFLFLCGRWLSLKKEDGRLERLFYEKEYTGDRSSNCSSPADFWEIALSSKMADVDISTVTGPMADYVQEGPIIPYYVSVTTGKHKDAATDSRAFIFLIGEDDERSKRIWLDYPRGKRGFSRGSVEEFYVAGLDVGIIKKIEVLYEMTVWTGDVVGGGTDSNIFMTLYGINGSTEEMQLDKKKARFEREQNDTFIMEILDIAPFTKMRIRIDGLGSRPEWFLERILLKNMNTGDLTMFYYGDWLSQRKGKKTLVCEMCAVIDEEEMMEWTSYTVAVKTSDILGAGTDANVFIIIFGENGDSGTLALKQSANWNKFERNNTDTFNFPDMLSLGHLCKLRVWHDNKGIFPGWHLSYVDVKDNSRDETFHFQCDCWLSKSEGDGQTVRDFACANNKICDELEETTYEIVIETGNGGETRENVWLILEGRKNRSKEFLMENSSRQRAFRKGTTDTFEFDSIYLGDIASLCVGHLAREDRFIPKRELAWHVKTITITEMEYGNVYFFNCDCLIPLKRKRKYFKVFEVTKTTESFASKVQSLVPVKYEVIVTTGYEPGAGTDANVFVTIFGANGDTGKRELKQKMRNLFERGSTDRFFLETLELGELRKVRLEHDSSGYCSGWLVEKVEVTNTSTGVATIFNCGRWLDKKRGDGLTWRDLFPSV

SEQ ID NO: 239097 - DNA, 4602 bp, Artificial Sequence
  derived and/or modified sequence
atgatgcagctgacactgaacaccctctttccagtggtgtctacccccgccattacctacattgtcaccgtgtttaccggggatgtgcgtggcgctgggaccaagtcaaaaatatacctggtgatgtacggagctcgagggaataagaacagcgggaagatattcctggagggtggcgttttcgaccgggggcgcactgacatcttccacattgaactcgctgtgcttctcagcccgctgtcaagagtgagtgtgggacatggcaacgtgggcgttaacagaggctggttttgtgagaaggtggtcatactgtgcccgttcacgggtattcagcagacctttccttgttccaactggctagacgaaaagaaagccgatggtttaatcgaaagacagctttacgaaatggtctcgctgaggaagaagagactcaagaaattcccctggtctttgtgggtctggactactgatctcaaaaaagctgggacgaacagtcccatcttcatccagatatatggtcaaaaagggcgtaccgatgagatcttactcaatcctaataataagtggtttaagcccggtataattgaaaaattccgtatcgaattaccagacttgggacgattttataagattagagtctggcacgacaaaagatcttccgggagtggctggcacctggaacggatgaccctgatgaacaccctcaacaaagacaagtacaatttcaactgtaaccgctggctcgacgctaacgaggatgataatgaaatagtgcgagagatgacagctgagggcccgacagtgaggcgtattatgggtatggcccggtatcatgtcactgtgtgtaccggggagctggaaggtgccggaactgatgcgaatgtctatctctgtctgttcggagacgtcggagatactggcgagaggctcctgtataactgtcgcaacaatactgacttatttgagaaaggcaatgcggacgaatttaccatcgaaagtgtgaccatgcgaaatgtgaggagggtgagaatcagacacgacggaaaaggctcagggagcggctggtatctagatcgtgtgctcgtgcgtgaggagggacaaccagagtctgacaatgtggaatttccctgcctgcgctggctagataaggacaaggatgacgggcagttagtcagggagcttctgccatctgacagtagcgcgacccttaaaaactttcgataccatatctccctgaaaaccggggatgtgtccggcgcatcaactgactcgcgcgtttatataaagttgtacggtgataagtcagacacaataaagcaagtgctgcttgtttcagacaacaacctgaaggattattttgagagagggcgagtggatgagttcacactagagacactgaacatcggcaacatcaacaggctcgtgataggacacgattcgaccggaatgcatgctagctggtttctggggtcagttcagattagagttcctcgccaaggcaaacaatacacatttcccgctaaccggtggcttgacaagaaccaggcagacggccggctggaggtcgagctgtacccttcggaagtggtagaaatacaaaaattggtacattatgaagtcgaaatttggacgggcgatgtgggaggtgcaggtacttccgcgcgcgtttacatgcaaatttatggagagaaggggaaaaccgaggtgttattcctgtctagccgctcaaaggttttcgagagggcctccaaagacactttccaactcgaggcagcagatgttggggaagtgtacaaactccggctcgggcacactggtgaaggatttgggcctagttggttcgttgacacggtgtggctgcgtcacctcgtggtgcgcgaagttgatctcactcccgaagaggaggcccggaagaaaaaggagaaagacaaactcaggcagctgctcaagaaggagcggctgaaggctaagctgcagcgcaagaaaaaaaagaggaagggctccgatgaagaagatgaaggcgaggaagaggagagttcgagttcagaggaatcttctagtgaggaggaggaaatggaagaggaagaggaagaggaagaattcggccctggtatgcaggaggtgatcgagcagcacaaatttgaagcccacaggtggctggccaggggcaaagaggacaacgagttggtggtggagttggtgcctgccggaaaaccaggccccgaacgcaatacttatgaggttcaggtagtgaccggtaatgtgcctaaagctgggaccgacgcaaatgtgtacctgaccatttacggggaggaatacggagacactggcgaaagacctctgaaaaaatccgataaatctaacaaatttgaacagggacagacagacaccttcacgatttatgcaattgatcttggcgcattgacgaagatccgtattcgccacgataacaccggcaaccgggccggttggttcctggatagaatcgacattaccgatatgaacaacgagatcacatactacttcccctgccagcgttggctcgccgtggaagaggatgacgggcagctgtcccgcgagttactccccgtggacgagtcctacgtactgccccagagcgaggagggacggggcggcggcgataataaccccttagataatctcgccttggagcaaaaggataaatcaactacgttctcagtgactatcaagaccggcgtgaaaaagaacgcaggtaccgatgcaaatgtgttcatcactctcttcgggacccaggacgataccggtatgacactgttgaagtcttcaaagacaaactccgataagttcgagcgagatagtatcgagattttcaccgtggaaaccttggacctgggggacctctggaaggtcaggctgggccatgataacacaggaaaggcacctggatggtttgtagattgggtagaagtagacgctcctagcttggggaagtgtatgacattcccttgcggccggtggctcgccaagaatgaagatgacgggtcaattattcgtgatctgtttcatgcggagctgcaaacaagattgtatacaccattcgtgccctacgagattaccctgtacacaagcgacgtattcgccgctggaaccgacgccaacatcttcatcataatttacgggtgtgacgcagtgtgtacccagcagaaatacctgtgcaccaacaagcgggagcaaaaacagttcttcgaacggaaatcagcgtctaggttcatcgtcgagcttgaagacgtgggcgagatcattgaaaaaatccgcatcggacacaacaatactggcatgaaccctggctggcactgcagccacgtggatatccgtcgcctattacccgacaaggacggtgccgaaaccctcacatttccctgcgacaggtggttggctacatcagaggatgataagaagacaatcagggagctggtcccttacgatatctttaccgagaaatacatgaaggacggctccctcagacaggtttacaaagaagtggaggagcctctggacatcgtcttgtattcagtccagatattcacaggcaatatcccgggtgccgggactgacgccaaggtgtatatcactatctatggggacctgggcgatacaggcgagaggtatctcggaaagagcgaaaaccgcaccaacaaatttgaaagaggcaccgctgatactttcattatcgaggcggccgacctgggggtgatttacaagatcaagctgcgccacgacaacagtaaatggtgcgccgattggtacgttgaaaaggttgaaatctggaacgacacgaacgaggatgaatttttgttcttatgcggcaggtggcttagtctgaagaaggaggacggccgactggaaaggcttttctatgaaaaagagtacaccggcgacaggtccagtaactgttcttcacctgctgatttctgggagatcgccctcagttcgaagatggccgatgtggacatcagcacagtcaccgggcccatggcagactacgtgcaggagggccccataattccctactatgtatccgttaccacaggaaaacataaagacgctgccaccgattccagggcatttatctttctgatcggtgaggatgacgaacgctctaagaggatctggctggactacccaaggggcaagcgtggattcagccggggaagcgtcgaggaattctatgtggccggcctggatgtcgggattattaagaaaatcgaggtcttatatgagatgacggtgtggacaggagatgtcgtgggcggcggcactgactccaacatcttcatgactttgtacggtatcaatgggagcaccgaggaaatgcagctcgacaagaagaaggcgcgattcgaacgtgagcaaaatgatactttcatcatggagattctcgacatagcaccttttaccaaaatgcggattagaattgacggacttggttccagacccgagtggtttcttgagcgcgtgaaatgcctggatcctcattctagctttcagcctccaccaactccaagtcccgggtccagcggactcagcatggaccttgtaaaagcacagatgagcctgtag

SEQ ID NO: 239098 - DNA, 6636 bp, Artificial Sequence
  derived and/or modified sequence
atgatgccgcagaaaaaacggaggaggaaaaaggacatagacttcttggctttgtatgaggccgaactgctcaactacgcttcagaagacgacgaaggcgagctcgagcacgagtattacaaagccagggtttacgaggtggtcacggctaccggcgatgtcaggggcgcaggtacggacgcgaacgtattcattacactcttcggcgaaaacgggctgtcccccaagctgcagctgacttccaagtcaaaatcagcatttgagaaagggaatgtggatgtgtttcgggtgcgtactaataatgttggattgatatataaggtgcggatcgaacatgataacaccggattaaatgccagctggtaccttgaccacgtcattgttactgatatgaaaagaccccatctgagatattactttaattgcaataattggctcagtaaggtcgaaggagacagacagtggtgccgggatcttcttgccagtttcaacccgatggacatgcctaggggcaataagtacgaggtgaaggtttacacaggagacgtaatcggcgccggcacagatgcggacgtgttcatcaacatctttggggagtacggggatactggtgaacgaaggttggagaatgaaaaagacaactttgagaagggagcggaggatcgctttatccttgacgcaccggacctgggacagctgatgaagatcaacgtgggacacaacaacaaaggtgggtcagccggctggtttctctcacaaatcgtgatcgaagacattggcaataagcggaagtacgattttccactgaatcgatggctagcgctggacgaggacgatgggaagatacaaagagacattcttgtgggtggggctgagactaccgcgataacatacatagttacggtgttcaccggtgacgtgcgcggagctggcaccaagtcaaaaatatacctggttatgtatggggccaggggcaacaagaatagcggcaaaatcttcctcgagggcggggtgttcgatcgaggacgtacggacatctttcacattgagttagcagttcttctgtctcccctgagtagagttagcgttggccacggtaacgttggggtcaacaggggttggttttgcgagaaggtggtgatcctctgccccttcacagggatacagcaaacctttccttgttctaattggttagacgaaaaaaaggccgacgggctgatcgagcggcaactgtatgagatggtatcactaaggaagaaacgactgaagaagtttccttggtcattatgggtctggactacagacctgaagaaggccggaacgaacagtcccatcttcattcagatctacggacagaagggacggacagacgagattttattaaacccaaacaataagtggttcaagcctggaatcatcgagaaattccgcattgagctgcctgacttaggaaggttttataagatcagagtatggcatgataagagaagctctgggagcggctggcacctggagcggatgactctgatgaacacacttaataaagataagtacaacttcaactgtaatcggtggctcgacgcgaacgaagacgacaatgagattgtgcgggagatgacagccgagggacccactgttcggcgcattatgggcatggccagataccatgtaacagtttgcacaggggagctcgaaggagcaggcactgacgccaatgtgtacctctgcctcttcggcgacgtcggcgacactggagagcggctgctgtacaactgtcggaacaacaccgacctgttcgagaagggtaatgctgacgagtttaccatcgagtccgtgaccatgcggaatgtgcggcgggtccgcatcagacatgacgggaaagggtcgggatcaggctggtatttagatagagtgttggttagggaggagggacagcccgaatccgacaatgtagaattcccatgcctgcgctggctggataaggacaaggacgacgggcagttggtgagggaattgctcccaagtgattcgagtgccaccctgaaaaatttccggtaccatataagcttgaagacaggtgacgtatcaggcgcaagcacagactccagggtctacatcaagctgtatggagataaatccgatacaattaagcaggtgctccttgtcagtgacaacaatcttaaggattatttcgaacgtggccgagttgatgaatttacccttgaaactcttaatatcggcaatatcaacaggctggtcattggccacgatagtacgggcatgcacgcttcctggtttctcggttcggttcagatacgtgttccacggcaggggaaacagtatacatttcccgccaatagatggcttgacaaaaatcaggccgatgggagattggaggtagagctctatccttccgaagtggtggaaatccaaaaactggtccattatgaagtggagatctggaccggcgatgttgggggggcaggcacttccgccagagtatacatgcagatctacggggaaaaaggcaagacagaagtgctatttctcagtagtcgctctaaggtcttcgagagggcctccaaggacacttttcaactggaggccgcggatgtgggcgaggtgtataagctccgactcgggcacacgggcgagggttttggtccgtcttggttcgtggacaccgtctggctgagacacctggtggtccgggaagtggaccttacccctgaagaggaggctcgtaagaagaaagaaaaggacaaactgcgtcagctccttaaaaaggagcggttgaaggcaaaattgcaacggaagaaaaagaagagaaaaggatcagacgaggaggacgagggcgaagaggaagaatcctccagctcggaagagagctctagcgaggaggaggagatggaagaggaggaggaggaagaggaatttggtccggggatgcaagaggtcattgagcaacacaaattcgaggctcacaggtggcttgcccgggggaaagaggataacgagctagtcgtggagcttgtgcctgccgggaaacccgggccagagcgtaatacatacgaggtgcaggtggtaacaggcaatgtaccaaaggctggtaccgacgctaacgtgtacttgaccatatacggcgaggagtacggcgatactggcgagcgtcctctgaagaagagtgacaagtctaataagtttgaacaggggcagactgataccttcaccatctatgcaatagatttgggcgcgctgactaaaatccggattcgccacgataatacagggaaccgggccggatggttcctggaccggatcgacattacggacatgaataacgagatcacctactatttcccctgccaaaggtggctcgctgtagaagaggatgatgggcagctctctcgggaactcctacctgtcgatgagtcatatgtgctacctcagagcgaggaaggtcgtgggggcggagataataatccactggataacctcgcccttgaacagaaagacaaaagcacaaccttttcagtcacaataaaaaccggggtgaagaaaaatgcggggaccgacgcaaacgtctttatcaccctgttcggcacccaggatgacactggcatgactttgcttaagtcttcaaagactaactcggataagtttgagcgggattctatcgaaatttttaccgttgagaccttggatctaggtgatctctggaaagtccgtctggggcatgataacaccggcaaagctccgggctggtttgtggactgggtggaagtagacgctccaagtcttggcaagtgcatgactttcccgtgcgggcggtggttagcgaagaacgaggatgatggatcaatcattcgcgatctgttccacgccgagttacagaccagactgtacactcctttcgtgccctacgagattaccctttacaccagcgatgtgttcgccgcaggaactgatgccaacatatttattattatctatggatgtgacgctgtatgtacccaacagaaatatctatgtacgaataaaagggaacagaagcaattcttcgagcgaaagagtgccagcagatttattgtcgaacttgaggacgtcggggagattatcgagaaaattcggattgggcacaacaatacgggaatgaaccctggatggcactgttcgcacgtcgatatcagacggcttctccctgacaaagacggcgccgaaaccctgactttcccctgtgaccgatggctggccacaagcgaggatgacaagaaaaccatcagggagctggtaccgtacgatatttttaccgagaaatatatgaaagatgggtccctgaggcaggtgtataaagaagtggaggaacccctcgatatcgtgctgtactcagtgcagatctttactgggaacatcccgggggcaggcacagatgctaaggtttatattactatctatggggacctcggagatacgggagaacgttacttaggtaagagtgagaaccgaacaaataaattcgaacgtggcaccgcggataccttcatcattgaggccgccgacctgggggtgatttacaaaatcaagctcagacacgataattcaaagtggtgcgctgattggtacgtggagaaggtagagatctggaatgacactaacgaagatgagttcttattcctttgcggccggtggctgtccctgaagaaagaggatggccggctggagcgcctattttatgaaaaggaatacactggcgacaggtcttctaactgctcaagccccgcagatttctgggagatcgctctcagctctaaaatggcagatgtggatatttccacagtaacgggacccatggctgattatgtgcaggagggacccataatcccatactatgtttcggtgactaccggaaagcataaagacgccgccaccgattcccgggcattcattttcctgattggcgaggatgacgaaaggtcgaaaaggatttggttggattacccgcgtggcaaaaggggattttcgcggggatccgttgaggagttctacgtggctggtctcgatgtggggataatcaaaaaaatcgaagttctgtatgaaatgaccgtgtggacaggggatgtcgtgggtggaggcaccgatagtaacatctttatgaccttgtatggcattaacgggtccaccgaagagatgcagcttgacaagaagaaggcacggtttgagagggaacagaacgatacattcatcatggaaattctagacatagccccctttacgaaaatgcgaatccgcatcgacgggctgggctccaggcctgaatggttcctggaacgcattctgctgaaaaacatgaatacgggggacttgactatgttctattacggcgattggttatcccagcgaaagggaaaaaaaacattagtgtgtgaaatgtgcgccgtgatagatgaagaagagatgatggagtggacctcctacaccgtggccgtcaaaacctctgatattctgggagcgggcaccgatgccaatgtctttattattatcttcggtgagaatggtgacagcggaactttagcgctgaagcagagcgctaattggaataaattcgagaggaacaacacagatacattcaactttcctgatatgttgtcccttggacatctgtgtaagctgcgcgtttggcacgataataaggggatcttccccgggtggcatctctcctacgtggatgtgaaggacaattcccgggatgaaactttccacttccaatgtgactgttggctgagcaagagcgaaggcgacggacagacagtcagagacttcgcgtgtgctaataataagatctgcgacgagctggaggagacaacatacgagatcgtgatcgagaccgggaacgggggcgagacccgagaaaacgtttggttaattctagagggccggaagaaccggtcaaaagaattcctgatggaaaacagcagccgccagagggcctttcggaagggcaccacagacacctttgaattcgactccatttacttgggtgacattgcatctctgtgtgttggccacttagctagggaagataggttcattcctaaacgcgaactggcctggcatgtgaaaaccatcaccattacagagatggagtacggcaacgtctacttcttcaattgtgattgcctgatccccttgaaaaggaaaagaaaatacttcaaagtattcgaagtgacgaaaacaaccgaatccttcgcctccaaggtccaatccctggttcctgtcaaatacgaagtgattgtcaccaccggctacgaaccaggcgctggaaccgacgcaaacgtcttcgtgaccattttcggcgcaaatggagataccggtaagcgtgaactgaagcagaagatgagaaacttattcgagaggggatccaccgatagattctttctggaaaccctggaattaggcgagctgcggaaagtccggctggaacacgactcatccggttactgttcgggctggttagtagagaaggttgaagttacaaataccagtactggagtggctacaatttttaactgcggaaggtggctggataagaagaggggcgatggcttgacatggagagacctgttcccgtccgtctag

SEQ ID NO: 239099 - DNA, 2751 bp, Artificial Sequence
  derived and/or modified sequence
atgcaacgcccagtagtgaaattatatgctactgacgggcgcagagtgcctagcctgcaggcagtgatcctgtcctctggtgccgtggtggccgccggccgcgagcctttcaaacccggcaattatgatatacaaaaatatctgttgccggccagacttcctgggatttctcagagagtgtacccaaaaggaaacgctaagagtgaatcaagaaaaagcagtaactggaaggtattcatcattacatctgatctgcccgatgcaggcacgtcatctcaaatctacattatcctatacggtcagcatcgttcttcagctccaatttatctttatggcaccgatggtgcacgattccaggtgggccacgaggacattttcacgatcacagtgggcgatataggagcgctcttcaagatccggattggtcataccaacagcggttcgagcccctcatggcattgtaaagaaattcaactgcacaacatgaattcgggaaagcagttttacgtaccagtccaacgatggctcgccagggatcaggaggatggcgagatttgtcgcgaattccccttgctgtcaaagggacagcccgtgctccccgttaccatctacgaagtgaacgtggcaaccggagagttgtggaatgccgggacagtggctaatgtgtatatctctatccatggcgagaagggggatactggcagccggcagctcttcaggagcaagagcagttttaacttcctgcggggccagaccgatacattcttcctagaggcagtgcacctgggcgacttgtgtaaaatcgtaatcggccatgatggcctagggcctggaaatgggtggttcctggatgatgtggtgataaaggaccccactaccaactatgagtacgcctttttttgccatcggtggttggaccagggcgaggacgattgcaagatcgtgcgcgagctctatgccagagacaattcaattttctcagcgaggcaaaagcttgagcttaagcggaaagagacctggaccgctgagagctggaagttcaccaagggtaatactttgcagttctacaataaactcacggggggctttgtgcggctccatccagatgggacagtggatgcaataggcgaaaaaacagataagtacggagtgttcgacgtgatttttaacaaacgaaatatttgcatctttcagtcacacgaaatgcgccacctgagtctggcgctagataatggaatagtgactggaatggtgtccggtgaagctacgacagagttgcgtgttctgtaccagcccaatcggtgtgccctcctcgagagtgcccttgtgcccggccatacggtcgtgttcgataggcatggcaagatagctgatgcttcaagcgcgggatacgctaacctcagtaaggagttcgtgatctttgtgaagggcgttttcctgaatagtgccgttgtgctgctggctacatcactgtgtcaggccctgtgtctgcagccggacggcagctgcactggagtaggctcccagagcgagaagtcctattggaaggttcacaagatttcttcgggcatctgtatgtttgagtccgttaagaacgctcaaatgtacctgcggatcaaagatgggagatgcgatgggacagggacaggagatgttgactgtcatttcaaaatcaagaagaacctcaagaatgcctctatttccttagaatcaaccaaatctcccggtctgttcgtggggctgcagtccgatggccaggccaagcccatgatctacaccaaagatgagaacgtgtgcttttacccacaagtgatacagttcggccgggagaacccaatggggatgagcgccacaccttcccaagaagaggagaaaatccacgagagcaagaaacagaaaaaaattcccccagagagtgaggcgcgtagccctctgccgtcttcaactgctaaggaaatacgccatttccagagctcggagaccctcttaagtgaggacgaatggaaggtactcgtcctgacaggaaacaccgggactcaggcaaatgtgaccctgtgggtgtatggagataagggagtgacaggccccatcagtcttaggaaagactcctccgaacagttatttttgcctgggcacgaggacgagtttcaggtcgaaatccgaaatactggcaacatctacaaaatcagaattggacacgacggcactagcgagcagccagagtggaacttgcagcgggtgacaatgcagcatatgaagtcgaaaaagatcctggacttcgcagcaaacgtatggctcagtcggattcaggccgacggcgacgtcgtgtgtgagctccctgtggttaaaggtgggcaggccattttcccactcgtccggtatcaggtggacgtgtacacggggcaattaaaacacgccgaaacggagagcgaagttttcctgtgcttgttcggggagagaggcgattctggtctccggcaactgtataaatccaacatgcaggttaaatttcagcgtggacagatagacaagttccaagtagctgctgtctcacttggtaagctccagaaggtgttgctgcggtgcgaagccagcgacaaatctcagtactggtactgtgaacaggtaattgtgcgcgaacctgggacaactagcgagtcgatttttacttgccaaaggtggctcccattcatgagccaagggatcatacacagcgagattgagctttacctccaaggggaagactactag

SEQ ID NO: 239100 - DNA, 4602 bp, Artificial Sequence
  derived and/or modified sequence
atgatgcagctgaccctgaacaccctcttccctgtggtgtccaccccagccatcacctacatcgtgacagtgttcaccggagatgtgcggggggccggcaccaagagcaagatctacctggtgatgtatggagcccggggcaacaagaacagcggcaagatcttcctggagggcggcgtgtttgaccggggccgcacagacatcttccacatcgagctggccgtgctgctgagccccctgagccgggtgtctgtgggccatggaaatgtgggcgtgaacagaggctggttctgtgagaaggtggtgatcctgtgccccttcaccggcatccagcagaccttcccctgcagcaactggctggatgagaagaaggcagatggcctgattgagcggcagctgtatgagatggtgtccctgaggaagaagaggctgaagaagttcccctggagcctgtgggtgtggaccacagacctgaagaaggccggcaccaacagccccatcttcatccagatctacggccagaagggccgcacagatgagatcctgctgaaccccaacaacaagtggttcaagccaggcatcatcgagaagttccgcatcgagctgcctgacctgggccgcttctacaagatccgggtgtggcatgacaagaggagcagcggcagcggctggcacctggagaggatgaccctgatgaacaccctgaacaaggacaagtacaacttcaactgcaaccgctggctggatgccaatgaagatgacaatgaaattgtgcgggagatgacagctgagggccccaccgtgcggcgcatcatgggcatggcccgctaccacgtgacagtgtgcacaggagagctggagggcgccggcacagatgccaacgtgtacctgtgcctgtttggagatgtgggggacaccggggagcggctgctgtacaactgcaggaacaacacagacctgtttgagaagggaaatgctgatgagttcaccattgaatctgtgaccatgagaaatgtgcggcgggtgcgcatcagacatgatggaaaaggaagtggcagcggctggtacctggacagagtgctggtgcgggaggagggccagcctgagagtgacaacgtggagttcccctgcctgcgctggctggacaaggacaaggatgatggccagctggtgcgggagctgctgcccagcgacagcagcgccaccctgaagaacttccgctaccacatcagcctgaagacaggagatgtgtctggggccagcacagacagccgggtgtacatcaagctgtatggagacaagagtgacaccatcaagcaggtgctgctggtgtctgacaacaacctgaaggactactttgagcggggccgggtggatgagttcaccctggagaccctgaacatcggcaacatcaaccggctggtgattggacatgacagcacaggcatgcacgcctcctggttcctgggctctgtgcagatccgggtgccccggcagggcaagcagtacaccttccctgccaaccgctggctggacaagaaccaggctgatggccgcctggaggtggagctgtaccccagcgaggtggtggagatccagaagctggtgcactatgaggtggagatctggacaggagatgtgggcggggccggcaccagcgcccgggtgtacatgcagatctatggagagaagggcaagacagaggtgctcttcctgagcagccgcagcaaggtgtttgagcgggccagcaaggacaccttccagctggaggccgcagatgtgggggaggtgtacaagctgcggctgggccacactggagagggcttcggccccagctggtttgtggacacagtgtggctgcggcacctggtggtgcgggaggtggacctgaccccagaggaggaggccaggaagaagaaggagaaggacaagctgcggcagctgctgaagaaggagcggctgaaggccaagctgcagaggaagaagaagaagaggaagggcagtgatgaagaagatgaaggagaggaggaggagagcagcagcagcgaggagagcagcagcgaggaggaggagatggaggaggaggaggaggaggaggagtttggacctggcatgcaggaggtgattgagcagcacaagtttgaggcccaccgctggctggcccggggcaaggaggacaatgagctggtggtggagctggtgcctgctgggaagccaggccctgagaggaacacctatgaggtgcaggtggtgactggaaatgtgcccaaggccggcacagatgccaacgtgtacctgaccatctatggagaggagtatggagacaccggggagcggcccctgaagaagagtgacaagagcaacaagtttgagcagggccagacagacaccttcaccatctatgccatcgacctgggcgccctgaccaagatccgcatcagacatgacaacacaggcaacagagctggctggttcctggacagaattgacatcacagacatgaacaatgagatcacctactacttcccctgccagcgctggctggccgtggaggaggatgatggccagctgagccgggagctgctgcctgtggatgagagctatgtgctgccccagagcgaggagggccggggcggcggggacaacaaccccctggacaacctggccctggagcagaaggacaagagcaccaccttctctgtgaccatcaagacaggagtgaagaagaatgccggcacagatgccaacgtgttcatcaccctgtttggcacccaggatgacaccggcatgaccctgctgaagagcagcaagaccaacagcgacaagtttgagcgggacagcattgagatcttcaccgtggagaccctggacctgggggacctgtggaaggtgcggctgggccatgacaacacaggcaaggcccctggctggtttgtggactgggtggaggtggatgcccccagcctgggcaagtgcatgaccttcccctgtggccgctggctggccaagaatgaagatgatggcagcatcatccgggacctcttccacgccgagctgcagacccggctgtacaccccatttgtgccctatgagatcaccctgtacaccagtgatgtgtttgctgctggaacagatgccaacatcttcatcatcatctacggctgtgatgctgtgtgcacccagcagaagtacctgtgcaccaacaagcgggagcagaagcagttctttgagaggaagagcgccagccgcttcatcgtggagctggaggatgtgggggagatcatcgagaagatccgcatcggccacaacaacacaggcatgaaccctggctggcactgcagccacgtggacatccggcggctgctgcctgacaaggatggagctgagaccctgaccttcccctgtgaccgctggctggccaccagtgaagatgacaagaagaccatccgggagctggtgccctatgacatcttcacagagaagtacatgaaggatggcagcctgcggcaggtgtacaaggaggtggaggagcccctggacatcgtgctgtacagcgtgcagatcttcaccggcaacatccctggggccggcacagatgccaaggtgtacatcaccatctatggagacctgggggacacaggagagcgctacctgggcaagtctgagaacagaaccaacaagtttgagcggggcacagctgacaccttcatcatcgaggccgctgacctgggcgtcatctacaagatcaagctgcggcatgacaacagcaagtggtgtgccgactggtacgtggagaaggtggagatctggaatgacaccaatgaagatgagttcctgttcctgtgtggccgctggctgagcctgaagaaggaggatggccgcctggagcggctcttctatgagaaggagtacacaggagacaggagcagcaactgcagcagccctgctgacttctgggagatcgccctgagcagcaagatggctgatgtggacatcagcacagtgacaggccccatggctgactatgtgcaggagggccccatcatcccctactacgtgtctgtgaccaccgggaagcacaaggatgctgccacagacagccgggccttcatcttcctgattggagaagatgatgagaggagcaagaggatctggctggactacccccggggcaagaggggcttcagccggggctctgtggaggagttctacgtggccggcctggatgtgggcatcatcaagaagattgaggtgctgtatgagatgacagtgtggacaggagatgtggtgggcggcggcacagacagcaacatcttcatgaccctgtatggcatcaatggcagcacagaggagatgcagctggacaagaagaaggccaggtttgagcgggagcagaatgacaccttcatcatggagatcctggacatcgcccccttcaccaagatgaggatcagaattgatggcctgggcagcaggcctgagtggttcctggagcgggtgaagtgcctggacccccacagcagcttccagcccccacccacccccagccctggcagcagcggcctgtccatggacctggtgaaggcccagatgagcctgtag

SEQ ID NO: 239101 - DNA, 6636 bp, Artificial Sequence
  derived and/or modified sequence
atgatgccccagaagaagagaagaaggaagaaggacatcgacttcctggccctgtatgaagctgagctgctgaactatgcctctgaagatgatgaaggagagctggagcacgagtactacaaggcccgggtgtatgaggtggtgacagccactggagatgtgagaggagctggaacagatgccaacgtgttcatcaccctgtttggagaaaatggcctgagccccaagctgcagctgaccagcaagagcaagagcgcctttgagaagggaaatgtggatgtgttccgggtgaggaccaacaacgtgggcctcatctacaaggtgcgcatcgagcatgacaacacaggcctgaatgcctcctggtacctggaccacgtgattgtgacagacatgaagaggccccacctgcgctactacttcaactgcaacaactggctgagcaaggtggagggggaccggcagtggtgccgggacctgctggccagcttcaaccccatggacatgccccggggcaacaagtatgaggtgaaggtgtacacaggagatgtgattggagctggaacagatgctgatgtgttcatcaacatctttggagaatatggagacacaggagagcggcggctggagaatgagaaggacaactttgagaagggagctgaggaccgcttcatcctggatgccccagacctgggccagctgatgaagatcaacgtgggccacaacaacaagggcggcagcgctggctggttcctgagccagatcgtgattgaagatattggcaacaagaggaaatatgacttccccctgaaccgctggctggccctggatgaagatgatggcaagatccagagggacatcctggtgggcggcgctgagaccacagccatcacctacatcgtgacagtgttcaccggagatgtgcggggggccggcaccaagagcaagatctacctggtgatgtatggagcccggggcaacaagaacagcggcaagatcttcctggagggcggcgtgtttgaccggggccgcacagacatcttccacatcgagctggccgtgctgctgagccccctgagccgggtgtctgtgggccatggaaatgtgggcgtgaacagaggctggttctgtgagaaggtggtgatcctgtgccccttcaccggcatccagcagaccttcccctgcagcaactggctggatgagaagaaggcagatggcctgattgagcggcagctgtatgagatggtgtccctgaggaagaagaggctgaagaagttcccctggagcctgtgggtgtggaccacagacctgaagaaggccggcaccaacagccccatcttcatccagatctacggccagaagggccgcacagatgagatcctgctgaaccccaacaacaagtggttcaagccaggcatcatcgagaagttccgcatcgagctgcctgacctgggccgcttctacaagatccgggtgtggcatgacaagaggagcagcggcagcggctggcacctggagaggatgaccctgatgaacaccctgaacaaggacaagtacaacttcaactgcaaccgctggctggatgccaatgaagatgacaatgaaattgtgcgggagatgacagctgagggccccaccgtgcggcgcatcatgggcatggcccgctaccacgtgacagtgtgcacaggagagctggagggcgccggcacagatgccaacgtgtacctgtgcctgtttggagatgtgggggacaccggggagcggctgctgtacaactgcaggaacaacacagacctgtttgagaagggaaatgctgatgagttcaccattgaatctgtgaccatgagaaatgtgcggcgggtgcgcatcagacatgatggaaaaggaagtggcagcggctggtacctggacagagtgctggtgcgggaggagggccagcctgagagtgacaacgtggagttcccctgcctgcgctggctggacaaggacaaggatgatggccagctggtgcgggagctgctgcccagcgacagcagcgccaccctgaagaacttccgctaccacatcagcctgaagacaggagatgtgtctggggccagcacagacagccgggtgtacatcaagctgtatggagacaagagtgacaccatcaagcaggtgctgctggtgtctgacaacaacctgaaggactactttgagcggggccgggtggatgagttcaccctggagaccctgaacatcggcaacatcaaccggctggtgattggacatgacagcacaggcatgcacgcctcctggttcctgggctctgtgcagatccgggtgccccggcagggcaagcagtacaccttccctgccaaccgctggctggacaagaaccaggctgatggccgcctggaggtggagctgtaccccagcgaggtggtggagatccagaagctggtgcactatgaggtggagatctggacaggagatgtgggcggggccggcaccagcgcccgggtgtacatgcagatctatggagagaagggcaagacagaggtgctcttcctgagcagccgcagcaaggtgtttgagcgggccagcaaggacaccttccagctggaggccgcagatgtgggggaggtgtacaagctgcggctgggccacactggagagggcttcggccccagctggtttgtggacacagtgtggctgcggcacctggtggtgcgggaggtggacctgaccccagaggaggaggccaggaagaagaaggagaaggacaagctgcggcagctgctgaagaaggagcggctgaaggccaagctgcagaggaagaagaagaagaggaagggcagtgatgaagaagatgaaggagaggaggaggagagcagcagcagcgaggagagcagcagcgaggaggaggagatggaggaggaggaggaggaggaggagtttggacctggcatgcaggaggtgattgagcagcacaagtttgaggcccaccgctggctggcccggggcaaggaggacaatgagctggtggtggagctggtgcctgctgggaagccaggccctgagaggaacacctatgaggtgcaggtggtgactggaaatgtgcccaaggccggcacagatgccaacgtgtacctgaccatctatggagaggagtatggagacaccggggagcggcccctgaagaagagtgacaagagcaacaagtttgagcagggccagacagacaccttcaccatctatgccatcgacctgggcgccctgaccaagatccgcatcagacatgacaacacaggcaacagagctggctggttcctggacagaattgacatcacagacatgaacaatgagatcacctactacttcccctgccagcgctggctggccgtggaggaggatgatggccagctgagccgggagctgctgcctgtggatgagagctatgtgctgccccagagcgaggagggccggggcggcggggacaacaaccccctggacaacctggccctggagcagaaggacaagagcaccaccttctctgtgaccatcaagacaggagtgaagaagaatgccggcacagatgccaacgtgttcatcaccctgtttggcacccaggatgacaccggcatgaccctgctgaagagcagcaagaccaacagcgacaagtttgagcgggacagcattgagatcttcaccgtggagaccctggacctgggggacctgtggaaggtgcggctgggccatgacaacacaggcaaggcccctggctggtttgtggactgggtggaggtggatgcccccagcctgggcaagtgcatgaccttcccctgtggccgctggctggccaagaatgaagatgatggcagcatcatccgggacctcttccacgccgagctgcagacccggctgtacaccccatttgtgccctatgagatcaccctgtacaccagtgatgtgtttgctgctggaacagatgccaacatcttcatcatcatctacggctgtgatgctgtgtgcacccagcagaagtacctgtgcaccaacaagcgggagcagaagcagttctttgagaggaagagcgccagccgcttcatcgtggagctggaggatgtgggggagatcatcgagaagatccgcatcggccacaacaacacaggcatgaaccctggctggcactgcagccacgtggacatccggcggctgctgcctgacaaggatggagctgagaccctgaccttcccctgtgaccgctggctggccaccagtgaagatgacaagaagaccatccgggagctggtgccctatgacatcttcacagagaagtacatgaaggatggcagcctgcggcaggtgtacaaggaggtggaggagcccctggacatcgtgctgtacagcgtgcagatcttcaccggcaacatccctggggccggcacagatgccaaggtgtacatcaccatctatggagacctgggggacacaggagagcgctacctgggcaagtctgagaacagaaccaacaagtttgagcggggcacagctgacaccttcatcatcgaggccgctgacctgggcgtcatctacaagatcaagctgcggcatgacaacagcaagtggtgtgccgactggtacgtggagaaggtggagatctggaatgacaccaatgaagatgagttcctgttcctgtgtggccgctggctgagcctgaagaaggaggatggccgcctggagcggctcttctatgagaaggagtacacaggagacaggagcagcaactgcagcagccctgctgacttctgggagatcgccctgagcagcaagatggctgatgtggacatcagcacagtgacaggccccatggctgactatgtgcaggagggccccatcatcccctactacgtgtctgtgaccaccgggaagcacaaggatgctgccacagacagccgggccttcatcttcctgattggagaagatgatgagaggagcaagaggatctggctggactacccccggggcaagaggggcttcagccggggctctgtggaggagttctacgtggccggcctggatgtgggcatcatcaagaagattgaggtgctgtatgagatgacagtgtggacaggagatgtggtgggcggcggcacagacagcaacatcttcatgaccctgtatggcatcaatggcagcacagaggagatgcagctggacaagaagaaggccaggtttgagcgggagcagaatgacaccttcatcatggagatcctggacatcgcccccttcaccaagatgaggatcagaattgatggcctgggcagcaggcctgagtggttcctggagcgcatcctgctgaagaacatgaacacaggagacctgaccatgttctactatggagactggctgagccagaggaagggcaagaagaccctggtgtgtgagatgtgtgctgtgattgatgaggaggagatgatggagtggaccagctacacagtggccgtgaagaccagtgacatcctgggcgccggcacagatgccaacgtgttcatcatcatctttggagaaaatggagacagcggcaccctggccctgaagcagagcgccaactggaacaagtttgagaggaacaacacagacaccttcaacttcccagacatgctgagcctgggccacctgtgcaagctgcgggtgtggcatgacaacaagggcatcttccctggctggcacctgtcctatgtggatgtgaaggacaacagcagagatgagaccttccacttccagtgtgactgctggctgagcaagtcagaaggagatggccagacagtgcgggactttgcctgtgccaacaacaagatctgtgatgagctggaggagaccacctatgagatcgtcatcgagactggaaatggaggagagacccgggagaatgtgtggctgatcctggagggcaggaagaacagaagcaaggagttcctgatggagaacagcagccggcagagggccttcaggaagggcaccacagacacctttgaatttgacagcatctacctgggggacatcgccagcctgtgtgtgggccacctggcccgggaggaccgcttcatccccaagcgggagctggcctggcacgtgaagaccatcaccatcacagagatggagtatggaaatgtgtacttcttcaactgtgactgcctgatccccctgaagaggaagaggaagtacttcaaggtgtttgaggtgaccaagaccacagagagctttgccagcaaggtgcagagcctggtgcctgtgaagtatgaggtgattgtgaccaccggctatgagcccggggccggcacagatgccaacgtgtttgtgaccatctttggagccaacggggacaccgggaagcgggagctgaagcagaagatgaggaacctgtttgagcggggcagcacagaccgcttcttcctggagaccctggagctgggggagctgaggaaggtgcggctggagcatgacagcagcggctactgcagcggctggctggtggagaaggtggaggtgaccaacaccagcactggagtggccaccatcttcaactgtggccgctggctggacaagaagagaggagatggcctgacctggagggacctcttccccagcgtgtag

SEQ ID NO: 239102 - DNA, 4775 bp, Artificial Sequence
  derived and/or modified sequence
acacaaactctggaaaagatgaaatgaggtcgagagggacattaggtggcatctggaggagtaggacatgatggggaaagaggatgtgtggaggaggagggctttgggggtgttgtaaccaggaaggggaggagggggtgggatattatgatgcagctcacattgaacactctctttcctgttgtttccacaccagctattacgtatattgtcaccgtcttcactggggatgtccggggggctggtaccaaatccaaaatctacttggtcatgtatggggccagagggaataagaacagtgggaaaatcttcctggagggcggcgtgtttgaccgaggccgcacggacatcttccacatcgagctggctgtcctccttagccccctgagtcgggtctccgtcgggcatggcaatgtgggtgtcaacagaggctggttctgtgagaaggtggtgattctgtgccccttcactggtatccagcagaccttcccttgtagcaactggctggatgagaagaaagcggatgggttgattgagaggcagctctatgagatggtgtctctcaggaagaagcggctgaaaaaattcccttggtccctgtgggtctggacaaccgacctaaagaaagctggtaccaactctcccatcttcatccagatttatgggcagaaggggcggacagatgagattctcctgaatcccaacaacaagtggttcaaacccggcataatcgagaagtttaggattgagctcccggatcttggcaggttttataagattcgagtatggcatgataaaaggagttctggttctggatggcatttagaaaggatgaccctgatgaacactctgaacaaagacaagtacaacttcaattgcaaccgctggctggatgccaatgaggatgacaatgagatagtgagggaaatgactgcagaaggcccaacagtgcgcaggatcatgggcatggcccggtaccatgtgactgtgtgcacaggtgaacttgaaggtgctgggaccgatgccaacgtctatctctgcctttttggtgatgtgggggacacgggggaacggctgctctacaactgcaggaataacacagacctgtttgaaaagggcaatgctgacgagttcactatcgagtctgtcaccatgcggaatgtgaggcgggtgaggatcagacacgatggcaaaggctccggcagcggctggtacctggacagagtgctggtgagagaggaggggcagcctgagagcgacaacgtggagttcccatgtctcaggtggttggacaaggataaggatgatgggcagctggtccgagagttgctacccagtgacagcagcgcgacactgaagaactttcgctatcacatcagcttgaagactggggatgtctctggggccagcacggattctagagtctacatcaagctctatggggataaatctgacaccatcaagcaagttcttcttgtctctgacaacaacctcaaagactactttgaacgtggccgggtggatgagttcaccctcgagaccctgaacattggaaatatcaaccggctggtgattgggcatgacagcactggcatgcatgccagctggttcctgggcagcgttcagatccgtgtgccccgtcaaggcaagcagtacacctttcccgccaaccgctggctggacaagaaccaggctgacgggcgcctggaggtggagctgtatcccagcgaggtggtggagatccagaaattggtccactatgaggttgagatttggacaggagatgtgggtggcgcaggcaccagtgcccgagtctacatgcagatctatggagagaaaggcaagacagaagtgctcttcctctccagccgctcaaaagtttttgaacgggcgtccaaggacacattccagcttgaggcggccgacgtgggcgaggtctataagctccggctcgggcacacgggcgagggctttgggcccagctggttcgtggacaccgtgtggctgcggcacctggtggtgcgggaggtggacctcacgccggaggaggaggcccggaagaagaaggagaaggacaagctgcggcagctgctcaagaaggagcggctgaaggccaagctgcagaggaagaagaagaagaggaagggcagcgacgaagaggacgagggggaggaagaggagtcgtcctcatcagaggagtcctcgtcagaggaggaggagatggaagaagaggaggaagaggaggagtttgggccggggatgcaggaggtgattgagcagcacaagttcgaagcccaccgctggctggcccggggcaaggaggacaacgaacttgtcgtggagttggtgccagctggcaagccgggtcctgagcgaaacacctatgaggttcaggtggtcacggggaatgtgcccaaggccggcactgatgctaacgtctacctaaccatctacggcgaggagtatggagacacgggcgaacgacccctgaagaagtcagacaagtccaacaaatttgagcaggggcagacagacaccttcaccatctatgccattgacctgggggccctgaccaagattcggattcgccacgacaacacaggcaacagagcaggctggttcctggacagaatagacattactgacatgaacaacgagatcacgtactactttccatgccaacgttggctggcagtggaggaagatgatggccagctgtccagggagctgttgccagtggatgagtcctatgtgctgccacagagcgaggagggtaggggaggcggtgacaacaaccccctcgacaacctggccctggagcagaaagataaatctaccacattctcagtgaccataaagactggggttaagaagaatgcgggcacagatgctaatgtcttcatcacactctttggcacacaggatgacactggaatgaccctcctgaagtcctccaagacaaacagcgataagtttgagagggacagcattgaaatcttcacggtggagacgctggatctgggagacctgtggaaagtccggcttggccatgacaacacaggcaaggccccaggctggtttgtagactgggtagaggtggatgccccatctcttgggaagtgcatgacgtttccctgtggccgctggctggccaaaaacgaagacgacgggtccatcatcagagacctcttccatgcagagcttcagacgaggctgtacacaccatttgttccttacgagatcaccctctacaccagtgatgtctttgctgctgggacagatgccaacatcttcatcatcatctatggctgcgatgccgtgtgcacccagcagaagtatctgtgtaccaacaagagggaacagaagcagttctttgagaggaagtctgcctcccgcttcatcgtagagttagaagatgtgggagaaatcattgaaaaaattcggattggccataataacacgggcatgaatcctgggtggcactgctctcacgtggacatccgcaggctcctcccggataaagacggtgcagagaccttgactttcccatgcgatcggtggcttgccacctctgaggatgacaaaaagaccattcgagaactggttccatatgacatcttcactgagaaatacatgaaagatgggtccttacggcaagtctacaaggaagtagaagagcctctggacattgtgctgtactcggtgcagatcttcacagggaacattcctggggcagggacggatgccaaggtgtacatcaccatctatggagacctcggggacactggggagcgataccttggcaagtcagagaaccggaccaacaagttcgagagaggaacggctgacaccttcatcatcgaggccgctgacctaggcgtcatctacaagatcaagctccgccatgacaactccaagtggtgcgcagactggtacgtggagaaggtggagatctggaatgacaccaacgaggacgagttcctgttcctatgcgggcgctggctctccctgaagaaggaggatgggcgactcgagaggctcttttacgagaaggagtacactggggaccgcagcagcaactgcagcagccctgctgacttctgggagatcgccctgagctccaagatggccgatgtcgacatcagcacagtgaccgggcccatggctgactacgttcaagagggcccaattattccctactatgtgtcagtcaccactgggaagcacaaggacgcggccactgacagccgagccttcatctttctcatcggggaggatgatgaacgtagtaagcgcatctggttggactacccccgagggaagaggggcttcagccgtggctctgtggaggagttctacgtcgcaggcttggatgtgggcatcatcaagaaaatagaggttctctatgaaatgacggtgtggacaggggatgtggttggcgggggcactgactccaacatcttcatgaccctctacggcatcaacgggagcacagaggagatgcagctggacaaaaagaaagccaggtttgagcgggagcagaacgacaccttcatcatggagatcctagacattgctccattcaccaagatgcggatccggattgatggcctgggcagtcggccggagtggttcctggagagggtaaaatgtctagaccctcactcttccttccagccaccacccaccccttcccctggttcctctggcttgtcaatggaccttgttaaagcacaaatgtcactgtagaggatcattacatgaacccagcccat

SEQ ID NO: 239103 - DNA, 6848 bp, Artificial Sequence
  derived and/or modified sequence
atgatgccccagaagaaaaggcggaggaagaaggacatcgacttcctggccctgtacgaagcggagctgctgaactacgcctcggaggacgacgagggggagctggaacacgagtactacaaggccagagtgtatgaagtggtcacagccacgggggatgttcgcggtgcagggacggatgccaatgtcttcatcacgctttttggagagaatgggctctctcccaagctccagctcaccagcaagagcaagtctgcctttgagaagggcaacgtcgatgtgttccgggtgagaaccaacaatgtgggcctcatctataaagtcaggattgagcatgacaacacgggcttgaatgccagctggtacctggaccatgtgattgtgaccgacatgaagaggcctcatctccgttactacttcaactgcaacaactggctgagcaaggtggaaggtgaccgccagtggtgccgtgacctgctggccagcttcaaccccatggacatgcccagaggtaataagtatgaagtcaaggtatacactggtgatgtaattggtgcagggacagatgctgatgtcttcatcaatatttttggagagtatggagacacaggggagcgtaggctagaaaatgaaaaggacaactttgaaaagggagctgaagacaggttcatcctggatgccccggatttggggcagctgatgaagatcaatgttggccacaacaataaggggggctctgcaggttggttcctgtcccagatagtcattgaagatattgggaacaaaagaaaatatgacttcccccttaaccgctggctggccttggacgaagacgatggcaaaatccaaagggatatcttagtgggcggagctgagaccacagctattacgtatattgtcaccgtcttcactggggatgtccggggggctggtaccaaatccaaaatctacttggtcatgtatggggccagagggaataagaacagtgggaaaatcttcctggagggcggcgtgtttgaccgaggccgcacggacatcttccacatcgagctggctgtcctccttagccccctgagtcgggtctccgtcgggcatggcaatgtgggtgtcaacagaggctggttctgtgagaaggtggtgattctgtgccccttcactggtatccagcagaccttcccttgtagcaactggctggatgagaagaaagcggatgggttgattgagaggcagctctatgagatggtgtctctcaggaagaagcggctgaaaaaattcccttggtccctgtgggtctggacaaccgacctaaagaaagctggtaccaactctcccatcttcatccagatttatgggcagaaggggcggacagatgagattctcctgaatcccaacaacaagtggttcaaacccggcataatcgagaagtttaggattgagctcccggatcttggcaggttttataagattcgagtatggcatgataaaaggagttctggttctggatggcatttagaaaggatgaccctgatgaacactctgaacaaagacaagtacaacttcaattgcaaccgctggctggatgccaatgaggatgacaatgagatagtgagggaaatgactgcagaaggcccaacagtgcgcaggatcatgggcatggcccggtaccatgtgactgtgtgcacaggtgaacttgaaggtgctgggaccgatgccaacgtctatctctgcctttttggtgatgtgggggacacgggggaacggctgctctacaactgcaggaataacacagacctgtttgaaaagggcaatgctgacgagttcactatcgagtctgtcaccatgcggaatgtgaggcgggtgaggatcagacacgatggcaaaggctccggcagcggctggtacctggacagagtgctggtgagagaggaggggcagcctgagagcgacaacgtggagttcccatgtctcaggtggttggacaaggataaggatgatgggcagctggtccgagagttgctacccagtgacagcagcgcgacactgaagaactttcgctatcacatcagcttgaagactggggatgtctctggggccagcacggattctagagtctacatcaagctctatggggataaatctgacaccatcaagcaagttcttcttgtctctgacaacaacctcaaagactactttgaacgtggccgggtggatgagttcaccctcgagaccctgaacattggaaatatcaaccggctggtgattgggcatgacagcactggcatgcatgccagctggttcctgggcagcgttcagatccgtgtgccccgtcaaggcaagcagtacacctttcccgccaaccgctggctggacaagaaccaggctgacgggcgcctggaggtggagctgtatcccagcgaggtggtggagatccagaaattggtccactatgaggttgagatttggacaggagatgtgggtggcgcaggcaccagtgcccgagtctacatgcagatctatggagagaaaggcaagacagaagtgctcttcctctccagccgctcaaaagtttttgaacgggcgtccaaggacacattccagcttgaggcggccgacgtgggcgaggtctataagctccggctcgggcacacgggcgagggctttgggcccagctggttcgtggacaccgtgtggctgcggcacctggtggtgcgggaggtggacctcacgccggaggaggaggcccggaagaagaaggagaaggacaagctgcggcagctgctcaagaaggagcggctgaaggccaagctgcagaggaagaagaagaagaggaagggcagcgacgaagaggacgagggggaggaagaggagtcgtcctcatcagaggagtcctcgtcagaggaggaggagatggaagaagaggaggaagaggaggagtttgggccggggatgcaggaggtgattgagcagcacaagttcgaagcccaccgctggctggcccggggcaaggaggacaacgaacttgtcgtggagttggtgccagctggcaagccgggtcctgagcgaaacacctatgaggttcaggtggtcacggggaatgtgcccaaggccggcactgatgctaacgtctacctaaccatctacggcgaggagtatggagacacgggcgaacgacccctgaagaagtcagacaagtccaacaaatttgagcaggggcagacagacaccttcaccatctatgccattgacctgggggccctgaccaagattcggattcgccacgacaacacaggcaacagagcaggctggttcctggacagaatagacattactgacatgaacaacgagatcacgtactactttccatgccaacgttggctggcagtggaggaagatgatggccagctgtccagggagctgttgccagtggatgagtcctatgtgctgccacagagcgaggagggtaggggaggcggtgacaacaaccccctcgacaacctggccctggagcagaaagataaatctaccacattctcagtgaccataaagactggggttaagaagaatgcgggcacagatgctaatgtcttcatcacactctttggcacacaggatgacactggaatgaccctcctgaagtcctccaagacaaacagcgataagtttgagagggacagcattgaaatcttcacggtggagacgctggatctgggagacctgtggaaagtccggcttggccatgacaacacaggcaaggccccaggctggtttgtagactgggtagaggtggatgccccatctcttgggaagtgcatgacgtttccctgtggccgctggctggccaaaaacgaagacgacgggtccatcatcagagacctcttccatgcagagcttcagacgaggctgtacacaccatttgttccttacgagatcaccctctacaccagtgatgtctttgctgctgggacagatgccaacatcttcatcatcatctatggctgcgatgccgtgtgcacccagcagaagtatctgtgtaccaacaagagggaacagaagcagttctttgagaggaagtctgcctcccgcttcatcgtagagttagaagatgtgggagaaatcattgaaaaaattcggattggccataataacacgggcatgaatcctgggtggcactgctctcacgtggacatccgcaggctcctcccggataaagacggtgcagagaccttgactttcccatgcgatcggtggcttgccacctctgaggatgacaaaaagaccattcgagaactggttccatatgacatcttcactgagaaatacatgaaagatgggtccttacggcaagtctacaaggaagtagaagagcctctggacattgtgctgtactcggtgcagatcttcacagggaacattcctggggcagggacggatgccaaggtgtacatcaccatctatggagacctcggggacactggggagcgataccttggcaagtcagagaaccggaccaacaagttcgagagaggaacggctgacaccttcatcatcgaggccgctgacctaggcgtcatctacaagatcaagctccgccatgacaactccaagtggtgcgcagactggtacgtggagaaggtggagatctggaatgacaccaacgaggacgagttcctgttcctatgcgggcgctggctctccctgaagaaggaggatgggcgactcgagaggctcttttacgagaaggagtacactggggaccgcagcagcaactgcagcagccctgctgacttctgggagatcgccctgagctccaagatggccgatgtcgacatcagcacagtgaccgggcccatggctgactacgttcaagagggcccaattattccctactatgtgtcagtcaccactgggaagcacaaggacgcggccactgacagccgagccttcatctttctcatcggggaggatgatgaacgtagtaagcgcatctggttggactacccccgagggaagaggggcttcagccgtggctctgtggaggagttctacgtcgcaggcttggatgtgggcatcatcaagaaaatagaggttctctatgaaatgacggtgtggacaggggatgtggttggcgggggcactgactccaacatcttcatgaccctctacggcatcaacgggagcacagaggagatgcagctggacaaaaagaaagccaggtttgagcgggagcagaacgacaccttcatcatggagatcctagacattgctccattcaccaagatgcggatccggattgatggcctgggcagtcggccggagtggttcctggagaggatcctactgaagaacatgaacactggagacctgaccatgttctactatggagactggctgtcccagcggaagggcaagaagaccctggtgtgtgaaatgtgtgccgttatcgatgaggaagaaatgatggagtggacctcctacaccgtcgcagttaagaccagcgacatcctgggagcaggcactgatgccaacgtgttcatcatcatcttcggggagaacggggatagtgggacactggccctgaagcagtcggcaaactggaacaagtttgagcggaacaacacggacacattcaacttccctgacatgctgagcttgggccacctctgcaagctgagggtctggcacgacaacaaagggatatttcctggctggcatctgagctatgtcgatgtgaaggacaactcccgcgacgagaccttccacttccagtgtgactgctggctctccaagagtgagggtgacgggcagacggtccgcgactttgcctgtgccaacaacaagatctgtgatgagctggaagagaccacctacgagatcgtcatagaaacgggcaacggaggcgaaaccagggagaacgtctggctcatcctggagggcaggaagaaccgatccaaagagtttctcatggaaaattcttctaggcagcgggcctttaggaaggggaccacagacacgtttgagtttgacagcatctacttgggggacattgcctccctctgtgtgggccaccttgccagggaagaccggtttatccccaagagagaacttgcctggcatgtcaagaccatcaccatcaccgagatggagtacggcaatgtgtacttctttaactgtgactgcctcatccccctcaagaggaagaggaagtacttcaaggtattcgaggttaccaagacgacagagagctttgccagcaaggtccagagcctggtgcccgtcaagtacgaagtcatcgtgacaacaggctatgagccaggggcaggcactgatgccaacgtcttcgtgaccatctttggggccaacggagacacaggcaagcgggagctgaagcagaaaatgcgcaacctcttcgagcggggcagcacagaccgcttcttcctggagacgctggagctgggtgagctgcgcaaggtgcgcctggagcacgacagcagtggctactgctcaggctggctggtggagaaggtggaggtcaccaacaccagcaccggcgtggccaccatcttcaactgtggcaggtggctggacaagaagcggggggatggactcacctggagagacctcttcccttctgtctgaggggctagggcccccaccctctcactgagatgccccaatctcacatttctgccctccaccttggcggtcagcagcccttcaaagcctctagcattggcactgggggctagcagtccactgagaacttcatggggtcctgctccccaccctacccccagtttattgaacctacagtgataataattagcatgtgtcataatctgtggctgccc

SEQ ID NO: 239104 - DNA, 1958 bp, Artificial Sequence
  derived and/or modified sequence
ctgcctcacagaggaagaaccgaggtgggggcttggtgaaggcacaccaggaagagcaggctgcgcctcaccctccagtggagacagagggcagacattctctttggagcacacctcaggctaaatggcaaaaccccaatctcaagtgaacatcatggaactaggggattgtctcacttctccagtggattgaggcagtgctccctctgttctctatgaaatgacggtgtggacaggggatgtggttggcgggggcactgactccaacatcttcatgaccctctacggcatcaacgggagcacagaggagatgcagctggacaaaaagaaagccaggtttgagcgggagcagaacgacaccttcatcatggagatcctagacattgctccattcaccaagatgcggatccggattgatggcctgggcagtcggccggagtggttcctggagaggatcctactgaagaacatgaacactggagacctgaccatgttctactatggagactggctgtcccagcggaagggcaagaagaccctggtgtgtgaaatgtgtgccgttatcgatgaggaagaaatgatggagtggacctcctacaccgtcgcagttaagaccagcgacatcctgggagcaggcactgatgccaacgtgttcatcatcatcttcggggagaacggggatagtgggacactggccctgaagcagtcggcaaactggaacaagtttgagcggaacaacacggacacattcaacttccctgacatgctgagcttgggccacctctgcaagctgagggtctggcacgacaacaaagggatatttcctggctggcatctgagctatgtcgatgtgaaggacaactcccgcgacgagaccttccacttccagtgtgactgctggctctccaagagtgagggtgacgggcagacggtccgcgactttgcctgtgccaacaacaagatctgtgatgagctggaagagaccacctacgagatcgtcatagaaacgggcaacggaggcgaaaccagggagaacgtctggctcatcctggagggcaggaagaaccgatccaaagagtttctcatggaaaattcttctaggcagcgggcctttaggaaggggaccacagacacgtttgagtttgacagcatctacttgggggacattgcctccctctgtgtgggccaccttgccagggaagaccggtttatccccaagagagaacttgcctggcatgtcaagaccatcaccatcaccgagatggagtacggcaatgtgtacttctttaactgtgactgcctcatccccctcaagaggaagaggaagtacttcaaggtattcgaggttaccaagacgacagagagctttgccagcaaggtccagagcctggtgcccgtcaagtacgaagtcatcgtgacaacaggctatgagccaggggcaggcactgatgccaacgtcttcgtgaccatctttggggccaacggagacacaggcaagcgggagctgaagcagaaaatgcgcaacctcttcgagcggggcagcacagaccgcttcttcctggagacgctggagctgggtgagctgcgcaaggtgcgcctggagcacgacagcagtggctactgctcaggctggctggtggagaaggtggaggtcaccaacaccagcaccggcgtggccaccatcttcaactgtggcaggtggctggacaagaagcggggggatggactcacctggagagacctcttcccttctgtctgaggggctagggcccccaccctctcactgagatgccccaatctcacatttctgccctccaccttggcggtcagcagcccttcaaagcctctagcattggcactgggggctagcagtccactgagaacttcatggggtcctgctccccaccctacccccagtttattgaacctacagtgataataattagcatgtgtcataa

SEQ ID NO: 239105 - DNA, 2751 bp, Artificial Sequence
  derived and/or modified sequence
atgcagaggcctgtggtgaagctgtatgccacagatggccggcgggtgcccagcctgcaggccgtcatcctgagcagcggggctgtggtggccgccggccgggagcccttcaagccaggcaactatgacatccagaagtacctgctgcctgcccggctgcccggcatcagccagagggtgtaccccaagggaaatgccaagtctgagagcaggaagagcagcaactggaaggtgttcatcatcaccagtgacctgcctgatgctggcaccagcagccagatctacatcatcctgtatggccagcacaggagcagcgcccccatctacctgtatggaacagatggagcccgcttccaggtgggccacgaggacatcttcaccatcaccgtgggggacattggagccctcttcaagatcagaattggccacaccaacagcggcagcagccccagctggcactgcaaggagatccagctgcacaacatgaacagcggcaagcagttctacgtgcctgtgcagcgctggctggcccgggaccaggaggatggagagatctgccgggagttccccctgctgagcaagggccagcctgtgctgcctgtgaccatctatgaggtgaatgtggccaccggggagctgtggaatgccggcaccgtggccaacgtgtacatcagcatccatggagagaagggggacaccggcagccggcagctgttccgcagcaagagcagcttcaacttcctgcggggccagacagacaccttcttcctggaggccgtgcacctgggggacctgtgcaagatcgtcatcggccatgatggcctgggccctggaaatggctggttcctggatgatgtggtgatcaaggaccccaccaccaactatgaatatgccttcttctgccaccgctggctggaccagggagaagatgactgcaagatcgtgcgggagctgtatgcccgggacaacagcatcttcagcgcccggcagaagctggagctgaagaggaaggagacctggacagctgagagctggaagttcaccaagggcaacaccctgcagttctacaacaagctgaccggcggctttgtgcggctgcacccagatggcaccgtggatgccatcggggagaagacagacaagtatggagtgtttgatgtgatcttcaacaagaggaacatctgcatcttccagagccatgagatgaggcacctgagcctggccctggacaatggaattgtgacaggcatggtgtctggagaggccaccacagagctgcgggtgctgtaccagcccaacagatgtgccctgctggagagcgccctggtgcccggccacacagtggtgtttgacagacatggcaagattgctgatgccagcagcgctggctacgccaacctgagcaaggagtttgtgatctttgtgaagggcgtcttcctgaacagcgctgtggtgctgctggccaccagcctgtgccaggccctgtgcctgcagccagatggcagctgcaccggggtgggcagccagagcgagaagagctactggaaggtgcacaagatcagcagcggcatctgcatgtttgaatctgtgaagaatgcccagatgtacctgcgcatcaaggatggccgctgtgatggcactggaactggagatgtggactgccacttcaagatcaagaagaacctgaagaatgccagcatcagcctggagagcaccaagagccctggcctgtttgtgggcctgcagagtgatggccaggccaagcccatgatctacaccaaggatgaaaatgtgtgcttctacccccaggtgatccagtttggccgggagaaccccatgggcatgtctgccacccccagccaggaggaggagaagatccacgagagcaagaagcagaagaagatccccccagagagcgaggcccggagccccctgcccagcagcacagccaaggagatccgccacttccagagcagcgagaccctgctgtctgaagatgagtggaaggtgctggtgctgaccggcaacacaggcacccaggccaacgtgaccctgtgggtgtatggagacaagggcgtgacaggccccatcagcctgaggaaggacagcagcgagcagctgttcctgcccggccatgaagatgagttccaggtggagatcagaaatactggaaacatctacaagatcagaattggacatgatggcaccagcgagcagcctgagtggaacctgcagagggtgaccatgcagcacatgaagagcaagaagatcctggactttgctgccaacgtgtggctgagccgcatccaggctgatggagatgtggtgtgtgagctgcctgtggtgaagggcggccaggccatcttccccctggtgcgctaccaggtggatgtgtacacaggccagctgaagcacgccgagacagagagcgaggtgttcctgtgcctgtttggagagcggggggacagcggcctgcggcagctgtacaagagcaacatgcaggtgaagttccagaggggccagattgacaagttccaggtggccgctgtgtccctgggcaagctgcagaaggtgctgctgcgctgtgaggccagtgacaagagccagtactggtactgtgagcaggtgattgtgcgggagcccggcaccaccagcgagagcatcttcacctgccagcgctggctgcccttcatgagccagggcatcatccacagcgagattgagctgtacctgcagggcgaggactactag

SEQ ID NO: 239106 - DNA, 4602 bp, Artificial Sequence
  derived and/or modified sequence
atgatgcagctgaccctgaacaccctgttccccgtggtgagcacccccgcaattacctacatcgtcacggtattcacaggtgatgtacgtggggccggtacaaaatcgaagatttacctggtgatgtacggcgcgcgggggaataaaaacagcggaaaaattttccttgaaggtggtgttttcgaccgtggacggaccgatatatttcacatagaacttgccgtcctgctatcccccctcagccgggtttccgtggggcacgggaatgtgggagtcaacagagggtggttctgtgagaaagtggttatactctgtccattcaccggaattcagcagacatttccctgctctaactggctggatgaaaagaaagccgatggattgattgaacgccagttatacgaaatggttagcctgcgcaagaaaagacttaaaaaatttccctggagcctgtgggtctggactaccgatctgaagaaagccggcactaacagcccaatcttcattcagatatatggccaaaaaggtagaacggacgagattctgcttaatccaaacaacaagtggttcaagcccggaatcattgaaaagtttcggatagaactgcccgacctcgggcgtttctataaaatccgggtctggcacgataaacgctcttccggaagcggctggcaccttgagaggatgactctgatgaacactctgaataaagacaagtataactttaactgtaatcggtggctggacgctaacgaggacgacaacgagatcgtcagggagatgaccgcggaaggtccaacagtacggcgcatcatgggcatggctagatatcatgtgactgtctgcactggagagttggagggggcaggcaccgacgccaatgtatacctgtgcctgttcggagatgtgggggatactggggagagattgctatataactgtcgaaacaatacagatctgtttgaaaaagggaacgcagatgagtttaccatcgagtccgtgaccatgcgaaatgttagacgagtgcgcattaggcacgacggaaaggggagtggatccggctggtacctggaccgggtgttggtcagggaggaggggcaaccagaatcagataatgtggagtttccctgcttgcgatggttggacaaggataaagatgacgggcagctagtcagggaacttctgcccagtgattcatctgctacactcaagaacttccgataccacatcagtctgaaaacaggcgacgtctcaggcgcgtccactgactctagggtatatattaagctgtacggagataagtccgatacaattaagcaggtgttgctcgtgtctgataacaatttgaaagattactttgaaagagggagggtcgacgagtttactttggaaacactcaatattggcaatattaaccgtttagtgatcggtcatgattctacagggatgcacgccagctggttcctcggctccgtccagatacgagtgccacggcaagggaagcaatacactttccctgcaaatagatggttagataagaaccaggctgacggcagactcgaagtggaactgtatccctctgaggttgtagaaattcagaagttggttcactatgaggtcgagatctggacgggtgatgtgggcggtgccggcacttcagcacgggtgtacatgcagatatatggagagaaggggaaaacagaagtgctctttctctcttccagaagtaaggtattcgaacgtgcgagtaaggatacattccagcttgaggccgcggacgtgggcgaggtgtacaagctgcgtttgggtcacacaggggagggcttcggacccagctggttcgtggatactgtctggctgcgtcatttggtagtgagagaagtggacttaaccccggaggaagaggccaggaagaagaaggagaaagacaagctgaggcagctgctaaaaaaagagaggctgaaggctaagctccaacggaagaagaagaagagaaaagggagcgatgaggaagacgagggcgaagaggaggagtcatccagcagcgaagaatcatccagcgaggaggaagagatggaggaggaggaagaggaggaggagtttggacccggcatgcaggaagtcatagaacagcacaaattcgaggcgcaccggtggctggcgcgaggcaaggaagacaacgagcttgttgtggagttagtaccagccggcaaacccggcccagagagaaatacttacgaggtgcaagtggttacaggaaacgtcccgaaggctgggacagatgctaatgtgtatcttaccatctacggagaagaatacggcgacaccggggaacgccccttaaaaaagagcgacaaaagcaacaagttcgagcaggggcagaccgacactttcacgatttacgctattgacttgggtgccctcaccaaaattagaattagacatgacaatacgggtaatagggccgggtggttccttgatcgcatcgacataaccgatatgaataatgagataacctactactttccctgccagcgctggctcgctgtggaggaggacgacggccagctctccagagaattactgccagtggacgagtcttatgtcctccctcagagtgaggagggcaggggaggcggcgataacaatcccctcgataatctagccttggaacagaaggacaagtctactacctttagcgtgacgattaagaccggggtcaaaaagaacgcgggaacagacgccaatgtcttcatcacgctcttcggaacccaggatgacacaggtatgacactcctaaaatcatctaagaccaatagtgacaaattcgaaagggactcaattgagatcttcactgtagaaacacttgacctcggcgatttgtggaaagtgcggttggggcatgacaacacgggcaaggcgcccggctggttcgttgactgggtcgaggtggatgcaccatcgctgggtaagtgcatgacctttccctgcggcagatggcttgcaaaaaatgaggacgacggatcaataattagggacctgttccacgctgagcttcagactaggttgtacaccccattcgtgccctatgaaatcaccttgtatacatctgatgtgtttgcagccggaaccgatgccaatatcttcattatcatatatggctgcgacgctgtgtgcacacagcagaagtatttgtgcacaaataagcgcgagcaaaagcagttttttgaacggaaatctgcatccagatttatcgtagaattggaagatgtgggagagatcattgagaagatccggatcggtcataataacacaggcatgaatcccggctggcactgcagccatgtagacatccggagactgctccccgacaaggacggcgctgagacgctgactttcccatgtgaccggtggctggcgacaagcgaggacgataaaaagaccatcagagaactagtgccctatgatatttttaccgagaagtatatgaaggacggcagtcttagacaggtttacaaagaggtcgaggaaccacttgatatcgtattatactctgtccagatatttacaggcaacattccaggagccggtacggatgctaaggtctatatcacaatttacggcgacctcggtgacactggcgagagataccttggtaaatcagagaatagaaccaacaagttcgaacgcggaacagccgacacttttatcattgaagccgcggatctgggagttatttataagatcaaactgcgccatgacaatagcaagtggtgcgccgactggtacgtggagaaagtggagatctggaatgacacaaacgaagatgagtttttgttcctgtgtggaaggtggttgagcctgaaaaaggaggatggccgactcgaaagactattctacgagaaggaatatactggagacaggtcttcaaactgctctagcccggccgatttttgggaaattgccctgtctagtaagatggctgatgtggatatttcaacagtgaccggccctatggccgattatgtgcaggaagggcccattatcccttactacgtgtcagtgacaacagggaaacacaaggatgcagcaaccgattctagagcttttattttcctgatcggcgaagacgacgagaggtctaagaggatatggctggactaccctaggggtaagcgagggttttccagaggaagcgtagaagaattttacgtcgcaggactggacgtgggtataatcaaaaagattgaggtgctctatgagatgactgtctggacaggcgatgttgtaggaggcggcacagactctaacatttttatgacactgtatggcatcaacggctctaccgaggaaatgcagttagacaagaagaaagccaggttcgagcgtgaacagaatgacacattcatcatggagatccttgatatcgccccatttaccaaaatgcgtatacggatagatggattaggatcgaggccagagtggttcctcgagagggtgaagtgcctggatcctcacagcagctttcagcctccgcccacaccctcaccaggaagctcgggcttgagcatggatctggtgaaggcgcagatgtctctatag

SEQ ID NO: 239107 - DNA, 6636 bp, Artificial Sequence
  derived and/or modified sequence
atgatgccccagaagaagcggcggcggaagaaggacatcgacttcttggccttgtatgaggctgagctgttgaactacgcttccgaggatgatgagggggagctggagcacgaatactacaaagccagggtatatgaagtggtcacagcaaccggtgatgtccggggcgcggggaccgatgccaatgtcttcatcactctgtttggcgaaaatggattatcacccaagctccagctcactagcaaatctaagagcgcttttgagaaaggtaatgtcgacgtgttccgagttaggacaaacaacgtaggcctgatttataaggtccgaatcgaacatgacaatactggcctgaacgcctcttggtacctcgaccacgttatcgtcacggacatgaagcggccacatctgcggtattacttcaactgtaataattggctttctaaggttgagggtgaccgccagtggtgccgtgatcttctcgcctcctttaatccgatggatatgccccgcggaaataagtatgaagtgaaagtctacacaggcgacgttattggggcaggtacggacgcggacgtctttatcaacattttcggggagtacggagataccggggaaaggcgcctggagaacgaaaaggacaactttgagaagggcgccgaggatcggttcattttggatgctcccgatcttgggcaactaatgaagataaacgtgggccacaacaacaagggcggctcagctggttggtttttatctcagattgtgattgaggatattgggaataagcgcaagtacgacttcccacttaatcgatggcttgcactggatgaagatgacggcaagatacagagagacatacttgtcggaggggccgagacgacagcaattacctacattgtgaccgtatttaccggggatgtgcgcggcgcaggtacaaagagtaaaatttatcttgttatgtatggggctcgcggcaacaagaatagcggaaagatcttcctggagggcggagtgtttgatagaggacggacggacatctttcatatcgaattggctgtgctgctcagtcccctctcccgggtgtctgtgggccacggaaacgtaggggtcaaccggggctggttctgtgaaaaagtcgttatcctctgccccttcaccggtatccagcagacctttccatgctccaattggctggacgagaagaaagcggacggtttaattgaaagacaactgtacgagatggtgtccctgagaaaaaagcgccttaaaaagtttccctggtcactttgggtatggaccaccgacctaaagaaagcgggcacgaacagcccgatctttatccagatatatggtcagaagggtcgcactgacgagattctgctgaatcccaacaacaaatggtttaagcctgggattatcgaaaaattccggattgagttgccagaccttggaagattctacaaaatccgggtttggcatgacaagcggagctcgggctctggctggcaccttgagaggatgactctcatgaataccctaaacaaggataaatacaactttaattgtaatcgctggttggatgccaatgaagacgacaacgagatcgtgcgggagatgactgccgagggcccgaccgtgcggcggattatgggcatggcccgctaccatgtcactgtctgtactggtgaattggaaggtgcaggaactgacgcgaatgtatatctttgcctgtttggcgacgttggagataccggcgagcgcctcttgtataactgcaggaacaataccgatctctttgagaagggcaatgcagatgagttcactattgaatcggtaactatgcgaaacgtcagaagggtgagaatacgccacgatggtaagggatctggaagcgggtggtatttggacagggtcctggtgcgggaggaaggccagccggaatccgacaatgtggagttcccctgtctgagatggcttgacaaggacaaggatgatggacaactagtcagagaactgctgcctagcgattctagcgccacgctaaagaacttcagatatcacatttccctcaaaacaggcgatgtgagcggcgcttctaccgatagtcgtgtgtacatcaaactatacggcgataaatctgacacaatcaagcaagtcctgctcgtgtccgataacaaccttaaggactatttcgaacgcggcagagtcgatgagttcaccctggaaacccttaatattggcaatattaataggctggtgatcggacatgactccacaggcatgcacgcgtcttggttcctgggaagcgtacagatccgcgtaccacgccagggcaagcagtatactttccccgcgaaccgatggttagataagaaccaggctgatggccgtctcgaggttgagctgtacccgagtgaagtggtggagatccagaagctcgtccattacgaagtggagatctggactggtgacgtgggcggggctggtacttcagcgagagtttacatgcagatatacggagagaaggggaagacagaagttctctttctgtcgagcaggagtaaggttttcgagcgagcatccaaggacacttttcagctggaggctgccgatgttggcgaggtttataaattgcgcctcggacataccggggagggctttggcccatcctggttcgtcgacactgtgtggttgcgccatttagtcgtgcgggaggtagacctcacccctgaggaggaagcccggaaaaaaaaggagaaggacaagctccggcagttgctcaagaaggagagactcaaggccaaactgcagcgcaaaaagaaaaaaaggaaagggtctgatgaagaagatgaaggcgaggaggaagagtcttcctcctctgaagaatctagcagcgaggaggaggagatggaagaagaagaggaggaagaagaattcggccctggaatgcaggaggtcattgagcagcacaaattcgaagctcacaggtggctcgctcgcgggaaagaagataacgaactggtagtggagctggtgcccgcaggaaagccagggcccgagaggaacacttacgaggtgcaggtagtgacagggaacgtgccaaaggctgggaccgacgcaaacgtgtatttaactatttacggagaggaatacggcgatacgggcgagcggcccctgaaaaagagcgacaaatccaataagtttgaacagggacagaccgatacttttaccatctatgccatcgatctgggggctctgacaaaaattcggatacggcacgataatacaggaaacagagccggctggtttctcgaccgcatcgatattactgacatgaataacgagattacctactattttccatgccagcggtggctggccgtcgaagaagacgatggtcagcttagtagagagttgctgcccgtggatgagagttatgtgctgcctcagtccgaagaaggccggggtggaggggacaacaatccattggacaatctggctctcgagcagaaagacaagtctactaccttcagcgtgaccattaagacgggtgttaaaaagaacgctgggacagatgccaacgtgtttataacactgttcggaactcaagacgatacagggatgaccctcttaaaaagctccaagactaactcagataagttcgaacgcgattccattgagatattcaccgtggaaaccctagacctgggggacttgtggaaagtgagactgggccacgacaataccgggaaagcacccggttggtttgtagactgggtggaggtcgatgctccatctctgggtaaatgcatgacttttccttgtggtagatggcttgccaagaatgaggacgacggctcaattatccgggacctgttccatgccgagctgcagacgcgcctgtatactcccttcgtgccatatgagattaccctatacacaagtgacgtgttcgccgccggtaccgacgccaatatatttatcatcatttatggttgtgacgctgtgtgtacccaacaaaagtatctgtgtacaaataagagagaacagaaacaattctttgaaaggaaatcagcctcgcggtttattgttgaactggaagacgtgggcgaaatcattgaaaagatccggatcgggcataataacaccggtatgaacccgggctggcactgctcccacgtggacatcaggcgcctgctgccggataaagacggcgctgaaacattgacatttccatgtgatcgttggctggctacctctgaagacgataaaaaaaccatcagggaacttgtcccttacgacatcttcaccgaaaaatatatgaaagatggcagcctgcggcaagtctataaggaggtggaagagcccttggacattgtcttatatagtgttcagatcttcacagggaatatacctggggcggggactgatgcgaaagtttacattacaatttacggggacctaggggacactggtgagcgctatctgggcaagtccgaaaatagaacaaataagtttgagagagggaccgccgacacctttataattgaggcggcggacctgggtgtgatctacaagatcaaactaaggcatgataacagtaagtggtgcgctgactggtacgtggagaaggttgaaatctggaacgataccaacgaagatgagtttttattcctgtgtggccgctggctatctcttaaaaaggaggacggcaggttggagaggctattttatgaaaaggagtacacgggggacagaagctccaactgttcttcgccagctgacttttgggagatcgcactttcttcaaagatggcggatgtcgacatatctactgtcaccggccccatggctgactatgtacaggaggggcctattattccgtactacgtgagcgtgacgacaggaaaacataaagatgccgctactgacagccgtgcattcattttcctgattggtgaagatgatgaacgatcgaaacgcatttggttagattaccctaggggcaaacgaggttttagccgcgggtctgtggaggagttctacgtggccggactcgacgttgggatcatcaaaaagatcgaggttctgtacgaaatgaccgtttggaccggggacgtagttggaggtggcacagactctaatatatttatgactctgtatggcattaatggaagcacggaggagatgcagctcgacaagaagaaggcacgatttgaaagggagcaaaacgatacctttattatggagatactggatatcgcacctttcaccaagatgagaatccgaattgacgggctcggaagcaggcctgaatggtttctcgaaagaatcctgctgaaaaacatgaacacaggcgaccttactatgttctactatggcgactggctgagtcaaaggaaggggaagaagaccttagtctgcgagatgtgcgcggtaatcgacgaggaagagatgatggagtggacctcttacactgtggccgttaagacttcagatatcctcggcgcagggaccgacgcaaatgtgttcataataatcttcggagagaacggagatagtggtacactggcactcaaacaaagcgctaactggaataaattcgagcgtaacaatacagatacttttaattttcctgacatgttgtctctgggccacctttgcaaacttcgtgtgtggcatgacaataaaggaatatttcccggatggcatcttagctacgtggatgtgaaagataactcgcgagatgaaactttccactttcagtgtgactgttggctgagcaaatctgaaggcgacgggcaaactgtccgtgactttgcctgcgccaataataaaatctgcgacgaactggaggagaccacctacgagatcgttattgagaccgggaacggtggtgaaacgcgagaaaacgtgtggctaattctggagggcaggaagaatagatccaaggagttcctcatggagaactccagtagacaaagagctttccgaaagggcaccactgatactttcgaattcgacagtatttacctgggcgacatagcgtcactgtgtgtcggccatctggcacgagaggacaggtttatcccaaaacgagagttagcctggcacgtgaagaccataaccatcacagaaatggagtacgggaacgtgtacttttttaactgtgattgcctgatacccctaaagagaaaacgcaaatatttcaaagtgtttgaagtgactaagacaactgagtcatttgcctctaaggtccaatccctggtcccagtcaagtacgaagtgatcgtgactacaggatatgagcccggggccggcaccgatgcaaatgtcttcgtaacgatcttcggcgctaacggtgacactgggaagcgcgagcttaagcagaaaatgcggaatctgttcgaacggggaagtacggaccgcttctttctggaaacgttagagctcggcgaactgcggaaggtgcgcctcgagcacgattcttctggttattgctctggctggctggtcgaaaaggtggaggtgacaaacactagcaccggcgtcgccaccatctttaactgcgggaggtggcttgataaaaaacggggggatggattgacgtggcgggatctgtttccctcggtctag

SEQ ID NO: 239108 - DNA, 2751 bp, Artificial Sequence
  derived and/or modified sequence
atgcagcggcccgtggtgaagctgtacgccaccgacggccggcgggtcccgagcctccaagccgtaatcctgtcctcaggcgcggtcgtggcagccggaagagaacctttcaagccagggaactacgatatccaaaaatacctgctgcctgccaggttgccagggatcagtcaaagggtatacccaaaaggaaatgcaaaaagcgagtctcggaagagcagtaactggaaggtattcatcatcactagtgacctgcccgacgcagggacaagcagccagatctacatcatcctgtatggtcagcatcgatccagcgcgccaatttacctgtatgggactgatggcgccaggtttcaggtcgggcacgaagacatttttacaatcactgtgggcgatattggtgccctgttcaagatacgtattgggcacactaactccgggtcaagtccaagctggcattgtaaagagatccagttgcataacatgaatagtggtaagcagttctacgtgccagtacagagatggttagcaagagaccaagaggatggcgagatctgcagagaattcccactcctgagcaaaggccaacccgtcttacctgtgaccatttatgaagtaaatgtcgctaccggggagctctggaacgccggcaccgtggccaatgtgtatatatccattcacggagagaagggcgataccggttcaagacaactgttcagatctaagagcagcttcaactttcttcgtggccagaccgatacattcttcttggaagcggtacatttgggtgatctctgcaaaatcgtcatcggccatgacgggttgggccctggtaacggttggtttctcgatgatgtggtgatcaaagaccccacaaccaattacgaatacgcctttttctgtcaccgatggctggaccagggggaggatgactgcaaaattgtacgagaactgtatgccagagataactcaatcttctcagcccgtcagaagctggaactgaagcggaaagagacctggaccgccgaatcatggaaattcacaaagggaaacacgttacagttttataacaagcttactggcggattcgtgagactgcatcctgatggaacagtggacgctattggtgaaaaaaccgataaatatggcgtctttgacgtgatatttaataaaagaaatatttgtatctttcagtcacatgagatgagacacctgtcgctggctcttgacaacggaattgttactggaatggtgtctggagaagcaacaaccgaactacgcgtactttaccagccgaaccgctgtgctttactggaatctgccctcgtgccggggcacacagttgtcttcgacagacacggcaaaatagccgacgctagctccgccgggtatgcaaacctttccaaggaatttgttatcttcgttaagggggtctttttaaattcagccgtggtcttactggccacaagcctatgccaggctttgtgcctccaacccgatggatcttgcacaggagtcggctcccagagcgagaaatcatattggaaggtacacaagattagcagcggaatatgtatgttcgaaagcgtgaagaatgcccaaatgtacctaaggattaaggatggtagatgcgacggaaccggaaccggggatgtggattgtcacttcaagataaagaagaatctcaagaacgctagtattagcctggagagcacaaagtccccgggattgtttgtagggctgcagagcgacgggcaggcgaaaccgatgatatatacgaaggacgagaacgtttgcttttacccccaggttattcagtttggccgggagaatccaatgggaatgagcgcgacaccctcccaagaagaagagaaaatacatgagagcaaaaaacaaaagaagatccctccggagagtgaggcccggtctcctctgccttcctctactgcaaaggagatccggcatttccagagcagcgaaactttactgtccgaagatgagtggaaggtgttggtgcttactggaaatacaggaactcaagctaacgtgacactgtgggtatacggcgacaagggagtaacgggacctatctcactacggaaagactcctctgagcaactcttcctgcctggccacgaggacgaatttcaggtggaaatcaggaatactggaaatatatacaaaattcggatcggacatgacggtacctctgaacagcccgagtggaatctgcagagagttactatgcaacacatgaaatctaaaaagatcctggattttgccgcgaatgtctggttgtcccgcatccaggccgatggcgacgtcgtctgcgagctcccggtggtaaaaggtggccaggctatcttcccactggtcaggtatcaggtggatgtctatactggacagctaaaacacgcggagaccgagtccgaagtgtttctgtgcctgttcggagagagaggcgattcagggctgcggcaactgtacaaatccaacatgcaggtgaaattccagagaggccagatcgacaaatttcaggtggccgctgtgagccttggcaaactccaaaaggtactgctgagatgcgaggctagtgataagagccagtattggtattgcgagcaggtgatagttcgggagcctggtactacatcggagtctatcttcacatgtcagagatggctgcccttcatgagccaaggcattatccatagcgagattgaactgtacctgcaaggcgaggattattag

SEQ ID NO: 239109 - DNA, 4602 bp, Artificial Sequence
  derived and/or modified sequence
atgatgcagcttactctcaatactttattccctgtcgtctcaactccagccatcacctacattgtgaccgttttcaccggtgacgttcgcggtgccggaaccaaaagcaaaatataccttgtaatgtatggcgctcggggaaacaagaactccggcaagatatttctcgagggtggcgtatttgatcgcggaagaactgacatttttcatattgaattggccgttcttctgtcccctttgtctcgcgtgtctgtcggccatgggaacgtcggcgtcaaccggggttggttttgcgaaaaggtggtcattctgtgtccgtttacgggcattcaacagacatttccttgctccaattggctcgatgaaaagaaagcggacggactcattgagcgacagctgtacgaaatggtttctcttcgtaagaaacgcctgaaaaagttcccctggtccctgtgggtgtggaccactgaccttaagaaggctggtactaattccccaatattcatccaaatctacggtcagaaaggcagaaccgatgagatattgctcaatccaaataacaagtggttcaagcccggtatcatcgagaaattccgaattgagctccccgatctgggcagattctataaaattcgcgtctggcacgataagcggtcaagcggcagtgggtggcaccttgagaggatgacactgatgaacactctgaataaggacaaatataacttcaactgcaaccgctggctggatgcaaacgaggacgataatgagattgtcagggaaatgaccgctgagggccctaccgtgagaaggatcatgggaatggcacgctatcacgttacggtttgtaccggtgaactcgaaggcgcaggcaccgatgctaacgtctacctgtgccttttcggcgacgtcggggacaccggagaaaggctcctgtacaactgcaggaataacactgacctcttcgaaaaagggaatgccgatgagtttacaatcgagtccgtcaccatgcgcaatgtgcgtcgagtacgtatccgacacgacgggaagggttctgggtctggttggtacctcgatcgcgttctggtgagagaggaagggcagcccgagtccgacaatgtggagtttccgtgcttgaggtggctggacaaggacaaggatgatgggcaactggtgcgggaacttctgccttcggatagtagcgccaccctgaaaaactttcgatatcatatcagtctgaagaccggtgacgttagcggagcctcgaccgatagccgcgtctatatcaagctgtacggggataaatcagacaccatcaagcaagtgctcctcgttagcgataacaacctgaaggactatttcgagaggggtcgggttgacgagttcaccctggagacacttaatatcgggaacatcaacaggctggtcatcggtcatgactcaacaggcatgcacgcttcgtggttcctggggtccgtccagattcgggtaccaagacaaggaaaacagtacacatttccagccaatcgatggctcgacaagaatcaggccgacggcagattagaggtggaactatacccctctgaggtggtggagattcagaagctcgttcattacgaggtggagatctggacaggagatgtgggtggcgctggtacaagcgccagggtgtacatgcagatttacggtgagaaggggaagaccgaggtgctattccttagttcccggagcaaggtgtttgagcgcgcatcaaaggacacatttcaactggaggcggctgacgtaggggaagtgtacaagctacgcctggggcacacaggtgagggcttcggcccaagctggttcgttgataccgtctggttgcggcatctggtagttcgtgaagtggatttgacccctgaagaggaggccagaaagaaaaaagaaaaagacaagctcagacagctccttaagaaagagcggctgaaagctaaactccaaagaaagaaaaaaaagcgcaaaggttcagatgaggaagacgagggagaggaggaggaatcctctagtagtgaagagagctcttctgaagaggaagaaatggaggaggaagaagaggaggaagagttcggccctggaatgcaggaagttattgagcagcataaattcgaggcccataggtggctagctagggggaaggaggacaatgagttggtggtcgaactggtacccgctggaaaaccaggcccagagcggaacacgtacgaggtacaagtggtcaccggcaacgtgccaaaggctggaacggacgcaaacgtgtatctgacaatttacggcgaagagtatggggacacaggggagcgcccactgaaaaagagcgacaaatcaaataagtttgaacagggacagactgacacgttcaccatttacgctatcgatctgggcgcactgaccaagattcggatccgacatgacaataccggtaaccgtgccggatggttcctagaccgaatcgatatcactgacatgaacaacgaaatcacttattacttcccatgccagcgatggctagcagtggaggaagatgacgggcagctgtcgcgagaactccttccggtggatgagagctatgtgctcccccaaagcgaagaaggcaggggaggcggtgacaacaaccccctcgataatcttgctctggagcaaaaggataagagcacgacattttccgtgactataaaaacgggtgtgaagaagaacgctggcacggatgctaatgtgttcatcactctgttcggcacacaagatgacacaggcatgaccctgctaaaatcttccaagacaaatagcgacaaattcgaaagagactccattgagatattcactgtggaaaccctggatctgggagacctctggaaagtacgtctgggacacgacaacactggcaaggcacctggctggttcgttgactgggtggaagttgatgccccttcgctgggtaaatgtatgaccttcccctgtggtcgatggcttgccaagaacgaggacgatgggagcataattcgtgatctcttccatgccgagctgcagacccgtctctacacaccctttgtcccgtatgagatcacgctgtacacctcagacgtgtttgccgcagggactgatgctaatatttttatcatcatttatggttgtgatgctgtgtgcacgcagcagaagtacctttgcacaaataagagggagcaaaaacagttcttcgagaggaaatctgcatcccgattcatcgtcgagctggaggacgtcggcgagattatagagaagatcagaatcggacacaataatactggaatgaaccctgggtggcattgcagccatgtagatatcagaaggctgctcccggacaaggatggtgctgagaccctcacttttccgtgtgatagatggctggccacctccgaagacgataaaaagactatccgggaactggtaccttacgatatctttacggagaaatacatgaaggatggatcactcaggcaagtatacaaagaggtggaggaaccacttgatattgtcttgtattccgtccagatctttacagggaacatccctggcgctggaaccgatgctaaggtgtacataacgatttatggggatctcggagatacaggagaaagatatctggggaaaagtgagaacagaaccaacaaattcgagcgcggaaccgcagatacctttatcatcgaggcagcggatttaggagtgatctataaaattaagctacggcatgacaactccaaatggtgcgccgactggtacgttgagaaggtggagatctggaacgacacgaatgaggatgagttcctgttcctgtgtgggaggtggctgagcctgaagaaagaagacggtaggctggaacgcctcttttacgaaaaggagtatactggcgatcggtcttccaactgtagctcaccagcagatttttgggagatagctctgtcttctaagatggctgatgtggacatcagcaccgtgactgggccaatggctgattacgtgcaagaaggacccatcattccctactacgtttctgtgactacagggaagcacaaagacgcagcaacagattcacgggcttttatattcttaattggggaggatgatgagagatctaagcgcatttggctggattaccccagaggaaagcgagggttcagccggggatccgttgaagagttctacgtagctggcttagacgtaggcatcatcaaaaaaatcgaagtgctgtatgagatgaccgtctggacaggcgatgtcgtggggggtggaactgactcaaacatcttcatgactctatatggcatcaacgggtcaacagaagagatgcagctggataaaaagaaggccagattcgaacgcgagcagaatgacacattcatcatggagatcctggacattgccccattcactaaaatgcgaattcggattgatggtttaggaagcaggcccgagtggtttctggagcgagtcaaatgcctcgatccgcactcctcattccagccacctcccactccctctccagggtcctcgggactgtcaatggacctggttaaggcacagatgagtttgtag

SEQ ID NO: 239110 - DNA, 6635 bp, Artificial Sequence
  derived and/or modified sequence
atgatgccccaaaagaaacgtcgacggaaaaaggacatagacttcctcgctctttatgaagccgagttgttaaactacgcatcagaggatgacgaaggtgagctggagcacgagtattacaaagctcgagtgtatgaggtcgtgaccgcaactggcgacgtgcggggagcgggaacggatgcaaacgtgtttattaccctgtttggggagaatgggctttcacctaagctccaactaactagtaagagtaagtctgcattcgaaaaaggaaacgttgacgtgttcagggtgagaacaaacaacgtgggcctcatatataaggtgcggattgaacatgacaacaccggcctcaatgcttcctggtacctggatcacgtcatcgtcaccgacatgaaacgaccccacctgagatattactttaattgcaacaactggttatcaaaagtcgagggcgatagacaatggtgtagggatctgttggcttcctttaacccaatggatatgccccgaggcaacaaatatgaagtgaaagtatacaccggcgatgtcatcggcgctggaactgacgccgacgtatttatcaacatatttggtgagtacggcgacacaggggagagacgccttgaaaacgagaaagataatttcgagaagggagcagaagaccgcttcattctggacgctccagatctggggcagcttatgaagattaacgtggggcataacaacaaagggggttccgccggttggtttctcagccaaatcgtgattgaggatatcggcaacaagcgaaagtatgacttcccgctgaataggtggctggccttggatgaagacgacggtaagatccaacgggacatactcgtaggcggtgctgagacaacggccattacgtatattgttacagtctttaccggtgacgtacgcggagctggcacaaagagcaaaatctatctggtaatgtatggcgctcgcggaaataagaacagcggtaaaatcttcctcgaagggggagtttttgatcgagggcgtacggatatttttcacattgagcttgccgtcctcctcagccccctatcccgcgtcagcgttggacatggcaacgttggcgtaaacagagggtggttctgcgaaaaagtggtcattctctgcccttttacgggcatccagcaaacttttccatgtagcaattggctcgatgaaaagaaggctgatggattaatcgagcgccagttgtacgagatggtttcactgagaaaaaagcgattaaaaaaattcccatggtccctgtgggtgtggaccaccgacctgaagaaagcaggaacgaatagtcccatattcatacagatatacgggcaaaagggaaggacagatgagatcctgctgaacccaaataacaagtggtttaaaccaggtataatcgagaagtttcgcatcgaactgccggatctcggacgattctataaaatccgcgtctggcatgataaaagatcatcggggtctgggtggcatctcgagcggatgactctaatgaacaccctgaacaaggataaatacaactttaactgtaatcgatggttagacgcaaatgaagatgacaatgaaatcgttcgtgagatgaccgcagagggccctactgttagaaggatcatgggaatggcacgttatcacgtgactgtgtgcacaggagaactcgagggcgctggcaccgacgcgaacgtgtacctgtgtctattcggggatgtgggtgatacaggggaaagactcttgtacaattgccggaataataccgacctcttcgagaaagggaatgccgacgagtttaccatcgaatcagttaccatgcgaaatgttcggagggttagaattaggcatgacggtaaaggctcaggatcggggtggtacctcgatcgtgttctggtgagggaggaaggacagcccgagtctgacaatgttgaattcccctgtctgcggtggctggataaagataaggacgatggccagctcgtcagagagctgcttcccagcgattcctctgccactctcaagaatttccgctaccacatatccctcaaaaccggcgatgtgtccggcgcttcaaccgattccagggtgtatataaagttgtacggcgacaaatcagacactatcaaacaggttctgctggtatccgacaataatctaaaggactatttcgaaagaggtcgcgtggacgagtttacgcttgagaccttgaatataggtaacattaataggctggtaataggtcatgattccaccggcatgcacgcaagctggttcttgggttccgtacaaatcagggtgcctcgccagggcaagcaatacacctttcctgcaaaccgctggcttgacaaaaaccaggctgatggccgactagaggtggagctttatccttccgaggtggtagagatacagaaactggtgcactacgaagtcgagatttggaccggggacgtgggcggagccggaaccagcgccagagtctacatgcagatctacggcgaaaaggggaaaaccgaggtgctatttctgtcttcccggtcgaaggtcttcgaacgggctagtaaagacacctttcagcttgaggcggctgacgttggtgaggtgtacaaactgcggctaggtcacacaggcgaaggattcggcccttcttggtttgtggataccgtctggctgcgccacctcgtggttcgcgaggtagaccttacccccgaggaggaggcgcgtaagaagaaggaaaaagataagcttcgccagcttctcaagaaggagcgcctgaaggcgaagctccagcgaaaaaaaaaaaagagaaaaggctcagacgaagaggacgagggcgaggaagaagaaagttcaagtagcgaggaatcctcctccgaagaagaggagatggaagaggaagaggaagaagaagagttcgggccaggcatgcaggaggtgatagagcagcataagttcgaagcgcaccgatggctggcgagagggaaagaggataatgagctcgttgttgaactcgttcctgctggtaagccagggcctgagcggaatacctacgaagtgcaggtggtgacaggaaatgtgcccaaggcaggcacagatgcgaacgtgtacctgaccatctatggtgaggaatacggcgacacaggggagcgccctttgaagaagtctgacaaatcgaacaaattcgaacagggccagacggacacattcaccatctatgctatcgacctcggtgccctcaccaaaatacgtatccgccacgataacaccggtaatagggccggatggtttttggacaggattgatatcaccgacatgaacaacgagatcacctattacttcccttgtcaacggtggctagccgtagaagaggacgacgggcagttgtctagggaacttctaccggtggacgagtcttatgttttaccgcagtccgaggaggggagaggcggtggggacaacaacccactcgataacctggcactggagcaaaaagacaagagtactacgttcagcgtgaccattaagaccggggtcaagaaaaatgccggtacagatgccaatgtattcattacgctcttcgggacccaggatgacacaggtatgacacttcttaaatccagtaagaccaatagcgataagttcgaacgggactcgattgagattttcactgtagaaacacttgaccttggcgacttgtggaaggtgagactcggccacgacaatacaggaaaggcacccggttggttcgtagattgggtagaggtcgatgctccatcactcggcaaatgcatgacctttccatgcggcaggtggttggcgaaaaatgaagatgatgggtccatcatccgggatctgtttcacgctgagctgcaaacgcgcctgtacacccctttcgtgccctacgaaatcaccctctacacttctgacgtttttgctgccggaacggatgctaacatcttcatcatcatatatggatgcgatgcggtttgtactcagcaaaaatacctgtgcactaacaaacgcgaacaaaagcagttctttgagaggaagagcgcctccagattcattgtcgagcttgaggacgtgggggagatcatcgaaaagattcgaatcggacataacaacactggcatgaatcctggatggcattgcagccacgtggatatccggagactactccccgataaggatggcgctgagacactgacttttccctgcgatagatggttggccacttcggaggacgacaagaagaccattagagaactggtgccatatgacattttcacagagaaatacatgaaggacgggtcactccggcaggtgtacaaggaggtggaagaacccttggacattgttctgtatagcgtccagatatttaccggcaacataccaggtgccggaaccgacgctaaggtttacattaccatttacggagatctgggagacacaggagagcgatatctaggtaagagcgaaaaccgcacaaacaagttcgaaagggggacagctgacactttcatcattgaggccgcagaccttggggtgatttacaaaatcaaactccggcatgacaattccaaatggtgtgccgactggtatgtggagaaagttgaaatttggaacgataccaatgaggacgagttcctgttcttgtgcggtcgttggctctcgttaaaaaaggaggacggtagactggagcggctattctatgaaaaggaatataccggcgaccggtcctctaattgtagttcacccgcagacttttgggagatcgccctttctagtaaaatggccgacgtggacatttcgacagtgactgggccaatggccgattacgtgcaggagggccctatcatcccttactatgtgtccgtcacaaccggaaaacataaagacgctgcgaccgactcccgcgctttcatttttcttattggagaagatgatgaacggtctaagaggatctggcttgactacccgcgtgggaagcggggattctcccgaggaagcgtggaggagttttatgtggcgggtttggatgtggggatcatcaagaagattgaagtgttgtacgagatgacagtgtggactggcgacgtcgtaggaggcggtactgactctaacatcttcatgacgctgtacggaatcaacggcagcaccgaagagatgcaactagacaaaaagaaagctagatttgaaagagaacagaacgatacctttattatggagattctcgacatcgcgcctttcactaaaatgagaatcaggatcgacggactcggctcccgccctgaatggttcctggaacgcatattgctgaaaaatatgaacaccggcgatctgactatgttttattatggcgattggctcagccagagaaagggaaaaaagacactggtctgcgaaatgtgcgctgtgatcgatgaagaggagatgatggagtggactagttataccgtggcagtgaaaactagtgatatcctgggggctgggactgacgccaatgtgtttatcattattttcggcgaaaacggcgacagcggaaccctagcccttaaacaatcagcaaattggaataagtttgagaggaacaataccgatacattcaacttcccggacatgctgtccctgggtcatttgtgcaagctgagggtctggcacgacaataagggaattttccccggatggcatttatcatacgtggacgtcaaagataactctcgtgatgagactttccattttcagtgtgactgttggctgtccaaaagtgagggtgatggacagacagtgcgggacttcgcatgcgcgaataacaagatttgcgacgaactagaggagacgacctacgagatcgtgattgaaaccggaaacggtggagagacacgagagaacgtatggttgattttggagggtagaaagaaccgatccaaggaattcctcatggagaattcttccagacaaagagccttccgaaagggaacaactgatacattcgagtttgatagcatatacctgggcgacattgcgagcctctgcgtgggtcacttggccagggaggatcggtttattcctaagcgagaactggcctggcacgtgaagactatcactatcacagaaatggagtacggaaatgtttacttctttaactgcgactgcctcatccctctcaaaaggaaacggaaatacttcaaagtctttgaggtgaccaaaactacagagtccttcgcttcaaaagtccaatctctggtcccggtgaagtatgaagttattgtcactacaggttatgaacctggggctggaactgatgccaacgtcttcgtcaccatcttcggtgcaaacggggacacagggaagagggagctgaaacagaagatgcggaatctcttcgagaggggcagcaccgatcggttctttctggaaaccctggaactaggcgaacttagaaaggtgaggctcgagcacgacagctctgggtactgctccgggtggcttgtagagaaagtggaggtcaccaatacatctactggcgttgcgactattttcaattgtgggagatggctggataagaagcggggagatggcctaacatggcgggatctctttccctccgtgta

SEQ ID NO: 239111 - DNA, 2751 bp, Artificial Sequence
  derived and/or modified sequence
atgcagcgacctgtggtaaaattgtatgctaccgacggtcgcagagtcccttctctccaggctgtgatcctgtcctctggcgctgtcgtcgcggctggtcgggaaccattcaaaccgggaaactacgacatccagaagtatctattgcccgcacgcctgcccggtatcagccagagagtgtatcccaaaggcaatgctaagtcagaaagccgtaaatcctctaactggaaagtttttattattacaagcgatctgccggatgccggaacatcaagtcaaatctatatcatcctctatggccaacatagatccagcgcgccaatctacctgtacgggacagatggagcccgattccaagtcggacatgaggatatattcacaattacagtcggagatatcggggctttgttcaaaatccgaatcggacacacaaactcaggctctagccccagctggcattgcaaggagattcaactgcacaacatgaatagcggcaagcagttttatgttcccgtgcagcggtggctggcgagggatcaggaggacggcgagatttgtagagagtttcctttgctgagcaagggccagccagtgctgccggtcaccatctacgaggttaacgtggccaccggagaactttggaacgcaggaaccgtcgcaaacgtgtatatctcaattcatggcgagaagggtgatacaggttcaagacagctgttcagaagtaagtccagcttcaactttttgagagggcaaaccgatacattttttttggaagcggtgcacttgggcgacctctgtaaaattgtgatcggacacgatggcctgggaccaggaaatgggtggtttctggatgatgtggtcattaaggacccgaccaccaactacgagtatgccttcttctgtcataggtggctggatcagggagaagatgattgcaagatcgttagagaactctatgcacgggataactccatcttttccgccaggcagaaattagagctgaagcggaaagagacgtggacggccgagtcatggaaattcaccaagggcaatacactgcaattctataataagctgaccgggggattcgtgcggctacatccagatgggacggtggatgccattggagagaagacggataagtacggcgtgtttgatgtcatcttcaataaaaggaatatttgcatcttccagtcccacgagatgcgtcacctgagtctagcactggacaatggcattgtgacgggaatggtctccggtgaagctactacggaattgagggtgctttatcaaccaaaccggtgtgctctgctggagagtgcactggtgcctggccacactgtcgtgttcgacagacacgggaagatcgctgatgcttccagcgccggatatgcaaatttgtcaaaggagtttgtgatatttgtgaagggcgtttttctcaactcggcagtcgtgctccttgccacctccctgtgtcaggcgctgtgtttgcagcccgacggaagctgcacaggtgtcggtagtcaatcagagaaaagttactggaaggtgcacaagatcagtagcgggatctgcatgttcgaaagtgtcaaaaacgcacaaatgtatctgaggataaaagacggacgttgcgacggcaccgggaccggagacgtcgactgtcactttaagattaaaaagaacctcaagaatgcatctatctccttggagagtaccaaaagccccggtttgtttgtcggattacaatccgatggccaggcgaagcccatgatctataccaaggatgagaatgtgtgtttctatcctcaggtcatccagtttggcagagagaaccctatgggcatgtccgcaactcccagtcaggaagaagagaagatccacgagagcaagaagcagaagaagatccctcccgagagcgaagcgagatctccacttccttcctctacagctaaagagattcgccactttcagagcagcgaaaccctcctgagtgaagacgagtggaaagttctggttctgaccggaaatacaggaacccaggccaatgtgactctctgggtgtacggagataaaggagtgacaggccctatttcacttcggaaagactcctcagagcagcttttccttcccggacacgaagacgagttccaagtagagatcaggaacacaggcaacatttataagatcaggatcgggcatgacgggacaagcgagcagcctgaatggaatctccagcgcgttactatgcagcatatgaaatccaaaaagattctggactttgccgctaatgtttggctctcgcgaatacaagcggatggtgatgtggtgtgtgagctacctgtcgtgaagggcggacaggccatcttccccctagtaagatatcaggtggacgtgtacactggccagctcaaacatgcggaaaccgagagcgaggtcttcctttgcctattcggtgaacggggagactcgggactcaggcagctgtacaagtccaatatgcaggttaaatttcagcgcggacagatcgataaattccaggttgcagctgtcagtctgggcaaattacagaaggtgctcctgcgatgtgaggcctccgacaagtcccaatattggtattgtgagcaggtgatcgtgagagagccgggtactacatctgaaagcatctttacttgccagcggtggttaccgtttatgagccaggggatcattcacagcgagatcgaactgtacctgcaaggggaagactattag

SEQ ID NO: 239112 - DNA, 4602 bp, Artificial Sequence
  derived and/or modified sequence
atgatgcagctgaccctgaacaccctgttccccgtggtgagcacccccgccatcacctacatcgtgaccgtgttcaccggcgacgtgagaggcgccggcaccaagagcaagatctacctggtgatgtacggcgccagaggcaacaagaacagcggcaagatcttcctggagggcggcgtgttcgacagaggcagaaccgacatcttccacatcgagctggccgtgctgctgagccccctgagcagagtgagcgtgggccacggcaacgtgggcgtgaacagaggctggttctgcgagaaggtggtgatcctgtgccccttcaccggcatccagcagaccttcccctgcagcaactggctggacgagaagaaggccgacggcctgatcgagagacagctgtacgagatggtgagcctgagaaagaagagactgaagaagttcccctggagcctgtgggtgtggaccaccgacctgaagaaggccggcaccaacagccccatcttcatccagatctacggccagaagggcagaaccgacgagatcctgctgaaccccaacaacaagtggttcaagcccggcatcatcgagaagttcagaatcgagctgcccgacctgggcagattctacaagatcagagtgtggcacgacaagagaagcagcggcagcggctggcacctggagagaatgaccctgatgaacaccctgaacaaggacaagtacaacttcaactgcaacagatggctggacgccaacgaggacgacaacgagatcgtgagagagatgaccgccgagggccccaccgtgagaagaatcatgggcatggccagataccacgtgaccgtgtgcaccggcgagctggagggcgccggcaccgacgccaacgtgtacctgtgcctgttcggcgacgtgggcgacaccggcgagagactgctgtacaactgcagaaacaacaccgacctgttcgagaagggcaacgccgacgagttcaccatcgagagcgtgaccatgagaaacgtgagaagagtgagaatcagacacgacggcaagggcagcggcagcggctggtacctggacagagtgctggtgagagaggagggccagcccgagagcgacaacgtggagttcccctgcctgagatggctggacaaggacaaggacgacggccagctggtgagagagctgctgcccagcgacagcagcgccaccctgaagaacttcagataccacatcagcctgaagaccggcgacgtgagcggcgccagcaccgacagcagagtgtacatcaagctgtacggcgacaagagcgacaccatcaagcaggtgctgctggtgagcgacaacaacctgaaggactacttcgagagaggcagagtggacgagttcaccctggagaccctgaacatcggcaacatcaacagactggtgatcggccacgacagcaccggcatgcacgccagctggttcctgggcagcgtgcagatcagagtgcccagacagggcaagcagtacaccttccccgccaacagatggctggacaagaaccaggccgacggcagactggaggtggagctgtaccccagcgaggtggtggagatccagaagctggtgcactacgaggtggagatctggaccggcgacgtgggcggcgccggcaccagcgccagagtgtacatgcagatctacggcgagaagggcaagaccgaggtgctgttcctgagcagcagaagcaaggtgttcgagagagccagcaaggacaccttccagctggaggccgccgacgtgggcgaggtgtacaagctgagactgggccacaccggcgagggcttcggccccagctggttcgtggacaccgtgtggctgagacacctggtggtgagagaggtggacctgacccccgaggaggaggccagaaagaagaaggagaaggacaagctgagacagctgctgaagaaggagagactgaaggccaagctgcagagaaagaagaagaagagaaagggcagcgacgaggaggacgagggcgaggaggaggagagcagcagcagcgaggagagcagcagcgaggaggaggagatggaggaggaggaggaggaggaggagttcggccccggcatgcaggaggtgatcgagcagcacaagttcgaggcccacagatggctggccagaggcaaggaggacaacgagctggtggtggagctggtgcccgccggcaagcccggccccgagagaaacacctacgaggtgcaggtggtgaccggcaacgtgcccaaggccggcaccgacgccaacgtgtacctgaccatctacggcgaggagtacggcgacaccggcgagagacccctgaagaagagcgacaagagcaacaagttcgagcagggccagaccgacaccttcaccatctacgccatcgacctgggcgccctgaccaagatcagaatcagacacgacaacaccggcaacagagccggctggttcctggacagaatcgacatcaccgacatgaacaacgagatcacctactacttcccctgccagagatggctggccgtggaggaggacgacggccagctgagcagagagctgctgcccgtggacgagagctacgtgctgccccagagcgaggagggcagaggcggcggcgacaacaaccccctggacaacctggccctggagcagaaggacaagagcaccaccttcagcgtgaccatcaagaccggcgtgaagaagaacgccggcaccgacgccaacgtgttcatcaccctgttcggcacccaggacgacaccggcatgaccctgctgaagagcagcaagaccaacagcgacaagttcgagagagacagcatcgagatcttcaccgtggagaccctggacctgggcgacctgtggaaggtgagactgggccacgacaacaccggcaaggcccccggctggttcgtggactgggtggaggtggacgcccccagcctgggcaagtgcatgaccttcccctgcggcagatggctggccaagaacgaggacgacggcagcatcatcagagacctgttccacgccgagctgcagaccagactgtacacccccttcgtgccctacgagatcaccctgtacaccagcgacgtgttcgccgccggcaccgacgccaacatcttcatcatcatctacggctgcgacgccgtgtgcacccagcagaagtacctgtgcaccaacaagagagagcagaagcagttcttcgagagaaagagcgccagcagattcatcgtggagctggaggacgtgggcgagatcatcgagaagatcagaatcggccacaacaacaccggcatgaaccccggctggcactgcagccacgtggacatcagaagactgctgcccgacaaggacggcgccgagaccctgaccttcccctgcgacagatggctggccaccagcgaggacgacaagaagaccatcagagagctggtgccctacgacatcttcaccgagaagtacatgaaggacggcagcctgagacaggtgtacaaggaggtggaggagcccctggacatcgtgctgtacagcgtgcagatcttcaccggcaacatccccggcgccggcaccgacgccaaggtgtacatcaccatctacggcgacctgggcgacaccggcgagagatacctgggcaagagcgagaacagaaccaacaagttcgagagaggcaccgccgacaccttcatcatcgaggccgccgacctgggcgtgatctacaagatcaagctgagacacgacaacagcaagtggtgcgccgactggtacgtggagaaggtggagatctggaacgacaccaacgaggacgagttcctgttcctgtgcggcagatggctgagcctgaagaaggaggacggcagactggagagactgttctacgagaaggagtacaccggcgacagaagcagcaactgcagcagccccgccgacttctgggagatcgccctgagcagcaagatggccgacgtggacatcagcaccgtgaccggccccatggccgactacgtgcaggagggccccatcatcccctactacgtgagcgtgaccaccggcaagcacaaggacgccgccaccgacagcagagccttcatcttcctgatcggcgaggacgacgagagaagcaagagaatctggctggactaccccagaggcaagagaggcttcagcagaggcagcgtggaggagttctacgtggccggcctggacgtgggcatcatcaagaagatcgaggtgctgtacgagatgaccgtgtggaccggcgacgtggtgggcggcggcaccgacagcaacatcttcatgaccctgtacggcatcaacggcagcaccgaggagatgcagctggacaagaagaaggccagattcgagagagagcagaacgacaccttcatcatggagatcctggacatcgcccccttcaccaagatgagaatcagaatcgacggcctgggcagcagacccgagtggttcctggagagagtgaagtgcctggacccccacagcagcttccagcccccccccacccccagccccggcagcagcggcctgagcatggacctggtgaaggcccagatgagcctgtag

SEQ ID NO: 239113 - DNA, 6636 bp, Artificial Sequence
  derived and/or modified sequence
atgatgccccagaagaagagaagaagaaagaaggacatcgacttcctggccctgtacgaggccgagctgctgaactacgccagcgaggacgacgagggcgagctggagcacgagtactacaaggccagagtgtacgaggtggtgaccgccaccggcgacgtgagaggcgccggcaccgacgccaacgtgttcatcaccctgttcggcgagaacggcctgagccccaagctgcagctgaccagcaagagcaagagcgccttcgagaagggcaacgtggacgtgttcagagtgagaaccaacaacgtgggcctgatctacaaggtgagaatcgagcacgacaacaccggcctgaacgccagctggtacctggaccacgtgatcgtgaccgacatgaagagaccccacctgagatactacttcaactgcaacaactggctgagcaaggtggagggcgacagacagtggtgcagagacctgctggccagcttcaaccccatggacatgcccagaggcaacaagtacgaggtgaaggtgtacaccggcgacgtgatcggcgccggcaccgacgccgacgtgttcatcaacatcttcggcgagtacggcgacaccggcgagagaagactggagaacgagaaggacaacttcgagaagggcgccgaggacagattcatcctggacgcccccgacctgggccagctgatgaagatcaacgtgggccacaacaacaagggcggcagcgccggctggttcctgagccagatcgtgatcgaggacatcggcaacaagagaaagtacgacttccccctgaacagatggctggccctggacgaggacgacggcaagatccagagagacatcctggtgggcggcgccgagaccaccgccatcacctacatcgtgaccgtgttcaccggcgacgtgagaggcgccggcaccaagagcaagatctacctggtgatgtacggcgccagaggcaacaagaacagcggcaagatcttcctggagggcggcgtgttcgacagaggcagaaccgacatcttccacatcgagctggccgtgctgctgagccccctgagcagagtgagcgtgggccacggcaacgtgggcgtgaacagaggctggttctgcgagaaggtggtgatcctgtgccccttcaccggcatccagcagaccttcccctgcagcaactggctggacgagaagaaggccgacggcctgatcgagagacagctgtacgagatggtgagcctgagaaagaagagactgaagaagttcccctggagcctgtgggtgtggaccaccgacctgaagaaggccggcaccaacagccccatcttcatccagatctacggccagaagggcagaaccgacgagatcctgctgaaccccaacaacaagtggttcaagcccggcatcatcgagaagttcagaatcgagctgcccgacctgggcagattctacaagatcagagtgtggcacgacaagagaagcagcggcagcggctggcacctggagagaatgaccctgatgaacaccctgaacaaggacaagtacaacttcaactgcaacagatggctggacgccaacgaggacgacaacgagatcgtgagagagatgaccgccgagggccccaccgtgagaagaatcatgggcatggccagataccacgtgaccgtgtgcaccggcgagctggagggcgccggcaccgacgccaacgtgtacctgtgcctgttcggcgacgtgggcgacaccggcgagagactgctgtacaactgcagaaacaacaccgacctgttcgagaagggcaacgccgacgagttcaccatcgagagcgtgaccatgagaaacgtgagaagagtgagaatcagacacgacggcaagggcagcggcagcggctggtacctggacagagtgctggtgagagaggagggccagcccgagagcgacaacgtggagttcccctgcctgagatggctggacaaggacaaggacgacggccagctggtgagagagctgctgcccagcgacagcagcgccaccctgaagaacttcagataccacatcagcctgaagaccggcgacgtgagcggcgccagcaccgacagcagagtgtacatcaagctgtacggcgacaagagcgacaccatcaagcaggtgctgctggtgagcgacaacaacctgaaggactacttcgagagaggcagagtggacgagttcaccctggagaccctgaacatcggcaacatcaacagactggtgatcggccacgacagcaccggcatgcacgccagctggttcctgggcagcgtgcagatcagagtgcccagacagggcaagcagtacaccttccccgccaacagatggctggacaagaaccaggccgacggcagactggaggtggagctgtaccccagcgaggtggtggagatccagaagctggtgcactacgaggtggagatctggaccggcgacgtgggcggcgccggcaccagcgccagagtgtacatgcagatctacggcgagaagggcaagaccgaggtgctgttcctgagcagcagaagcaaggtgttcgagagagccagcaaggacaccttccagctggaggccgccgacgtgggcgaggtgtacaagctgagactgggccacaccggcgagggcttcggccccagctggttcgtggacaccgtgtggctgagacacctggtggtgagagaggtggacctgacccccgaggaggaggccagaaagaagaaggagaaggacaagctgagacagctgctgaagaaggagagactgaaggccaagctgcagagaaagaagaagaagagaaagggcagcgacgaggaggacgagggcgaggaggaggagagcagcagcagcgaggagagcagcagcgaggaggaggagatggaggaggaggaggaggaggaggagttcggccccggcatgcaggaggtgatcgagcagcacaagttcgaggcccacagatggctggccagaggcaaggaggacaacgagctggtggtggagctggtgcccgccggcaagcccggccccgagagaaacacctacgaggtgcaggtggtgaccggcaacgtgcccaaggccggcaccgacgccaacgtgtacctgaccatctacggcgaggagtacggcgacaccggcgagagacccctgaagaagagcgacaagagcaacaagttcgagcagggccagaccgacaccttcaccatctacgccatcgacctgggcgccctgaccaagatcagaatcagacacgacaacaccggcaacagagccggctggttcctggacagaatcgacatcaccgacatgaacaacgagatcacctactacttcccctgccagagatggctggccgtggaggaggacgacggccagctgagcagagagctgctgcccgtggacgagagctacgtgctgccccagagcgaggagggcagaggcggcggcgacaacaaccccctggacaacctggccctggagcagaaggacaagagcaccaccttcagcgtgaccatcaagaccggcgtgaagaagaacgccggcaccgacgccaacgtgttcatcaccctgttcggcacccaggacgacaccggcatgaccctgctgaagagcagcaagaccaacagcgacaagttcgagagagacagcatcgagatcttcaccgtggagaccctggacctgggcgacctgtggaaggtgagactgggccacgacaacaccggcaaggcccccggctggttcgtggactgggtggaggtggacgcccccagcctgggcaagtgcatgaccttcccctgcggcagatggctggccaagaacgaggacgacggcagcatcatcagagacctgttccacgccgagctgcagaccagactgtacacccccttcgtgccctacgagatcaccctgtacaccagcgacgtgttcgccgccggcaccgacgccaacatcttcatcatcatctacggctgcgacgccgtgtgcacccagcagaagtacctgtgcaccaacaagagagagcagaagcagttcttcgagagaaagagcgccagcagattcatcgtggagctggaggacgtgggcgagatcatcgagaagatcagaatcggccacaacaacaccggcatgaaccccggctggcactgcagccacgtggacatcagaagactgctgcccgacaaggacggcgccgagaccctgaccttcccctgcgacagatggctggccaccagcgaggacgacaagaagaccatcagagagctggtgccctacgacatcttcaccgagaagtacatgaaggacggcagcctgagacaggtgtacaaggaggtggaggagcccctggacatcgtgctgtacagcgtgcagatcttcaccggcaacatccccggcgccggcaccgacgccaaggtgtacatcaccatctacggcgacctgggcgacaccggcgagagatacctgggcaagagcgagaacagaaccaacaagttcgagagaggcaccgccgacaccttcatcatcgaggccgccgacctgggcgtgatctacaagatcaagctgagacacgacaacagcaagtggtgcgccgactggtacgtggagaaggtggagatctggaacgacaccaacgaggacgagttcctgttcctgtgcggcagatggctgagcctgaagaaggaggacggcagactggagagactgttctacgagaaggagtacaccggcgacagaagcagcaactgcagcagccccgccgacttctgggagatcgccctgagcagcaagatggccgacgtggacatcagcaccgtgaccggccccatggccgactacgtgcaggagggccccatcatcccctactacgtgagcgtgaccaccggcaagcacaaggacgccgccaccgacagcagagccttcatcttcctgatcggcgaggacgacgagagaagcaagagaatctggctggactaccccagaggcaagagaggcttcagcagaggcagcgtggaggagttctacgtggccggcctggacgtgggcatcatcaagaagatcgaggtgctgtacgagatgaccgtgtggaccggcgacgtggtgggcggcggcaccgacagcaacatcttcatgaccctgtacggcatcaacggcagcaccgaggagatgcagctggacaagaagaaggccagattcgagagagagcagaacgacaccttcatcatggagatcctggacatcgcccccttcaccaagatgagaatcagaatcgacggcctgggcagcagacccgagtggttcctggagagaatcctgctgaagaacatgaacaccggcgacctgaccatgttctactacggcgactggctgagccagagaaagggcaagaagaccctggtgtgcgagatgtgcgccgtgatcgacgaggaggagatgatggagtggaccagctacaccgtggccgtgaagaccagcgacatcctgggcgccggcaccgacgccaacgtgttcatcatcatcttcggcgagaacggcgacagcggcaccctggccctgaagcagagcgccaactggaacaagttcgagagaaacaacaccgacaccttcaacttccccgacatgctgagcctgggccacctgtgcaagctgagagtgtggcacgacaacaagggcatcttccccggctggcacctgagctacgtggacgtgaaggacaacagcagagacgagaccttccacttccagtgcgactgctggctgagcaagagcgagggcgacggccagaccgtgagagacttcgcctgcgccaacaacaagatctgcgacgagctggaggagaccacctacgagatcgtgatcgagaccggcaacggcggcgagaccagagagaacgtgtggctgatcctggagggcagaaagaacagaagcaaggagttcctgatggagaacagcagcagacagagagccttcagaaagggcaccaccgacaccttcgagttcgacagcatctacctgggcgacatcgccagcctgtgcgtgggccacctggccagagaggacagattcatccccaagagagagctggcctggcacgtgaagaccatcaccatcaccgagatggagtacggcaacgtgtacttcttcaactgcgactgcctgatccccctgaagagaaagagaaagtacttcaaggtgttcgaggtgaccaagaccaccgagagcttcgccagcaaggtgcagagcctggtgcccgtgaagtacgaggtgatcgtgaccaccggctacgagcccggcgccggcaccgacgccaacgtgttcgtgaccatcttcggcgccaacggcgacaccggcaagagagagctgaagcagaagatgagaaacctgttcgagagaggcagcaccgacagattcttcctggagaccctggagctgggcgagctgagaaaggtgagactggagcacgacagcagcggctactgcagcggctggctggtggagaaggtggaggtgaccaacaccagcaccggcgtggccaccatcttcaactgcggcagatggctggacaagaagagaggcgacggcctgacctggagagacctgttccccagcgtgtag

SEQ ID NO: 239114 - DNA, 2751 bp, Artificial Sequence
  derived and/or modified sequence
atgcagagacccgtggtgaagctgtacgccaccgacggcagaagagtgcccagcctgcaggccgtgatcctgagcagcggcgccgtggtggccgccggcagagagcccttcaagcccggcaactacgacatccagaagtacctgctgcccgccagactgcccggcatcagccagagagtgtaccccaagggcaacgccaagagcgagagcagaaagagcagcaactggaaggtgttcatcatcaccagcgacctgcccgacgccggcaccagcagccagatctacatcatcctgtacggccagcacagaagcagcgcccccatctacctgtacggcaccgacggcgccagattccaggtgggccacgaggacatcttcaccatcaccgtgggcgacatcggcgccctgttcaagatcagaatcggccacaccaacagcggcagcagccccagctggcactgcaaggagatccagctgcacaacatgaacagcggcaagcagttctacgtgcccgtgcagagatggctggccagagaccaggaggacggcgagatctgcagagagttccccctgctgagcaagggccagcccgtgctgcccgtgaccatctacgaggtgaacgtggccaccggcgagctgtggaacgccggcaccgtggccaacgtgtacatcagcatccacggcgagaagggcgacaccggcagcagacagctgttcagaagcaagagcagcttcaacttcctgagaggccagaccgacaccttcttcctggaggccgtgcacctgggcgacctgtgcaagatcgtgatcggccacgacggcctgggccccggcaacggctggttcctggacgacgtggtgatcaaggaccccaccaccaactacgagtacgccttcttctgccacagatggctggaccagggcgaggacgactgcaagatcgtgagagagctgtacgccagagacaacagcatcttcagcgccagacagaagctggagctgaagagaaaggagacctggaccgccgagagctggaagttcaccaagggcaacaccctgcagttctacaacaagctgaccggcggcttcgtgagactgcaccccgacggcaccgtggacgccatcggcgagaagaccgacaagtacggcgtgttcgacgtgatcttcaacaagagaaacatctgcatcttccagagccacgagatgagacacctgagcctggccctggacaacggcatcgtgaccggcatggtgagcggcgaggccaccaccgagctgagagtgctgtaccagcccaacagatgcgccctgctggagagcgccctggtgcccggccacaccgtggtgttcgacagacacggcaagatcgccgacgccagcagcgccggctacgccaacctgagcaaggagttcgtgatcttcgtgaagggcgtgttcctgaacagcgccgtggtgctgctggccaccagcctgtgccaggccctgtgcctgcagcccgacggcagctgcaccggcgtgggcagccagagcgagaagagctactggaaggtgcacaagatcagcagcggcatctgcatgttcgagagcgtgaagaacgcccagatgtacctgagaatcaaggacggcagatgcgacggcaccggcaccggcgacgtggactgccacttcaagatcaagaagaacctgaagaacgccagcatcagcctggagagcaccaagagccccggcctgttcgtgggcctgcagagcgacggccaggccaagcccatgatctacaccaaggacgagaacgtgtgcttctacccccaggtgatccagttcggcagagagaaccccatgggcatgagcgccacccccagccaggaggaggagaagatccacgagagcaagaagcagaagaagatcccccccgagagcgaggccagaagccccctgcccagcagcaccgccaaggagatcagacacttccagagcagcgagaccctgctgagcgaggacgagtggaaggtgctggtgctgaccggcaacaccggcacccaggccaacgtgaccctgtgggtgtacggcgacaagggcgtgaccggccccatcagcctgagaaaggacagcagcgagcagctgttcctgcccggccacgaggacgagttccaggtggagatcagaaacaccggcaacatctacaagatcagaatcggccacgacggcaccagcgagcagcccgagtggaacctgcagagagtgaccatgcagcacatgaagagcaagaagatcctggacttcgccgccaacgtgtggctgagcagaatccaggccgacggcgacgtggtgtgcgagctgcccgtggtgaagggcggccaggccatcttccccctggtgagataccaggtggacgtgtacaccggccagctgaagcacgccgagaccgagagcgaggtgttcctgtgcctgttcggcgagagaggcgacagcggcctgagacagctgtacaagagcaacatgcaggtgaagttccagagaggccagatcgacaagttccaggtggccgccgtgagcctgggcaagctgcagaaggtgctgctgagatgcgaggccagcgacaagagccagtactggtactgcgagcaggtgatcgtgagagagcccggcaccaccagcgagagcatcttcacctgccagagatggctgcccttcatgagccagggcatcatccacagcgagatcgagctgtacctgcagggcgaggactactag

SEQ ID NO: 239115 - protein, 208 aa, Artificial Sequence
  derived and/or modified sequence
MGEPAFTSFPSLPVLGKLKRNMMPWALQKKREIHMAKAHRRRAARSALPMRLTSCIFRRPVTRIRSHPDNQVRRRKGDEHLEKPQQLCAYRRLQALQPCSSQGEGSSPLHLESVLSILAPGTAGESLDRAGAERVRSPLEPTPGRFPAVAGGPTPGMGCQLPPPLSGQLVTPADIRRQARRVKKARERLAKALQADRLARRAEMLTGG

SEQ ID NO: 239116 - protein, 208 aa, Artificial Sequence
  derived and/or modified sequence
MGEPAFTSFPSLPVLGKLKRNMMPWALQKKREIHMAKAHRRRAARSALPMRLTSCIFRRPVTRIRSHPDNQVRRRKGDEHLEKPQQLCAYRRLQALQPCSSQGEGSSPLHLESVLSILAPGTAGESLDRAGAERVRSPLEPTPGRFPAVAGGPTPGMGCQLPPPLSGQLVTPADIRRQARRVKKARERLAKALQADRLARRAEMLTVR

SEQ ID NO: 239117 - protein, 204 aa, Artificial Sequence
  derived and/or modified sequence
MGEPAFTSFPSLPVLGKLKRNMMPWALQKKREIHMAKAHRRRAARSALPMRLTSCIFRRPVTRIRSHPDNQVRRRKGDEHLEKPQQLCAYRRLQALQPCSSQGEGSSPLHLESVLSILAPGTAGESLDRAGAERVRSPLEPTPGRFPAVAGGPTPGMGCQLPPPLSGQLVTPADIRRQARRVKKARERLAKALQADRLARRAEM

SEQ ID NO: 239118 - DNA, 627 bp, Artificial Sequence
  derived and/or modified sequence
atgggcgagcccgccttcaccagcttccccagcctgcccgtgctgggcaagctgaagagaaacatgatgccctgggccctgcagaagaagagagagatccacatggccaaggcccacagaagaagagccgccagaagcgccctgcccatgagactgaccagctgcatcttcagaagacccgtgaccagaatcagaagccaccccgacaaccaggtgagaagaagaaagggcgacgagcacctggagaagccccagcagctgtgcgcctacagaagactgcaggccctgcagccctgcagcagccagggcgagggcagcagccccctgcacctggagagcgtgctgagcatcctggcccccggcaccgccggcgagagcctggacagagccggcgccgagagagtgagaagccccctggagcccacccccggcagattccccgccgtggccggcggccccacccccggcatgggctgccagctgcccccccccctgagcggccagctggtgacccccgccgacatcagaagacaggccagaagagtgaagaaggccagagagagactggccaaggccctgcaggccgacagactggccagaagagccgagatgctgaccggcggctag

SEQ ID NO: 239119 - DNA, 627 bp, Artificial Sequence
  derived and/or modified sequence
atgggcgagcccgccttcaccagcttccccagcctgcccgtgctgggcaagctgaagagaaacatgatgccctgggccctgcagaagaagagagagatccacatggccaaggcccacagaagaagagccgccagaagcgccctgcccatgagactgaccagctgcatcttcagaagacccgtgaccagaatcagaagccaccccgacaaccaggtgagaagaagaaagggcgacgagcacctggagaagccccagcagctgtgcgcctacagaagactgcaggccctgcagccctgcagcagccagggcgagggcagcagccccctgcacctggagagcgtgctgagcatcctggcccccggcaccgccggcgagagcctggacagagccggcgccgagagagtgagaagccccctggagcccacccccggcagattccccgccgtggccggcggccccacccccggcatgggctgccagctgcccccccccctgagcggccagctggtgacccccgccgacatcagaagacaggccagaagagtgaagaaggccagagagagactggccaaggccctgcaggccgacagactggccagaagagccgagatgctgaccgtgagatag

SEQ ID NO: 239120 - DNA, 615 bp, Artificial Sequence
  derived and/or modified sequence
atgggcgagcccgccttcaccagcttccccagcctgcccgtgctgggcaagctgaagagaaacatgatgccctgggccctgcagaagaagagagagatccacatggccaaggcccacagaagaagagccgccagaagcgccctgcccatgagactgaccagctgcatcttcagaagacccgtgaccagaatcagaagccaccccgacaaccaggtgagaagaagaaagggcgacgagcacctggagaagccccagcagctgtgcgcctacagaagactgcaggccctgcagccctgcagcagccagggcgagggcagcagccccctgcacctggagagcgtgctgagcatcctggcccccggcaccgccggcgagagcctggacagagccggcgccgagagagtgagaagccccctggagcccacccccggcagattccccgccgtggccggcggccccacccccggcatgggctgccagctgcccccccccctgagcggccagctggtgacccccgccgacatcagaagacaggccagaagagtgaagaaggccagagagagactggccaaggccctgcaggccgacagactggccagaagagccgagatgtag

SEQ ID NO: 239121 - DNA, 627 bp, Artificial Sequence
  derived and/or modified sequence
atgggagaacctgcattcacatctttcccgtccttacccgtgctgggcaagctaaaacggaatatgatgccttgggcattacaaaaaaaacgggagattcatatggctaaagcacatcgtcgacgtgcggcgcggagcgctttgcctatgcggctaacatcatgtattttccgccggccggtgacccgtatccgttctcaccccgataaccaggtgcgtagacgaaaaggagacgaacacctcgaaaagccccagcagctctgtgcttataggcgactccaggcgctgcagccgtgctccagccaaggcgaaggctcctcgccacttcatttggagtccgtgttgagtatcctggcacccggaaccgctggggaatcactcgaccgggcaggggctgagcgagtgcgctcccctctcgagcctactccgggtcggttccctgcagtggctgggggccctaccccaggaatggggtgccaactcccccccccccttagcgggcagctggtcacaccagcagacatcagaaggcaggccagaagagtcaaaaaagcccgggaacggctggctaaggccttgcaagccgaccggttggctcgccgagccgaaatgctgactggagggtag

SEQ ID NO: 239122 - DNA, 627 bp, Artificial Sequence
  derived and/or modified sequence
atgggggagcctgctttcacaagctttcccagtctgcccgtactgggcaaacttaagaggaatatgatgccttgggcacttcagaagaaacgtgaaattcatatggcgaaggctcaccgtcgacgtgcggcccgctccgccctccccatgagactgacaagctgtatatttcggcgccccgtgacccggattaggtctcaccctgacaaccaggttcgcagaaggaagggcgacgaacacctggaaaaaccccagcagctctgcgcctaccgacgacttcaggcactccagccttgcagtagtcagggggagggttctagtccactccacctcgagagcgtactttccatactcgccccaggaactgccggcgaatctctggatcgagctggcgccgaacgggtgcggtcccccctcgaaccgacccccggcagatttcctgctgtggcaggaggaccaacacccgggatgggatgccagctgcccccccccctctccggacagcttgttacgcctgccgacatccggcgacaggcgagacgagtaaaaaaagctcgggagcggttagcgaaagcattgcaagcagataggctcgccagacgcgctgagatgctgacggtaagatag

SEQ ID NO: 239123 - DNA, 615 bp, Artificial Sequence
  derived and/or modified sequence
atgggggagccagccttcacatcatttccatctctccctgtgcttggcaaattgaagagaaacatgatgccatgggctctgcagaaaaagcgcgagattcatatggccaaggcccaccggagaagagccgcaagatctgctctgccgatgcgtctcactagctgcatttttagacggccggtgacacgtatcagatcacaccctgataaccaggtgagaagaagaaaaggagacgagcatctggagaagccccagcagctttgtgcctaccgccgacttcaggcactgcagccatgtagtagccagggagaaggctcttccccactgcatcttgaatcagttctgagcattctggccccagggacagctggcgagtccctcgaccgagcgggggctgagcgggtgagatctcctctggagcccaccccgggacgttttcctgctgtggcagggggcccaacaccgggcatggggtgccaactgccacctccactaagtggccaactggtgaccccagcggacattaggagacaagcacgtcgtgtaaaaaaagcccgggagcgattggctaaggccctacaagccgaccggcttgctaggagagcagagatgtag

SEQ ID NO: 239124 - DNA, 627 bp, Artificial Sequence
  derived and/or modified sequence
atgggagagcccgccttcaccagcttccccagcctgcctgtgctgggcaagctgaagaggaacatgatgccctgggccctgcagaagaagcgggagatccacatggccaaggcccacagaagaagagctgcccggagcgccctgcccatgaggctgaccagctgcatcttccggcggcctgtgacccgcatccgcagccacccagacaaccaggtgagaagaagaaaaggagatgagcacctggagaagccccagcagctgtgtgcctacagaaggctgcaggccctgcagccctgcagcagccagggcgagggcagcagccccctgcacctggagagcgtgctgagcatcctggcccctggaacagctggggagagcctggaccgggccggggctgagcgggtgcgcagccccctggagcccaccccaggccgcttccctgctgtggccggcggccccaccccaggcatgggctgccagctgcccccacccctgagcggccagctggtgaccccagctgacatccggcggcaggcccggcgggtgaagaaggcccgggagcggctggccaaggccctgcaggccgaccggctggcccggcgggcagagatgctgaccggcggctag

SEQ ID NO: 239125 - DNA, 627 bp, Artificial Sequence
  derived and/or modified sequence
atgggagagcccgccttcaccagcttccccagcctgcctgtgctgggcaagctgaagaggaacatgatgccctgggccctgcagaagaagcgggagatccacatggccaaggcccacagaagaagagctgcccggagcgccctgcccatgaggctgaccagctgcatcttccggcggcctgtgacccgcatccgcagccacccagacaaccaggtgagaagaagaaaaggagatgagcacctggagaagccccagcagctgtgtgcctacagaaggctgcaggccctgcagccctgcagcagccagggcgagggcagcagccccctgcacctggagagcgtgctgagcatcctggcccctggaacagctggggagagcctggaccgggccggggctgagcgggtgcgcagccccctggagcccaccccaggccgcttccctgctgtggccggcggccccaccccaggcatgggctgccagctgcccccacccctgagcggccagctggtgaccccagctgacatccggcggcaggcccggcgggtgaagaaggcccgggagcggctggccaaggccctgcaggccgaccggctggcccggcgggcagagatgctgactgtgaggtag

SEQ ID NO: 239126 - DNA, 615 bp, Artificial Sequence
  derived and/or modified sequence
atgggagagcccgccttcaccagcttccccagcctgcctgtgctgggcaagctgaagaggaacatgatgccctgggccctgcagaagaagcgggagatccacatggccaaggcccacagaagaagagctgcccggagcgccctgcccatgaggctgaccagctgcatcttccggcggcctgtgacccgcatccgcagccacccagacaaccaggtgagaagaagaaaaggagatgagcacctggagaagccccagcagctgtgtgcctacagaaggctgcaggccctgcagccctgcagcagccagggcgagggcagcagccccctgcacctggagagcgtgctgagcatcctggcccctggaacagctggggagagcctggaccgggccggggctgagcgggtgcgcagccccctggagcccaccccaggccgcttccctgctgtggccggcggccccaccccaggcatgggctgccagctgcccccacccctgagcggccagctggtgaccccagctgacatccggcggcaggcccggcgggtgaagaaggcccgggagcggctggccaaggccctgcaggccgaccggctggcccggcgggcagagatgtag

SEQ ID NO: 239127 - DNA, 627 bp, Artificial Sequence
  derived and/or modified sequence
atgggcgagcccgccttcaccagcttccccagcctgcccgtgctggggaagctgaagcgaaacatgatgccgtgggcgctccagaaaaagcgtgaaatacacatggccaaagcccacagacgccgggccgcccggagtgcactccccatgcggctgacaagttgtatctttcgtcgcccagtaacccggatcagatctcatcccgacaaccaggtccggcgccgcaagggcgacgagcatttggagaagccccaacagctttgtgcctatcgtcgtctgcaggcactgcaaccctgctcatcacaaggggaggggagcagccccctccacctcgagtcggtgctgtccatattggccccagggactgctggcgagtctctcgacagagctggcgccgagcgcgtaaggtctcctttggagcctacccccggcaggttcccagcagtcgctggcggccccacacccgggatgggttgccagctcccgccacctctgtcaggacagctagttacaccggcagatatacgacgccaggcacgacgcgttaagaaggctagggagaggctcgcgaaagcactacaagcagatcgcctcgcaagaagggccgaaatgcttacaggcgggtag

SEQ ID NO: 239128 - DNA, 627 bp, Artificial Sequence
  derived and/or modified sequence
atgggcgagcccgccttcaccagcttccccagcctgcccgtgctgggcaaactgaaacgcaatatgatgccatgggcactccaaaagaaacgcgagatacacatggccaaggctcatcgccgtcgagccgcccggtctgccttgccaatgagactaacttcatgcatctttaggaggccagtcactcggatcaggagtcatcccgacaatcaggtacgcaggagaaagggagatgaacacctcgagaaacctcaacagctgtgtgcctaccgaaggttgcaggctctgcagccctgttcttcccaaggcgagggttcttctccactgcatctcgagtcagtgctcagtattctcgcccctggcaccgccggggagtccctcgaccgtgcaggcgctgaaagagtccggagccctctcgaacctacgcccggacggtttccagcggttgccggcggcccaactccaggaatgggatgccaactgcctccccccctctccgggcaacttgtaacccccgccgacatcagacgacaggcccgccgcgtgaaaaaagctcgggagcggctagcaaaggcactgcaagccgacaggctagccaggagagccgagatgctgaccgttcgctag

SEQ ID NO: 239129 - DNA, 615 bp, Artificial Sequence
  derived and/or modified sequence
atgggcgagcccgccttcaccagcttccccagcctgcccgtgctgggcaaactgaaaagaaacatgatgccttgggcactgcagaaaaagcgtgaaatccacatggccaaggctcataggcgcagggccgcccgtagtgcactgccaatgcgattaacttcttgcattttccgccggcccgtcactaggattcgaagccacccagataaccaagtcaggcgccgaaagggggatgagcacctggagaagccacagcagctgtgcgcatacaggagactccaggcattacaaccatgcagcagccaaggcgagggctcttctccactgcacctggagtcggtcctgtcaatcttggcccccggaaccgcgggtgaatccttggaccgggctggtgcggagcgagtgaggagcccactggagccgacccccggaagatttccagcagtcgctggggggccaactcccggcatggggtgtcaactgcctcccccactgagtggacagctggtgacccccgctgacattagacggcaagcgcggcgagttaagaaggctagagaacggctggccaaagcgctgcaagccgatcgtctggccagaagagctgaaatgtag

SEQ ID NO: 239130 - DNA, 775 bp, Artificial Sequence
  derived and/or modified sequence
tcaggagtggggtcagcaggaggaactctacagctatgggagaacctgcgttcacctcttttccaagcctgcctgttctggggaagctcaaaaggaacatgatgccctgggctttacagaagaaacgagaaatccacatggccaaggcccatcggagacgagctgcgaggtctgctctccccatgagactcaccagctgcatcttccggaggccggtgacaaggatcaggtctcatcctgacaaccaggtcagacgcagaaaaggggacgagcacctggagaagccgcagcaactctgcgcctaccggagactgcaggccctgcagccctgcagcagccaaggagaaggttcaagtccactgcatttggagagcgtcttaagtatccttgcaccggggacggccggtgaatctctggacagagctggtgctgagcgtgtgcgcagcccgcttgagcccacccctgggcggtttccagctgtggcaggggggccaaccccaggaatgggttgtcagctcccaccgcccctctctggccaattggtgactcctgcagatatccggagacaggccaggagggtgaagaaagccagggagagactggccaaggccttgcaggcagacaggctggccaggcgggcagaaatgctgacaggtggatgaagctcagtcttgggctttcggtccctttcttttaatgcccatcctcattcctactctgaattgtcacacttttcccttccccaccagttctttaataaaagtatttgaaaggc

SEQ ID NO: 239131 - DNA, 659 bp, Artificial Sequence
  derived and/or modified sequence
tcaggagtggggtcagcaggaggaactctacagctatgggagaacctgcgttcacctcttttccaagcctgcctgttctggggaagctcaaaaggaacatgatgccctgggctttacagaagaaacgagaaatccacatggccaaggcccatcggagacgagctgcgaggtctgctctccccatgagactcaccagctgcatcttccggaggccggtgacaaggatcaggtctcatcctgacaaccaggtcagacgcagaaaaggggacgagcacctggagaagccgcagcaactctgcgcctaccggagactgcaggccctgcagccctgcagcagccaaggagaaggttcaagtccactgcatttggagagcgtcttaagtatccttgcaccggggacggccggtgaatctctggacagagctggtgctgagcgtgtgcgcagcccgcttgagcccacccctgggcggtttccagctgtggcaggggggccaaccccaggaatgggttgtcagctcccaccgcccctctctggccaattggtgactcctgcagatatccggagacaggccaggagggtgaagaaagccagggagagactggccaaggccttgcaggcagacaggctggccaggcgggcagaaatgctgacagtgaga

SEQ ID NO: 239132 - DNA, 649 bp, Artificial Sequence
  derived and/or modified sequence
caggagtggggtcagcaggaggaactctacagctatgggagaacctgcgttcacctcttttccaagcctgcctgttctggggaagctcaaaaggaacatgatgccctgggctttacagaagaaacgagaaatccacatggccaaggcccatcggagacgagctgcgaggtctgctctccccatgagactcaccagctgcatcttccggaggccggtgacaaggatcaggtctcatcctgacaaccaggtcagacgcagaaaaggggacgagcacctggagaagccgcagcaactctgcgcctaccggagactgcaggccctgcagccctgcagcagccaaggagaaggttcaagtccactgcatttggagagcgtcttaagtatccttgcaccggggacggccggtgaatctctggacagagctggtgctgagcgtgtgcgcagcccgcttgagcccacccctgggcggtttccagctgtggcaggggggccaaccccaggaatgggttgtcagctcccaccgcccctctctggccaattggtgactcctgcagatatccggagacaggccaggagggtgaagaaagccagggagagactggccaaggccttgcaggcagacaggctggccaggcgggcagaaatgtga

SEQ ID NO: 239133 - DNA, 627 bp, Artificial Sequence
  derived and/or modified sequence
atgggcgagcctgcctttacctccttccctagccttcccgtcctgggcaaattgaagcgcaacatgatgccctgggccctgcagaaaaagcgcgagattcacatggccaaggctcatcgcagaagggcagctagaagcgccctgccaatgcggttgacatcttgtatatttagacggcctgtcaccagaataagatcacacccagacaaccaggtaaggaggcgtaaaggagacgagcaccttgagaagcctcagcagttgtgtgcctacaggaggctccaagccctccagccttgctcttcccaaggcgagggaagctctcccctccacttagagagtgttctaagtattctggctccaggtacggctggcgagagcctggacagggcgggagccgagagggtccggagtcccctggaacccacccctggaagattccccgctgtggcaggcggacccactccaggaatgggttgccagctgccaccccctctctccggacaattagtgacacctgccgacatcaggagacaggctagaagagtgaagaaggcacgtgaacggctcgcaaaggctttgcaggccgatcggctagcaagaagagcagagatgctcaccgggggatag

SEQ ID NO: 239134 - DNA, 627 bp, Artificial Sequence
  derived and/or modified sequence
atgggagaaccggctttcacgtctttccccagcctgcccgttctcggcaagttgaaacgaaacatgatgccttgggccctacaaaagaaacgggagatccatatggccaaggcacacaggagacgcgctgcgcgttctgcccttcccatgagactaacctcctgtatattccgcagaccggtgacgaggatcaggagtcaccccgacaatcaggtgcggaggcgcaagggagatgagcatttggaaaagccacagcagctttgcgcttacaggcgtctccaggcactccagccctgctcgagccaaggcgaaggtagttccccactccatctggagagcgtgctatctatattagccccaggcacagcaggtgagtcactggaccgagcgggtgccgaacgggttaggagccccttggagcctactccaggcagattcccggcagtcgcaggcggacccacgcccggaatgggctgtcagctcccaccgccattaagcgggcagctagtcactcccgcagatataaggcgtcaggcccgtcgtgtgaaaaaggcccgtgaacgcctggccaaggctttacaggcggatcggctggcccgaagagcagagatgctgacagtgcgctag

SEQ ID NO: 239135 - DNA, 615 bp, Artificial Sequence
  derived and/or modified sequence
atgggtgagccagcatttacatccttcccttccctacccgttttaggcaaacttaagcgtaacatgatgccttgggctcttcagaagaaacgtgaaatccatatggccaaggctcacaggcgcagagcagcaaggtcagcgttgcctatgcgactgactagttgtattttcagacggccagtgacccgcattcgcagtcaccccgataatcaagtcagacgcaggaaaggtgacgaacatctggagaagccccagcagttatgcgcatacaggcggttgcaagctctccagccctgctcaagccagggcgaggggagcagcccacttcatctggaaagcgtgttatccatcctggctcccggtactgctggcgagtcgttggaccgggctggggctgaaagggtgcggtcgccgttagagcccacacccggtagattcccggctgttgctggtgggcctacaccagggatggggtgccagctgccaccacctttgagcggtcaattagtgactccagccgatattaggcgccaggccaggagggtgaagaaggccagagagcgcctggctaaggctctgcaggctgatcgccttgctcggagggctgagatgtag

SEQ ID NO: 239136 - protein, 282 aa, Artificial Sequence
  derived and/or modified sequence
MGSPGMVLGLLVQIWALQEASSLSVQQGPNLLQVRQGSQATLVCQVDQATAWERLRVKWTKDGAILCQPYITNGSLSLGVCGPQGRLSWQAPSHLTLQLDPVSLNHSGAYVCWAAVEIPELEEAEGNITRLFVDPDDPTQNRNRIASFPGFLFVLLGVGSMGVAAIVWGAWFWGRRSCQQRDSGNSPGNAFYSNVLYRPRGAPKKSEDCSGEGKDQRGQSIYSTSFPQPAPRQPHLASRPCPSPRPCPSPRPGHPVSMVRVSPRPSPTQQPRPKGFPKVGEE

SEQ ID NO: 239137 - DNA, 849 bp, Artificial Sequence
  derived and/or modified sequence
atgggcagccccggcatggtgctgggcctgctggtgcagatctgggccctgcaggaggccagcagcctgagcgtgcagcagggccccaacctgctgcaggtgagacagggcagccaggccaccctggtgtgccaggtggaccaggccaccgcctgggagagactgagagtgaagtggaccaaggacggcgccatcctgtgccagccctacatcaccaacggcagcctgagcctgggcgtgtgcggcccccagggcagactgagctggcaggcccccagccacctgaccctgcagctggaccccgtgagcctgaaccacagcggcgcctacgtgtgctgggccgccgtggagatccccgagctggaggaggccgagggcaacatcaccagactgttcgtggaccccgacgaccccacccagaacagaaacagaatcgccagcttccccggcttcctgttcgtgctgctgggcgtgggcagcatgggcgtggccgccatcgtgtggggcgcctggttctggggcagaagaagctgccagcagagagacagcggcaacagccccggcaacgccttctacagcaacgtgctgtacagacccagaggcgcccccaagaagagcgaggactgcagcggcgagggcaaggaccagagaggccagagcatctacagcaccagcttcccccagcccgcccccagacagccccacctggccagcagaccctgccccagccccagaccctgccccagccccagacccggccaccccgtgagcatggtgagagtgagccccagacccagccccacccagcagcccagacccaagggcttccccaaggtgggcgaggagtag

SEQ ID NO: 239138 - DNA, 849 bp, Artificial Sequence
  derived and/or modified sequence
atgggttctccaggtatggtgctgggcctcctcgtgcagatttgggcgctccaagaggcttcttcactaagtgttcaacaaggccctaatctcctgcaagttcgccagggttcgcaggctacgctggtttgtcaggtagatcaagccaccgcctgggagagactgcgggtcaagtggacgaaagacggagccattctgtgtcaaccttacattacaaatggttctcttagccttggagtttgtggccctcaaggcagactatcctggcaggcaccctcgcacctgactctgcaactcgatccagtttccctgaaccattccggcgcctatgtctgctgggcggccgtcgagattcctgagctagaagaagcagaaggcaatataacaagattgtttgtagatccggacgatcccacccagaaccgaaaccggattgcgtctttccccgggttcctctttgtattgttgggtgtcgggtctatgggcgttgctgcaattgtgtggggggcctggttctgggggagacgcagttgccaacaaagggattccggaaattcccccggcaacgccttctattcaaacgttctctatcgcccacgaggcgctccaaagaagtccgaggactgctctggcgaggggaaggatcagcgaggccaaagcatctatagtacgtcatttccacagccagcccctagacagccccatctggcttcccggccatgcccgtctcctagaccttgcccctcaccacgccccggacatcctgtgtccatggtgcgggtcagcccaagaccatcccctactcagcagcccagacctaagggcttccccaaggtaggcgaagagtag

SEQ ID NO: 239139 - DNA, 849 bp, Artificial Sequence
  derived and/or modified sequence
atgggcagccctggcatggtgctgggcctgctggtgcagatctgggccctgcaggaggccagcagcctgtctgtgcagcagggccccaacctgctgcaggtgcggcagggcagccaggccaccctggtgtgccaggtggaccaggccacagcctgggagcggctgcgggtgaagtggaccaaggatggagccatcctgtgccagccctacatcaccaacggcagcctgagcctgggcgtgtgtggcccccagggccgcctgtcctggcaggcccccagccacctgaccctgcagctggaccctgtgtccctgaaccacagcggggcctacgtgtgctgggccgctgtggagatccctgagctggaggaggccgagggcaacatcacccggctgtttgtggaccctgatgaccccacccagaacagaaacagaattgccagcttccctggcttcctgtttgtgctgctgggcgtgggctccatgggcgtggccgccatcgtgtggggcgcctggttctggggcagaagaagctgccagcagagggacagcggcaacagccctggaaatgccttctacagcaatgtgctgtaccggcccaggggggcccccaagaagtctgaggactgcagcggggagggcaaggaccagaggggccagagcatctacagcaccagcttcccccagcctgccccccggcagccccacctggccagccggccctgccccagcccccggccctgccccagcccccggcccggccaccctgtgtccatggtgcgggtgagcccccggcccagccccacccagcagccccggcccaagggcttccccaaggtgggggaggagtag

SEQ ID NO: 239140 - DNA, 849 bp, Artificial Sequence
  derived and/or modified sequence
atgggcagccccggcatggtgctgggcctgctggtgcagatctgggcccttcaggaggcttctagtttgtcggtccaacaaggccccaatctgctgcaggtacgccagggttcacaggctactctcgtttgtcaagtcgaccaggccaccgcctgggaacgcttgagggtgaagtggaccaaagatggtgctattctgtgccagccctatatcacaaacggctctctgtctctcggcgtttgtggcccgcagggcaggctcagttggcaggcccccagccaccttactcttcagctggatcctgtcagcctcaaccatagcggagcttatgtgtgctgggccgccgtagagattccggagctggaagaagctgaaggcaacatcactcggctgtttgtagatccagatgaccctacacagaacaggaatcgtatcgcctctttccccggctttctctttgtcctgctgggtgtcgggtccatgggcgtagcagcaattgtctggggcgcttggttctggggacgccgtagctgtcagcaacgggatagcggaaactcccctgggaacgccttctactcgaatgtgctctatcgccctagaggagctcctaagaaatccgaggattgtagtggagaaggcaaggaccagagaggacagtcaatctattcaacgtccttcccccagcctgccccacgtcagccacacctggcatctcgaccatgcccttctccccgcccatgtccaagcccacggcccggccacccagtatcaatggttcgggtaagccccagacctagccctacccaacagccgcgcccaaaaggctttcctaaagtaggcgaggaatag

SEQ ID NO: 239141 - DNA, 849 bp, Artificial Sequence
  derived and/or modified sequence
atgggttcgccaggcatggttttaggtctgcttgtccagatctgggcactgcaggaagctagctctctcagcgtgcaacagggccctaatctgctgcaggttaggcaggggtcgcaagccacattggtgtgtcaggtcgaccaggccacagcatgggaacgactcagggtgaagtggaccaaagatggtgccattttgtgccaaccatatattacaaacgggagcctcagtctgggtgtctgtggaccacaaggccgactgagttggcaggccccatctcacttgacccttcaacttgatccagttagcctcaaccactctggagcgtacgtgtgctgggctgcggtcgaaatccctgagttagaggaggctgaggggaacattaccaggctttttgtcgatcccgacgacccaacccagaataggaacaggatcgctagcttccctgggttcctgttcgtcttgctgggcgtcggttctatgggagtggccgctatcgtgtggggcgcatggttctggggcagaagaagttgtcagcagcgcgactcaggcaatagtcctggcaatgctttttacagcaatgtactataccgacccaggggcgctcctaaaaagtctgaggattgtagcggtgagggtaaggatcagcgcggtcagtctatatattcaacttccttccctcaacccgctcctcgacagccacacctggcgtctcgaccgtgcccgagtcctaggccttgcccatcccccagacccggacacccagtttctatggtgagggtttcccctaggccatcacccacccagcagccaagacctaaaggcttccccaaggtcggagaagagtag

SEQ ID NO: 239142 - DNA, 1254 bp, Artificial Sequence
  derived and/or modified sequence
ggaagtctgtcaactgggagggggagaggggggtgatgggccaggaatggggtccccgggcatggtgctgggcctcctggtgcagatctgggccctgcaagaagcctcaagcctgagcgtgcagcaggggcccaacttgctgcaggtgaggcagggcagtcaggcgaccctggtctgccaggtggaccaggccacagcctgggaacggctccgtgttaagtggacaaaggatggggccatcctgtgtcaaccgtacatcaccaacggcagcctcagcctgggggtctgcgggccccagggacggctctcctggcaggcacccagccatctcaccctgcagctggaccctgtgagcctcaaccacagcggggcgtacgtgtgctgggcggccgtagagattcctgagttggaggaggctgagggcaacataacaaggctctttgtggacccagatgaccccacacagaacagaaaccggatcgcaagcttcccaggattcctcttcgtgctgctgggggtgggaagcatgggtgtggctgcgatcgtgtggggtgcctggttctggggccgccgcagctgccagcaaagggactcaggtaacagcccaggaaatgcattctacagcaacgtcctataccggccccggggggccccaaagaagagtgaggactgctctggagaggggaaggaccagaggggccagagcatttattcaacctccttcccgcaaccggccccccgccagccgcacctggcgtcaagaccctgccccagcccgagaccctgccccagccccaggcccggccaccccgtctctatggtcagggtctctcctagaccaagccccacccagcagccgaggccaaaagggttccccaaagtgggagaggagtgagagatcccaggagacctcaacaggaccccacccataggtacacacaaaaaaggggggatcgaggccagacacggtggctcacgcctgtaatcccagcagtttgggaagccgaggcgggtggaacacttgaggtcaggggtttgagaccagcctggcttgaacctgggaggcggaggttgcagtgagccgagattgcgccactgcactccagcctgggcgacagagtgagactccgtctcaaaaaaaacaaaaagcaggaggattgggagcctgtcagccccatcctgagaccccgtcctcatttctgtaatgatggatctcgctcccactttcccccaagaacctaataaaggcttgtg

SEQ ID NO: 239143 - protein, 331 aa, Artificial Sequence
  derived and/or modified sequence
MSMTTRAWEELDGGLGSCQALEDHSALAETQEDRASATPRLADSGSVPHDSQVAEGPSVDTRPKKMEKEPAARGTPGTGKERLKAGASPRSVPARKKAQTAPPLQPPPPPPALSEELPWGDLSLNKCLVLASLVALLGSAFQLCRDAVPGEAALQARVPEPWVPPSSAPREPSSPLPKFEAQAPPSAPPAPRAEAEVRPKIPGSREAAENDEEEPGEATGEAVREDRVTLADRGPKERPRREGKPRKEKPRKEERPKKERPRKEERPRAAREPREALPQRWESREGGHRPWARDSRDAEPRKKQAWVSPRRPDEEQRPGSRQKLRAGKGRD

SEQ ID NO: 239144 - DNA, 996 bp, Artificial Sequence
  derived and/or modified sequence
atgagcatgaccaccagagcctgggaggagctggacggcggcctgggcagctgccaggccctggaggaccacagcgccctggccgagacccaggaggacagagccagcgccacccccagactggccgacagcggcagcgtgccccacgacagccaggtggccgagggccccagcgtggacaccagacccaagaagatggagaaggagcccgccgccagaggcacccccggcaccggcaaggagagactgaaggccggcgccagccccagaagcgtgcccgccagaaagaaggcccagaccgccccccccctgcagccccccccccccccccccgccctgagcgaggagctgccctggggcgacctgagcctgaacaagtgcctggtgctggccagcctggtggccctgctgggcagcgccttccagctgtgcagagacgccgtgcccggcgaggccgccctgcaggccagagtgcccgagccctgggtgccccccagcagcgcccccagagagcccagcagccccctgcccaagttcgaggcccaggccccccccagcgccccccccgcccccagagccgaggccgaggtgagacccaagatccccggcagcagagaggccgccgagaacgacgaggaggagcccggcgaggccaccggcgaggccgtgagagaggacagagtgaccctggccgacagaggccccaaggagagacccagaagagagggcaagcccagaaaggagaagcccagaaaggaggagagacccaagaaggagagacccagaaaggaggagagacccagagccgccagagagcccagagaggccctgccccagagatgggagagcagagagggcggccacagaccctgggccagagacagcagagacgccgagcccagaaagaagcaggcctgggtgagccccagaagacccgacgaggagcagagacccggcagcagacagaagctgagagccggcaagggcagagactag

SEQ ID NO: 239145 - DNA, 996 bp, Artificial Sequence
  derived and/or modified sequence
atgagtatgacaactagagcctgggaagagttggacggagggctgggctcttgtcaggccctcgaggatcacagcgccttggccgaaacacaggaggatcgagcctcagccactcctaggctggccgattccggttcggttccccacgactctcaggtggcggaagggccttcagtggatacacggcccaagaaaatggaaaaggaaccagcagcacggggaacacccgggaccggtaaggagaggctgaaggccggcgctagtccaaggtccgttccggccaggaaaaaagctcagaccgcgcctcctctacagcccccaccccccccccccgcactctctgaggagctcccatggggagacctcagcctgaacaagtgcctggtgctcgctagtctcgtggccctgcttggcagcgcatttcagctttgcagagatgctgtgcctggcgaagctgctctgcaggctcgggttccagagccttgggtgcctccttcctcagccccacgcgaaccgtcgagtcccctgcccaagtttgaggcccaagcccctcccagcgccccacccgcacccagggccgaagcagaagtgcggccaaagatcccaggaagccgggaggccgccgaaaatgatgaggaagagcctggggaagctacaggcgaggcggtccgggaagacagggtcaccctggcggatagaggcccaaaggagcggccacggcgcgagggaaagccacgcaaggagaagcctaggaaagaagaacgccccaaaaaagagcggcccaggaaggaggagcgacctagggccgcaagagaaccaagggaagcccttcctcaaaggtgggagagcagggagggcgggcataggccgtgggcgcgggactcaagagatgccgaacctcgtaagaagcaggcctgggtgagtcctcggcgccctgatgaggaacagagacccggttccagacagaagctgcgcgctgggaaggggagggactag

SEQ ID NO: 239146 - DNA, 1145 bp, Artificial Sequence
  derived and/or modified sequence
tcctccgtcctgtccacaaggctcagcaaagcggctggcggcctggcctgggacctgctgctgctccagccatgtccatgacaaccagagcctgggaggagctggatggcggcctgggcagctgccaggccctggaggaccactctgcgctggccgagacccaggaggacagggcttcagcgacacccaggctggccgactccggcagcgtgccccacgactctcaggtggctgaaggccccagtgtggacaccaggcccaagaagatggaaaaagagcctgccgccagggggaccccaggaacggggaaggagaggctgaaagccggagcgagccctcggagcgtccccgcgcgcaagaaggcgcagaccgcgccgcccctgcagccgccgccgccgcccccggccctgagcgaggagctgccctggggagacctgtcgctcaacaagtgcctggtgctcgcctcgctggtggcgctgctgggctcggctttccagctgtgccgcgacgccgtccctggggaggcagcactccaagcacgtgtgcccgagccctgggtcccgccaagctcagccccgagggagccatcgtcgcccctgcctaagttcgaggcccaggcgcctccatcagcgccgcctgcgccccgggccgaggcagaggtcagacccaagattcccgggagtcgggaggctgcagagaacgacgaagaggagcccggcgaggccaccggagaggccgtccgggaggaccgtgtgaccctcgcagaccggggacccaaggagaggcctcggagagaggggaagccgcggaaggagaagccgcggaaggaggagagacctaagaaagagaggccgcggaaagaggagaggccacgggccgccagggagccccgggaagccctaccccagcgctgggagtcacgcgaagggggccaccggccgtgggcacgggactccagggacgccgagcccaggaagaagcaggcctgggtgtccccgaggcgtcccgacgaggagcagcggcctgggagtcgccagaagctccgcgcaggcaaggggcgggactgagccggccccgcgccggagtccaggggccccttctggacgccccgcgactctggcgaaataaagcgagtgctgcggccg

SEQ ID NO: 239147 - DNA, 996 bp, Artificial Sequence
  derived and/or modified sequence
atgtccatgaccacccgggcctgggaggagctggatggcggcctgggcagctgccaggccctggaggaccacagcgccctggccgagacccaggaggaccgggccagcgccaccccccggctggccgacagcggctctgtgccccatgacagccaggtggccgagggccccagcgtggacacccggcccaagaagatggagaaggagcctgctgcccggggcaccccaggcaccgggaaggagcggctgaaggccggggccagccccaggtctgtgcctgccaggaagaaggcccagacagccccacccctgcagcccccacctcctcctccagccctgtctgaggagctgccctggggagacctgagcctgaacaagtgcctggtgctggccagcctggtggccctgctgggcagcgccttccagctgtgcagagatgctgtgcctggagaggccgccctgcaggcccgggtgcctgagccctgggtgccccccagcagcgccccccgggagcccagcagccccctgcccaagtttgaggcccaggccccacccagcgcccccccagcccccagggctgaggccgaggtgcggcccaagatccctggcagccgggaggccgcagaaaatgatgaggaggagcctggagaggccactggagaggccgtgagagaagatagagtgaccctggccgaccggggccccaaggagcggccccggcgggagggcaagcccaggaaggagaagcccaggaaggaggagcggcccaagaaggagcggcccaggaaggaggagcggcccagggctgcccgggagccccgggaggccctgccccagcgctgggagagccgggagggcggccaccggccctgggcccgggacagcagagatgctgagcccaggaagaagcaggcctgggtgagcccccggcggccagatgaggagcagaggcctggcagccggcagaagctgcgggccggcaagggccgggactag

SEQ ID NO: 239148 - DNA, 996 bp, Artificial Sequence
  derived and/or modified sequence
atgagcatgaccacccgggcctgggaggagctggacggcggcctgggaagctgccaagcgctagaagaccatagtgccctggccgagacacaagaggacagagcgagcgcaactccccgcctggcggactccgggtccgtgccacatgactctcaggtcgcagaaggtccgtctgtcgacactcgtcccaaaaagatggagaaggaacctgccgcccgcggaaccccagggaccggcaaagaacggttgaaagctggggcctccccccgtagcgtgccagcgcgcaagaaagcccagactgcaccaccgctacagccccctcctcccccaccggccttgtctgaggagttgccctggggagacctatctctgaacaaatgcctcgtactggcctccttggtggctctgctaggcagcgcatttcaactatgccgcgatgccgttcccggggaagcagcccttcaagctcgggtgccggagccttgggtcccgccgtcatcagcgcctagagagcctagctcacccttgcctaagttcgaggcccaagcaccacctagcgctcccccggcgccccgtgcggaagctgaggtccgcccaaagattcctggaagccgagaagctgccgagaatgacgaagaggagcccggggaagctaccggagaggctgtgcgagaagaccgcgttaccctcgctgataggggaccaaaagaacggcctagacgagaaggaaaaccccgtaaggaaaagcccagaaaggaggaacgaccaaagaaggagaggcccagaaaggaggaacggcccagggccgcacgtgaacccagagaagctttgccccagaggtgggagtcccgggaaggcgggcacaggccctgggccagagactctagggacgctgaacccagaaaaaaacaggcgtgggtatctccaaggaggcctgatgaagagcagaggcccgggtcacggcagaagcttagggccggcaaaggtagggattag

SEQ ID NO: 239149 - DNA, 996 bp, Artificial Sequence
  derived and/or modified sequence
atgtctatgacgacacgggcatgggaggagctggacggcggacttggcagttgccaggccttggaggatcatagcgcgctggccgagacccaggaagatcgcgcatccgctacccctcggctggccgacagcggaagtgttcctcacgactcccaggtggcagaaggtccttccgtggatacgcgccctaaaaaaatggagaaggagcctgctgctcgaggtacacctggtacaggcaaggaaagactgaaagccggtgccagccccagaagtgtgcctgccagaaaaaaggcccagaccgctccgccattgcagccccctcctcccccacccgcactgagcgaagagcttccttggggtgacctgtctcttaacaagtgcctggttcttgcttctctggtggctctgttgggatctgcattccagctttgcagggatgccgtaccaggtgaggcagcacttcaggcacgggtgccagagccttgggtgcccccaagctccgccccacgggagcctagcagccccctgcctaagttcgaagcacaggcccctcctagcgccccaccggcacctcgggcagaggcagaggtgcgccctaagattccaggctctagggaagcagccgaaaacgacgaggaagagccaggagaggccaccggagaagctgttcgtgaagaccgcgtgacgctggccgaccgaggccctaaagagcgccctcgacgcgaaggcaaaccgaggaaggagaagccccgaaaagaggaacggccaaagaaagagcggccacgtaaggaggaaagaccaagagctgcccgtgagcccagagaggccctgccacagaggtgggagtcaagagagggcggtcatcgcccttgggctcgtgactcacgtgatgcggagcctaggaaaaaacaagcctgggtctcacccaggagaccagatgaagaacagagacccggttcaaggcaaaagctcagggctggaaagggaagggattag

SEQ ID NO: 239150 - protein, 160 aa, Artificial Sequence
  derived and/or modified sequence
MEIPVPVQPSWLRRASAPLPGLSAPGRLFDQRFGEGLLEAELAALCPTTLAPYYLRAPSVALPVAQVPTDPGHFSVLLDVKHFSPEEIAVKVVGEHVEVHARHEERPDEHGFVAREFHRRYRLPPGVDPAAVTSALSPEGVLSIQAAPASAQAPPPAAAK

SEQ ID NO: 239151 - protein, 196 aa, Artificial Sequence
  derived and/or modified sequence
MEIPVPVQPSWLRRASAPLPGLSAPGRLFDQRFGEGLLEAELAALCPTTLAPYYLRAPSVALPVAQVPTDPGHFSVLLDVKHFSPEEIAVKVVGEHVEVHARHEERPDEHGFVAREFHRRYRLPPGVDPAAVTSALSPEGVLSIQAAPAPREPPQAPSIKADLTPPSQMSRVRQGLSSHPLLDSALTSILDTALIT

SEQ ID NO: 239152 - DNA, 483 bp, Artificial Sequence
  derived and/or modified sequence
atggaaatcccagttccagtgcagcctagttggttgcgacgagcgtctgcccccctgcctggtctctccgcacctggtcgccttttcgatcagagattcggcgagggactcctcgaggcagaactggcggccttgtgccctactactttggccccttactacctaagggcccctagtgtggcgctgccggtcgcccaggttcccacggaccccggacatttctcagtcctactggatgtgaaacatttcagcccagaagagattgccgtgaaggtggtgggcgaacacgtggaggtgcatgcaaggcatgaggaacgacctgacgagcatggttttgtggcacgcgagttccatcgcaggtacaggctaccacccggcgtcgacccagccgctgttacctccgctctaagccccgaaggcgtcctgtcgattcaggccgctcccgccagtgcccaagcaccccctcccgcagctgcaaaatag

SEQ ID NO: 239153 - DNA, 483 bp, Artificial Sequence
  derived and/or modified sequence
atggaaattccagttcctgttcaaccaagttggctgcgcagggcctctgccccactgcccggactgtcagctccaggacgtctatttgaccagcgatttggagaggggctcctcgaggctgaactcgccgctctgtgccccactacattagccccttactacttgagagccccttctgtagccttaccggtcgcccaagtgcctaccgatccaggccatttcagcgttttgctagacgtgaagcacttcagcccagaagaaatcgccgtgaaggtggtgggcgaacatgtggaggtccacgcgcgtcacgaagagagacccgatgaacacgggttcgtcgctagagagttccataggcggtataggctgccacccggggtagaccccgcagccgtgacatctgccctctcacctgaaggggtgttgtcgatccaagctgctccagcatccgcccaggcaccgccccccgcagctgccaagtag

SEQ ID NO: 239154 - DNA, 591 bp, Artificial Sequence
  derived and/or modified sequence
atggagattcccgtgcccgtgcagccttcgtggctgcgtagggcttctgctcctctgccagggctttcagcaccaggccggctgtttgaccagcgatttggagaggggctcctggaagccgaactcgcagctctttgcccaactactcttgccccttactaccttagagctccaagcgtggcactgcccgtggcgcaggtgccaacagatcccggacacttcagcgtcctcttggacgtaaaacattttagtcccgaggaaatcgccgtgaaggtggtgggcgaacacgtcgaagtgcacgccagacacgaggaacggcccgacgaacatgggttcgtcgctcgcgagtttcatcgacgctatagacttccccctggagttgatcccgccgcagtgacgtcagctctctcacccgagggggtgctgtcaattcaagccgctccggcgccacgggagcctccacaggcgccttcaatcaaggccgatctcactcctccttcccagatgtcgcgagtacgccaaggactgtcaagccaccccctgctagactctgcgctcacctctattctggacacagcgctcattacgtag

SEQ ID NO: 239155 - DNA, 1634 bp, Artificial Sequence
  derived and/or modified sequence
gaccaatgaaagagaggaaacagaagtacccggagggaggtgtttcaggattggctgggacgactgcctgcccgacagggcgtgtttgattggagaacctgccgagtgtagcagtaattggcaagaccgtgcaccaatgggaaggatctgaggctgggcttgcggttaggaggggcactgcaacgcggaggagcaggatggagatccctgtgcctgtgcagccgtcttggctgcgccgcgcctcggccccgttgcccggactttcggcgcccggacgcctctttgaccagcgcttcggcgaggggctgctggaggccgagctggctgcgctctgccccaccacgctcgccccctactacctgcgcgcacccagcgtggcgctgcccgtcgcccaggtgccgacggaccccggccacttttcggtgctgctagacgtgaagcacttctcgccggaggaaattgctgtcaaggtggtgggcgaacacgtggaggtgcacgcgcgccacgaggagcgcccggatgagcacggattcgtcgcgcgcgagttccaccgtcgctaccgcctgccgcctggcgtggatccggctgccgtgacgtccgcgctgtcccccgagggcgtcctgtccatccaggccgcaccagcgtcggcccaggccccaccgccagccgcagccaagtaggagggggctgggccgcgcccgcaccccgggagcctcctcaggctccctctattaaagccgatctgactccgcccagccagatgtcccgagtgcgccaaggactgtcctctcacccactcctggattctgccctgacctccatcctggacactgccttgataacatagacccttccactgacaccctcgctctcacaccccctccagctttccgaccccacaccgacaactccccggcttccagaccctaccagcactaccctaaccctcagccgacagtctcagccccaccgacccactttcttggcatatagccccacttaagacccctcctctacttccttctgagtcctctacaaagacatccgggtactacatttccatcccttccctattttgacaccaaattatggtgtagacagccctcccccaaccccaggccagtcaggcacaatccccccaccccccaaacgtcctggactgcacagacctcccactccagaccatccaggcctggttcccaagacccgatccttcccctgcaaccagacagtctacaactgccccctccagcccattttctgccgtgaaaccccagccagccacaccagactctggaaccctttttcgactgccccaactcttggacaccaggccaactagaacacccaacaccaaactgtacagactctcccaccccaacctccccagactctgcacggatgtcctaggccccctccccaactctaaccagaccccatccccctaagtccctttgtcttgacccccaagtcttcaaccagatatcctcggcaacccacctcccaccctcctcctcttctccttcaagacccaactgagcacccgctctgattccccacagcctttctccctgccaccactcccttagtctttcccaggcttactctcccaataaatgtgctagagctctgcc

SEQ ID NO: 239156 - DNA, 1457 bp, Artificial Sequence
  derived and/or modified sequence
actgcaacgcggaggagcaggatggagatccctgtgcctgtgcagccgtcttggctgcgccgcgcctcggccccgttgcccggactttcggcgcccggacgcctctttgaccagcgcttcggcgaggggctgctggaggccgagctggctgcgctctgccccaccacgctcgccccctactacctgcgcgcacccagcgtggcgctgcccgtcgcccaggtgccgacggaccccggccacttttcggtgctgctagacgtgaagcacttctcgccggaggaaattgctgtcaaggtggtgggcgaacacgtggaggtgcacgcgcgccacgaggagcgcccggatgagcacggattcgtcgcgcgcgagttccaccgtcgctaccgcctgccgcctggcgtggatccggctgccgtgacgtccgcgctgtcccccgagggcgtcctgtccatccaggccgcaccagcgtcggcccaggccccaccgccagccgcagccaagtaggagggggctgggccgcgcccgcaccccgggagcctcctcaggctccctctattaaagccgatctgactccgcccagccagatgtcccgagtgcgccaaggactgtcctctcacccactcctggattctgccctgacctccatcctggacactgccttgataacatagacccttccactgacaccctcgctctcacaccccctccagctttccgaccccacaccgacaactccccggcttccagaccctaccagcactaccctaaccctcagccgacagtctcagccccaccgacccactttcttggcatatagccccacttaagacccctcctctacttccttctgagtcctctacaaagacatccgggtactacatttccatcccttccctattttgacaccaaattatggtgtagacagccctcccccaaccccaggccagtcaggcacaatccccccaccccccaaacgtcctggactgcacagacctcccactccagaccatccaggcctggttcccaagacccgatccttcccctgcaaccagacagtctacaactgccccctccagcccattttctgccgtgaaaccccagccagccacaccagactctggaaccctttttcgactgccccaactcttggacaccaggccaactagaacacccaacaccaaactgtacagactctcccaccccaacctccccagactctgcacggatgtcctaggccccctccccaactctaaccagaccccatccccctaagtccctttgtcttgacccccaagtcttcaaccagatatcctcggcaacccacctcccaccctcctcctcttctccttcaagacccaactgagcacccgctctgattccccacagcctttctccctgccaccactcccttagtctttcccaggcttactctcccaataaatgtgctagagctctgc

SEQ ID NO: 239157 - DNA, 1391 bp, Artificial Sequence
  derived and/or modified sequence
aacgcggaggagcaggatggagatccctgtgcctgtgcagccgtcttggctgcgccgcgcctcggccccgttgcccggactttcggcgcccggacgcctctttgaccagcgcttcggcgaggggctgctggaggccgagctggctgcgctctgccccaccacgctcgccccctactacctgcgcgcacccagcgtggcgctgcccgtcgcccaggtgccgacggaccccggccacttttcggtgctgctagacgtgaagcacttctcgccggaggaaattgctgtcaaggtggtgggcgaacacgtggaggtgcacgcgcgccacgaggagcgcccggatgagcacggattcgtcgcgcgcgagttccaccgtcgctaccgcctgccgcctggcgtggatccggctgccgtgacgtccgcgctgtcccccgagggcgtcctgtccatccaggccgcaccagcaccccgggagcctcctcaggctccctctattaaagccgatctgactccgcccagccagatgtcccgagtgcgccaaggactgtcctctcacccactcctggattctgccctgacctccatcctggacactgccttgataacatagacccttccactgacaccctcgctctcacaccccctccagctttccgaccccacaccgacaactccccggcttccagaccctaccagcactaccctaaccctcagccgacagtctcagccccaccgacccactttcttggcatatagccccacttaagacccctcctctacttccttctgagtcctctacaaagacatccgggtactacatttccatcccttccctattttgacaccaaattatggtgtagacagccctcccccaaccccaggccagtcaggcacaatccccccaccccccaaacgtcctggactgcacagacctcccactccagaccatccaggcctggttcccaagacccgatccttcccctgcaaccagacagtctacaactgccccctccagcccattttctgccgtgaaaccccagccagccacaccagactctggaaccctttttcgactgccccaactcttggacaccaggccaactagaacacccaacaccaaactgtacagactctcccaccccaacctccccagactctgcacggatgtcctaggccccctccccaactctaaccagaccccatccccctaagtccctttgtcttgacccccaagtcttcaaccagatatcctcggcaacccacctcccaccctcctcctcttctccttcaagacccaactgagcacccgctctgattccccacagcctttctccctgccaccactcccttagtctttcccaggcttactctcccaataaatgtgctagagctct

SEQ ID NO: 239158 - DNA, 483 bp, Artificial Sequence
  derived and/or modified sequence
atggagatccctgtgcctgtgcagcccagctggctgcggcgggccagcgcccccctgcccggcctgagcgcccctggccgcctgtttgaccagagatttggagagggcctgctggaggccgagctggccgccctgtgccccaccaccctggccccctactacctgcgggcccccagcgtggccctgcctgtggcccaggtgcccacagatcctggccacttctctgtgctgctggatgtgaagcacttcagccctgaggagattgctgtgaaggtggtgggggagcacgtggaggtgcacgcccggcatgaggagaggccagatgagcacggctttgtggcccgggagttccaccggcgctaccgcctgcccccaggagtggaccctgctgctgtgaccagcgccctgagccctgagggcgtgctgagcatccaggccgccccagccagcgcccaggcccctcctcctgctgctgccaagtag

SEQ ID NO: 239159 - DNA, 591 bp, Artificial Sequence
  derived and/or modified sequence
atggagatccctgtgcctgtgcagcccagctggctgcggcgggccagcgcccccctgcccggcctgagcgcccctggccgcctgtttgaccagagatttggagagggcctgctggaggccgagctggccgccctgtgccccaccaccctggccccctactacctgcgggcccccagcgtggccctgcctgtggcccaggtgcccacagatcctggccacttctctgtgctgctggatgtgaagcacttcagccctgaggagattgctgtgaaggtggtgggggagcacgtggaggtgcacgcccggcatgaggagaggccagatgagcacggctttgtggcccgggagttccaccggcgctaccgcctgcccccaggagtggaccctgctgctgtgaccagcgccctgagccctgagggcgtgctgagcatccaggccgccccagccccccgggagcccccccaggcccccagcatcaaggctgacctgaccccacccagccagatgagccgggtgcggcagggcctgagcagccaccccctgctggacagcgccctgaccagcatcctggacacagccctgatcacctag

SEQ ID NO: 239160 - DNA, 483 bp, Artificial Sequence
  derived and/or modified sequence
atggagatccccgtgcccgtgcagcccagctggctgcggcgggccagtgctcctctcccaggactgtcagcaccggggcgactcttcgaccagaggttcggcgaggggctcttggaagccgaattggcggcactctgcccaacaaccctcgcaccctactatttacgagctccaagcgtcgctttgccagtagcccaagttccgactgatccaggccacttctctgtgctgctggacgtaaagcatttctcccctgaggaaatagccgttaaagtggtgggtgagcacgtggaggtgcacgcacggcacgaggagaggccagatgagcacggcttcgtcgcccgagagttccacaggcggtatagactgccacctggggtggatcctgcagcggtgacgagcgccctgtctcctgaaggcgtcctctctatccaggcggccccagcctcggctcaggcccccccacccgcggccgctaagtag

SEQ ID NO: 239161 - DNA, 483 bp, Artificial Sequence
  derived and/or modified sequence
atggagatccccgtgcccgtgcagcccagctggctgcggcgggcctcagctccgcttcccggcctatctgcccccgggagactctttgaccagaggttcggagaaggcctgctggaagcagagcttgccgccttatgtccaactaccttagctccatattatcttcgagctccgagtgtagccctcccagtggctcaggtgcccactgatcctggccacttttcagttctcctagacgtgaaacacttttcgcctgaagaaatcgctgtcaaagtcgtcggcgaacacgtggaagttcacgcaaggcacgaggagcgccctgatgagcacgggtttgtagcccgagaatttcaccgacggtacaggctgccccctggcgtggatcctgctgcggtcaccagtgctctgtcacccgagggcgtactttctatccaggcagcccctgcaagcgcccaggctcctcccccagcagccgccaagtag

SEQ ID NO: 239162 - DNA, 591 bp, Artificial Sequence
  derived and/or modified sequence
atggagatccccgtgcccgtgcagcccagctggctgcggcgggcctccgctccactgcccggactttcagcgcctgggaggttattcgaccagcgcttcggcgaggggctactggaggcggagcttgctgctctgtgtcccactaccctcgccccatactatctgcgtgctccgtctgtcgcactgcctgtggcccaggtgcccaccgaccccggacactttagtgttctgttggacgtaaaacattttagcccggaagaaattgccgtcaaagtggtcggggaacatgtggaagtgcatgcacggcatgaagaaagaccggacgagcacggtttcgtggcacgcgagtttcatcgcagatacaggttgccacctggagtggatccggccgctgtgacatccgcattgagtccagagggggtgttgtctatccaggcggcgcccgcaccccgagaacctcctcaggcccctagtattaaggcggacttaacacccccttctcaaatgagtagggtccgccaaggtctttcaagtcatcccttactcgactccgcgttgacctccattctggacacagcactgatcacatag

SEQ ID NO: 239163 - DNA, 483 bp, Artificial Sequence
  derived and/or modified sequence
atggaaatcccggttccagtgcaaccttcatggttacggcgagcctcggctcccctgccaggactgagcgccccaggaagattgtttgatcagagattcggagagggcttactggaggcggagctcgcagctttgtgtccaacgacgttggccccatattatctccgcgctccttccgtcgctctgcccgtcgcccaggttcccacagacccaggacacttcagcgttcttctggacgtgaaacacttcagtccggaggagattgcagtcaaagtggtcggcgagcacgtggaggtgcacgccagacatgaggaaagacccgacgagcatggcttcgttgccagggagttccaccgccgttacagactcccaccgggtgtggaccccgctgctgtgactagtgcactctctcccgaaggggtgttgagtattcaggccgcacccgcaagcgcacaagcccctccaccagccgctgccaaatag

SEQ ID NO: 239164 - DNA, 483 bp, Artificial Sequence
  derived and/or modified sequence
atggaaatccctgtccccgtccagccctcttggcttcgccgtgcgtcagctcccctaccaggcctgtccgcacccggacgcctctttgaccagcgcttcggcgagggactgctggaagcagagctggcagccctttgccccacaacactcgcgccatattatctgcgggctccctcagtcgctttgccagtcgcccaggtccctacggatccaggccatttctccgttctgctggatgttaaacacttttccccggaggaaattgccgttaaggtggtcggagaacacgtcgaagtccacgcaagacatgaggaacggcctgacgaacacgggttcgttgctagggaatttcataggcggtatagattaccccctggggtcgacccagctgcggtcacaagcgctttatcaccggagggtgtgctaagtatacaggctgcaccagcgtccgcacaggcaccccctccggctgctgccaagtag

SEQ ID NO: 239165 - DNA, 591 bp, Artificial Sequence
  derived and/or modified sequence
atggaaatccccgtcccagttcagcctagctggctgaggagggcttctgctccattgcccggactgagcgcccctggcaggctctttgaccagcgctttggcgaaggactccttgaggcggaactcgccgcattatgcccgacaacgctggcaccatattatttgagggcccctagcgttgctctgcctgtagcccaagtccctactgatccaggacatttttcagtactcctggacgtcaagcatttcagtcccgaggagatcgccgtaaaggtggtgggggaacacgtggaggtgcatgccaggcacgaggaacggccagacgaacacggatttgttgccagggaattccaccgtcgataccggcttcctccaggagtggatcctgctgccgttacgagtgccctgtcacctgagggtgtactgtccatccaggccgcaccagctccacgggaaccacctcaggccccttctatcaaagccgatcttaccccaccaagccagatgtcccgcgttcgacaaggtctctcatcacatcccctgctggactccgccctgacgagcatcctggacacagccctcatcacctag

SEQ ID NO: 239166 - DNA, 483 bp, Artificial Sequence
  derived and/or modified sequence
atggaaatacctgtacccgtccagccgtcttggttacgtagagcaagtgcccctctgcccggcttgagcgcccctggccgactgttcgatcagcggtttggcgagggcctgctcgaggctgagctcgccgcgctctgccctaccacccttgctccatattatttgcgcgccccttctgtggccttacctgtcgcccaagtcccaaccgatcccggacacttttcagtccttctcgatgtcaagcacttctcacccgaggagattgccgtgaaggtcgtgggagaacacgttgaagtccatgcccgccacgaggaacggccagatgaacacggctttgtggctcgagagttccaccgtaggtaccggctgccacctggtgtcgacccagctgcggtaacatctgccctatccccagaaggcgtcctcagtatccaggctgcccctgcatctgcgcaagctccaccccctgctgctgcaaagtag

SEQ ID NO: 239167 - DNA, 483 bp, Artificial Sequence
  derived and/or modified sequence
atggaaatacctgtacccgtccagccgtcttggttacgtagagcaagtgcccctctgcccggcttgagcgcccctggccgactgttcgatcagcggtttggcgagggcctgctcgaggctgagctcgccgcgctctgccctaccacccttgctccatattatttgcgcgccccttctgtggccttacctgtcgcccaagtcccaaccgatcccggacacttttcagtccttctcgatgtcaagcacttctcacccgaggagattgccgtgaaggtcgtgggagaacacgttgaagtccatgcgagacatgaagaaagacctgatgagcatggcttcgtggccagggagtttcaccggagataccgactgccccccggagtagacccagctgcagtgacatccgctctcagtcctgaaggcgttctatctatccaagccgcgcccgcaagcgcccaggccccccctccagccgcggctaagtag

SEQ ID NO: 239168 - DNA, 483 bp, Artificial Sequence
  derived and/or modified sequence
atggagatccccgtgcccgtgcagcccagctggctgagaagagccagcgcccccctgcccggcctgagcgcccccggcagactgttcgaccagagattcggcgagggcctgctggaggccgagctggccgccctgtgccccaccaccctggccccctactacctgagagcccccagcgtggccctgcccgtggcccaggtgcccaccgaccccggccacttcagcgtgctgctggacgtgaagcacttcagccccgaggagatcgccgtgaaggtggtgggcgagcacgtggaggtgcacgccagacacgaggagagacccgacgagcacggcttcgtggccagagagttccacagaagatacagactgccccccggcgtggaccccgccgccgtgaccagcgccctgagccccgagggcgtgctgagcatccaggccgcccccgccagcgcccaggcccccccccccgccgccgccaagtag

SEQ ID NO: 239169 - DNA, 591 bp, Artificial Sequence
  derived and/or modified sequence
atggagatccccgtgcccgtgcagcccagctggctgagaagagccagcgcccccctgcccggcctgagcgcccccggcagactgttcgaccagagattcggcgagggcctgctggaggccgagctggccgccctgtgccccaccaccctggccccctactacctgagagcccccagcgtggccctgcccgtggcccaggtgcccaccgaccccggccacttcagcgtgctgctggacgtgaagcacttcagccccgaggagatcgccgtgaaggtggtgggcgagcacgtggaggtgcacgccagacacgaggagagacccgacgagcacggcttcgtggccagagagttccacagaagatacagactgccccccggcgtggaccccgccgccgtgaccagcgccctgagccccgagggcgtgctgagcatccaggccgcccccgcccccagagagcccccccaggcccccagcatcaaggccgacctgaccccccccagccagatgagcagagtgagacagggcctgagcagccaccccctgctggacagcgccctgaccagcatcctggacaccgccctgatcacctag

SEQ ID NO: 239170 - DNA, 1480 bp, Artificial Sequence
  derived and/or modified sequence
actgcaacgcggaggagcaggatggagatccctgtgcctgtgcagccgtcttggctgcgccgcgcctcggccccgttgcccggactttcggcgcccggacgcctctttgaccagcgcttcggcgaggggctgctggaggccgagctggctgcgctctgccccaccacgctcgccccctactacctgcgcgcacccagcgtggcgctgcccgtcgcccaggtgccgacggaccccggccacttttcggtgctgctagacgtgaagcacttctcgccggaggaaattgctgtcaaggtggtgggcgaacacgtggaggtgcacgcgcgccacgaggagcgcccggatgagcacggattcgtcgcgcgcgagttccaccgtcgctaccgcctgccgcctggcgtggatccggctgccgtgacgtccgcgctgtcccccgagggcgtcctgtccatccaggccgcaccagcgtcggcccaggccccaccgccagccgcagccaagtaggagggggctgggccgcgcccgcaccccgggagcctcctcaggctccctctattaaagccgatctgactccgcccagccagatgtcccgagtgcgccaaggactgtcctctcacccactcctggattctgccctgacctccatcctggacactgccttgataacatagacccttccactgacaccctcgctctcacaccccctccagctttccgaccccacaccgacaactccccggcttccagaccctaccagcactaccctaaccctcagccgacagtctcagccccaccgacccactttcttggcatatagccccacttaagacccctcctctacttccttctgagtcctctacaaagacatccgggtactacatttccatcccttccctattttgacaccaaattatggtgtagacagccctcccccaaccccaggccagtcaggcacaatccccccaccccccaaacgtcctggactgcacagacctcccactccagaccatccaggcctggttcccaagacccgatccttcccctgcaaccagacagtctacaactgccccctccagcccattttctgccgtgaaaccccagccagccacaccagactctggaaccctttttcgactgccccaactcttggacaccaggccaactagaacacccaacaccaaactgtacagactctcccaccccaacctccccagactctgcacggatgtcctaggccccctccccaactctaaccagaccccatccccctaagtccctttgtcttgacccccaagtcttcaaccagatatcctcggcaacccacctcccaccctcctcctcttctccttcaagacccaactgagcacccgctctgattccccacagcctttctccctgccaccactcccttagtctttcccaggcttactctcccaataaatgtgctagagctctgccaaaaaaaaaaaaaaaaaaaaaa

SEQ ID NO: 239171 - protein, 639 aa, Artificial Sequence
  derived and/or modified sequence
MPKVMKDVVHPLGGEEPSMARAVVRSVGGFTLGLSLATAYGLLELLVEGHSPWGCLVGTLTLAAFLSLGMGFSRQVRATVLLLLPQAFSRQGRTLLLVAAFGLVLQGPCANTLRNFTRASEAVACGAELALNQTAEVLQRAKQPLVSALNKIKAIARKTKEVADRVRKFFRSIMDGVKHIARALRNVWQWLLHIGDVCNSELGNPYLKCARVFDDAKDSCMMVIPQAYHLCYVLMPFKLALCGLASLVQVFCVIPKYIQPFLRQTIGTPVIQLLNRVRQEFEFNMTATHHFSVDLNASRSLSQVAMDLHEAVSMKLHRVREALALMGFTTPLLLVLLYLQALFYRYCYLNWDHYDNIYITSRFLRMEAVRSTAGLPTVLPLSAHEARRYIPPGSIFLSQWEKFFYILETFNLIRHLLLVLFLVFLDYAVFWVLDLARHQLQGEIVARSPVLVSLTVEGTGYAGNIYRDLVSAFDVLQQGNISILSRRCLLRPSEPDSTGYIVIGVMYGLCFFITLFGSYVSRLRRVICASYYPSREQERISYLYNVLLSRRTNLLAALHRSVRRRAADQGHRSAFLVLASRCPCLGPFVSHFWLHQAYCLGCGQPQDEGDMENTVSCSTPGCQGFICKWHCSSSLVCTP

SEQ ID NO: 239172 - protein, 773 aa, Artificial Sequence
  derived and/or modified sequence
MPKVMKDVVHPLGGEEPSMARAVVRSVGGFTLGLSLATAYGLLELLVEGHSPWGCLVGTLTLAAFLSLGMGFSRQVRATVLLLLPQAFSRQGRTLLLVAAFGLVLQGPCANTLRNFTRASEAVACGAELALNQTAEVLQRAKQPLVSALNKIKAIARKTKEVADRVRKFFRSIMDGVKHIARALRNVWQWLLHIGDVCNSELGNPYLKCARVFDDAKDSCMMVIPQAYHLCYVLMPFKLALCGLASLVQVFCVIPKYIQPFLRQTIGTPVIQLLNRVRQEFEFNMTATHHFSVDLNASRSLSQVAMDLHEAVSMKLHRVREALALMGFTTPLLLVLLYLQALFYRYCYLNWDHYDNIYITSRFLRMEAVRSTAGLPTVLPLSAHEARRYIPPGSIFLSQWEKFFYILETFNLIRHLLLVLFLVFLDYAVFWVLDLARHQLQGEIVARSPVLVSLTVEGTGYAGNIYRDLVSAFDVLQQGNISILSRRCLLRPSEPDSTGYIVIGVMYGLCFFITLFGSYVSRLRRVICASYYPSREQERISYLYNVLLSRRTNLLAALHRSVRRRAADQGHRSAFLVLASRCPCLGPFVSHFWLHQAYCLGCGQPQDEGDMENTVSCSTPGCQGLYCLTCFRLLDNTCSVCASPLSYQGDLDLELDSSDEEGPQLWLAAAQRKDPEQAWLLQQQLQEVLGRSLSMESTSESSDLDEEKGPQQRKHGQQPLPEAHQPVSILTSPEPHRPPETSSATKGAPTPASEPSVPLSPPSLPDPSHPPPK

SEQ ID NO: 239173 - DNA, 1920 bp, Artificial Sequence
  derived and/or modified sequence
atgcccaaggtgatgaaggacgtggtgcaccccctgggcggcgaggagcccagcatggccagagccgtggtgagaagcgtgggcggcttcaccctgggcctgagcctggccaccgcctacggcctgctggagctgctggtggagggccacagcccctggggctgcctggtgggcaccctgaccctggccgccttcctgagcctgggcatgggcttcagcagacaggtgagagccaccgtgctgctgctgctgccccaggccttcagcagacagggcagaaccctgctgctggtggccgccttcggcctggtgctgcagggcccctgcgccaacaccctgagaaacttcaccagagccagcgaggccgtggcctgcggcgccgagctggccctgaaccagaccgccgaggtgctgcagagagccaagcagcccctggtgagcgccctgaacaagatcaaggccatcgccagaaagaccaaggaggtggccgacagagtgagaaagttcttcagaagcatcatggacggcgtgaagcacatcgccagagccctgagaaacgtgtggcagtggctgctgcacatcggcgacgtgtgcaacagcgagctgggcaacccctacctgaagtgcgccagagtgttcgacgacgccaaggacagctgcatgatggtgatcccccaggcctaccacctgtgctacgtgctgatgcccttcaagctggccctgtgcggcctggccagcctggtgcaggtgttctgcgtgatccccaagtacatccagcccttcctgagacagaccatcggcacccccgtgatccagctgctgaacagagtgagacaggagttcgagttcaacatgaccgccacccaccacttcagcgtggacctgaacgccagcagaagcctgagccaggtggccatggacctgcacgaggccgtgagcatgaagctgcacagagtgagagaggccctggccctgatgggcttcaccacccccctgctgctggtgctgctgtacctgcaggccctgttctacagatactgctacctgaactgggaccactacgacaacatctacatcaccagcagattcctgagaatggaggccgtgagaagcaccgccggcctgcccaccgtgctgcccctgagcgcccacgaggccagaagatacatcccccccggcagcatcttcctgagccagtgggagaagttcttctacatcctggagaccttcaacctgatcagacacctgctgctggtgctgttcctggtgttcctggactacgccgtgttctgggtgctggacctggccagacaccagctgcagggcgagatcgtggccagaagccccgtgctggtgagcctgaccgtggagggcaccggctacgccggcaacatctacagagacctggtgagcgccttcgacgtgctgcagcagggcaacatcagcatcctgagcagaagatgcctgctgagacccagcgagcccgacagcaccggctacatcgtgatcggcgtgatgtacggcctgtgcttcttcatcaccctgttcggcagctacgtgagcagactgagaagagtgatctgcgccagctactaccccagcagagagcaggagagaatcagctacctgtacaacgtgctgctgagcagaagaaccaacctgctggccgccctgcacagaagcgtgagaagaagagccgccgaccagggccacagaagcgccttcctggtgctggccagcagatgcccctgcctgggccccttcgtgagccacttctggctgcaccaggcctactgcctgggctgcggccagccccaggacgagggcgacatggagaacaccgtgagctgcagcacccccggctgccagggcttcatctgcaagtggcactgcagcagcagcctggtgtgcaccccctag

SEQ ID NO: 239174 - DNA, 2322 bp, Artificial Sequence
  derived and/or modified sequence
atgcccaaggtgatgaaggacgtggtgcaccccctgggcggcgaggagcccagcatggccagagccgtggtgagaagcgtgggcggcttcaccctgggcctgagcctggccaccgcctacggcctgctggagctgctggtggagggccacagcccctggggctgcctggtgggcaccctgaccctggccgccttcctgagcctgggcatgggcttcagcagacaggtgagagccaccgtgctgctgctgctgccccaggccttcagcagacagggcagaaccctgctgctggtggccgccttcggcctggtgctgcagggcccctgcgccaacaccctgagaaacttcaccagagccagcgaggccgtggcctgcggcgccgagctggccctgaaccagaccgccgaggtgctgcagagagccaagcagcccctggtgagcgccctgaacaagatcaaggccatcgccagaaagaccaaggaggtggccgacagagtgagaaagttcttcagaagcatcatggacggcgtgaagcacatcgccagagccctgagaaacgtgtggcagtggctgctgcacatcggcgacgtgtgcaacagcgagctgggcaacccctacctgaagtgcgccagagtgttcgacgacgccaaggacagctgcatgatggtgatcccccaggcctaccacctgtgctacgtgctgatgcccttcaagctggccctgtgcggcctggccagcctggtgcaggtgttctgcgtgatccccaagtacatccagcccttcctgagacagaccatcggcacccccgtgatccagctgctgaacagagtgagacaggagttcgagttcaacatgaccgccacccaccacttcagcgtggacctgaacgccagcagaagcctgagccaggtggccatggacctgcacgaggccgtgagcatgaagctgcacagagtgagagaggccctggccctgatgggcttcaccacccccctgctgctggtgctgctgtacctgcaggccctgttctacagatactgctacctgaactgggaccactacgacaacatctacatcaccagcagattcctgagaatggaggccgtgagaagcaccgccggcctgcccaccgtgctgcccctgagcgcccacgaggccagaagatacatcccccccggcagcatcttcctgagccagtgggagaagttcttctacatcctggagaccttcaacctgatcagacacctgctgctggtgctgttcctggtgttcctggactacgccgtgttctgggtgctggacctggccagacaccagctgcagggcgagatcgtggccagaagccccgtgctggtgagcctgaccgtggagggcaccggctacgccggcaacatctacagagacctggtgagcgccttcgacgtgctgcagcagggcaacatcagcatcctgagcagaagatgcctgctgagacccagcgagcccgacagcaccggctacatcgtgatcggcgtgatgtacggcctgtgcttcttcatcaccctgttcggcagctacgtgagcagactgagaagagtgatctgcgccagctactaccccagcagagagcaggagagaatcagctacctgtacaacgtgctgctgagcagaagaaccaacctgctggccgccctgcacagaagcgtgagaagaagagccgccgaccagggccacagaagcgccttcctggtgctggccagcagatgcccctgcctgggccccttcgtgagccacttctggctgcaccaggcctactgcctgggctgcggccagccccaggacgagggcgacatggagaacaccgtgagctgcagcacccccggctgccagggcctgtactgcctgacctgcttcagactgctggacaacacctgcagcgtgtgcgccagccccctgagctaccagggcgacctggacctggagctggacagcagcgacgaggagggcccccagctgtggctggccgccgcccagagaaaggaccccgagcaggcctggctgctgcagcagcagctgcaggaggtgctgggcagaagcctgagcatggagagcaccagcgagagcagcgacctggacgaggagaagggcccccagcagagaaagcacggccagcagcccctgcccgaggcccaccagcccgtgagcatcctgaccagccccgagccccacagaccccccgagaccagcagcgccaccaagggcgcccccacccccgccagcgagcccagcgtgcccctgagcccccccagcctgcccgaccccagccaccccccccccaagtag

SEQ ID NO: 239175 - DNA, 2000 bp, Artificial Sequence
  derived and/or modified sequence
agaatacggtgagaaattccaggagcacagaagtcagcgggcatctcctggagacaggcagacatttggtctcagcagccatgcccaaagtcatgaaggatgttgtgcaccccttggggggagaggagcctagcatggcgagagctgtggttcgcagcgtgggaggttttaccctgggcttgtctttagccacggcctacgggcttctggagctactggtggaaggccacagcccctggggttgcctggtgggcaccctcactttggctgccttccttagcctgggcatgggattctctcgccaggtccgagccactgtcctcctgctgctgcctcaggccttctccaggcagggccggacactactgttggtggctgcttttgggttggtgcttcaagggccttgtgccaacactctacgcaacttcacccgggccagcgaggctgtagcctgtggggcagagctggccctgaaccagaccgccgaagtgctacagagggccaagcaacctcttgtcagtgccctgaacaagattaaagctattgcccggaagaccaaagaggtggctgaccgggtccgcaagttctttcggtcaatcatggatggtgtgaaacacatagccagggctctccggaatgtgtggcagtggctcctgcacatcggcgatgtgtgcaactcggaactgggcaacccttacctgaagtgtgcacgggttttcgatgatgccaaggacagctgcatgatggtcataccacaagcctaccacctgtgttacgtgctcatgcccttcaaactggcgctctgtggacttgccagcctggtccaggtgttctgcgtcatccctaagtacattcaacccttcttgcgccagaccatcggcacccccgtgattcagttgctcaaccgggtgcgtcaggagtttgagttcaacatgacagccacccaccacttctctgtggatctcaatgcctctcggagcctgtcccaggtagccatggacctccacgaggctgtcagcatgaagctgcaccgtgtccgagaggccctggctctgatgggcttcaccacgcctctgctgcttgtgcttctctacctccaagccctattttaccggtattgttacctgaactgggaccattatgacaatatctacatcactagccgattcctgcgcatggaggctgtgcgctccacggcagggctgcccacagtgctaccgctcagtgctcacgaggccaggcgctacatcccaccgggctccatcttcttgtcccaatgggagaagtttttttacattctggagaccttcaaccttatccgacacctcctcctcgtgctgttcctagtcttcctagactatgctgtcttctgggtgcttgacctggcccggcaccagctgcagggggagattgtggcccgcagtcctgtgttggtgtctctaaccgtggaaggtactggctacgctgggaatatttatcgtgacctggtgtcagcatttgatgtcctgcagcaaggcaacatcagtattttgtcccggcgttgtctccttcgtccctcggagcctgacagcactggctacatagtcattggcgtcatgtatggcctatgcttcttcatcaccctgtttggcagctatgtcagccggctgcggcgagtcatctgtgcctcctactacccatcccgggagcaggagaggatctcctacctgtacaatgtacttctgagccgccgaaccaatctgttggctgccctgcaccgatcagtgaggcggcgggcggctgaccagggccacagaagtgccttcctagtgctggccagtcggtgcccctgcctaggtccatttgtcagccacttttggctgcatcaggcctactgcctgggctgtgggcagccccaggatgagggagacatggagaacactgtgtcctgcagtacccccggctgccaaggatttatatgcaagtggcattgcagcagctccctagtgtgcaccccttga

SEQ ID NO: 239176 - DNA, 2392 bp, Artificial Sequence
  derived and/or modified sequence
ggagcacagaagtcagcgggcatctcctggagacaggcagacatttggtctcagcagccatgcccaaagtcatgaaggatgttgtgcaccccttggggggagaggagcctagcatggcgagagctgtggttcgcagcgtgggaggttttaccctgggcttgtctttagccacggcctacgggcttctggagctactggtggaaggccacagcccctggggttgcctggtgggcaccctcactttggctgccttccttagcctgggcatgggattctctcgccaggtccgagccactgtcctcctgctgctgcctcaggccttctccaggcagggccggacactactgttggtggctgcttttgggttggtgcttcaagggccttgtgccaacactctacgcaacttcacccgggccagcgaggctgtagcctgtggggcagagctggccctgaaccagaccgccgaagtgctacagagggccaagcaacctcttgtcagtgccctgaacaagattaaagctattgcccggaagaccaaagaggtggctgaccgggtccgcaagttctttcggtcaatcatggatggtgtgaaacacatagccagggctctccggaatgtgtggcagtggctcctgcacatcggcgatgtgtgcaactcggaactgggcaacccttacctgaagtgtgcacgggttttcgatgatgccaaggacagctgcatgatggtcataccacaagcctaccacctgtgttacgtgctcatgcccttcaaactggcgctctgtggacttgccagcctggtccaggtgttctgcgtcatccctaagtacattcaacccttcttgcgccagaccatcggcacccccgtgattcagttgctcaaccgggtgcgtcaggagtttgagttcaacatgacagccacccaccacttctctgtggatctcaatgcctctcggagcctgtcccaggtagccatggacctccacgaggctgtcagcatgaagctgcaccgtgtccgagaggccctggctctgatgggcttcaccacgcctctgctgcttgtgcttctctacctccaagccctattttaccggtattgttacctgaactgggaccattatgacaatatctacatcactagccgattcctgcgcatggaggctgtgcgctccacggcagggctgcccacagtgctaccgctcagtgctcacgaggccaggcgctacatcccaccgggctccatcttcttgtcccaatgggagaagtttttttacattctggagaccttcaaccttatccgacacctcctcctcgtgctgttcctagtcttcctagactatgctgtcttctgggtgcttgacctggcccggcaccagctgcagggggagattgtggcccgcagtcctgtgttggtgtctctaaccgtggaaggtactggctacgctgggaatatttatcgtgacctggtgtcagcatttgatgtcctgcagcaaggcaacatcagtattttgtcccggcgttgtctccttcgtccctcggagcctgacagcactggctacatagtcattggcgtcatgtatggcctatgcttcttcatcaccctgtttggcagctatgtcagccggctgcggcgagtcatctgtgcctcctactacccatcccgggagcaggagaggatctcctacctgtacaatgtacttctgagccgccgaaccaatctgttggctgccctgcaccgatcagtgaggcggcgggcggctgaccagggccacagaagtgccttcctagtgctggccagtcggtgcccctgcctaggtccatttgtcagccacttttggctgcatcaggcctactgcctgggctgtgggcagccccaggatgagggagacatggagaacactgtgtcctgcagtacccccggctgccaaggtctctactgcctcacttgcttccgcctcctggacaatacctgctccgtgtgtgcatctcccctctcctaccagggggacctggacctggagctggactccagcgatgaggagggccctcagctatggctggctgcagctcaaaggaaggaccctgagcaggcatggttattgcagcaacagctccaagaagtgctcggcaggagcctctcaatggagtccacttccgagtccagtgacctggatgaggagaaggggcctcagcagaggaagcacgggcagcagcccttacctgaagcccatcagcctgtcagcattctcaccagccctgagccccacagaccacctgagacatcctccgccactaaaggagcccccactccagcttcagaaccctcagtccctctctcacctccctctcttcctgatccttcccacccaccccccaaataaaccaaaagtgg

SEQ ID NO: 239177 - DNA, 1920 bp, Artificial Sequence
  derived and/or modified sequence
atgcccaaagtcatgaaggacgtggttcaccccttgggtggcgaggagccgtcaatggccagagctgtggtacgcagcgtgggcgggttcactctgggacttagtctggctactgcttacggcttgttggagctgttggtagagggccactctccttgggggtgcctcgtcggcaccctgacattagccgccttcctgagtcttgggatggggttctcaaggcaggtccgcgccaccgtgctgctcctgttaccgcaagccttctcgcggcagggccgaacgctactactcgtagcagccttcggactggtccttcagggaccttgcgcgaacaccttacgcaattttacaagagccagcgaggcagtcgcctgcggcgctgaactcgcgctgaatcagaccgccgaagtgcttcaaagagcgaagcagcccctagtctcggctcttaataagattaaggccatcgcacgcaagactaaagaggtggccgatagagtccgaaaattcttcaggtctattatggatggggtgaagcacatcgcgcgcgctcttaggaatgtgtggcagtggctgctgcatattggagacgtgtgcaatagcgaactcgggaatccctatctcaaatgtgcacgagtgttcgatgacgctaaggacagttgtatgatggtaattccacaggcctatcacctctgctacgtactcatgcctttcaagcttgccctgtgtggtctggcctctctggtgcaggtgttctgcgtgattccaaagtacatccaaccgttcctgagacaaacaatcggaaccccagtcatacaactgctaaatagggtaagacaagagttcgagttcaatatgacagctactcaccacttttctgtagatctgaacgcgagcagatcgctctcccaggtggccatggatttgcacgaagccgtctcaatgaagcttcatcgtgtgagggaggcactggccctgatgggatttacaacacccctgctgctagtgttactctacctgcaggccctgttttataggtactgctacctcaactgggatcattacgacaacatctacatcacatccaggtttctgaggatggaggcagttcggagcaccgccgggctgccaacggtgttgcccttgagcgcccatgaagccagaaggtacattccacccgggagtatcttcctctctcagtgggagaagtttttctatatcctggagacgttcaatctcattcgacacctactgctcgtgctcttcctcgtattcctcgactacgcagtgttctgggtgctcgacctggccagacatcaactgcaaggagaaatcgtggcccgtagcccagtgctggtttcactgacagtggagggcaccgggtacgctggcaatatttatagagacctggtttctgctttcgatgtattgcaacaaggaaacattagtatactctcaaggagatgtttattgcgaccctcagaacctgacagtaccggttatatcgtgatcggcgttatgtacggtctgtgctttttcattaccttattcggttcctatgtatcacggcttaggagggttatctgtgcctcctattatccctcgagagaacaagagcggatttcatacttatacaatgtattattgtctaggcgcactaatctgcttgcggctctccaccggagcgtgcgacgccgtgccgccgatcagggacaccgatcagcctttttggtccttgcctccagatgtccttgtctgggaccatttgtcagtcacttctggctccatcaggcctactgcctcgggtgcggtcagccccaggatgagggggatatggagaacacagtttcatgcagcacgccaggctgccagggatttatctgcaaatggcattgtagctcgtccttggtgtgcacaccttag

SEQ ID NO: 239178 - DNA, 2322 bp, Artificial Sequence
  derived and/or modified sequence
atgccaaaagttatgaaagacgtcgtccatccgctgggcggtgaggagcccagtatggcgagagctgttgtcaggtccgtcggaggattcactctggggctctcactagccacagcctatggcctgctcgagttacttgtggagggccattctccctgggggtgtttagtaggaaccttaacgctcgcagccttcctgagtctggggatgggcttttcacggcaggtacgtgctacagtgcttctcttgctgccccaggctttctctcgacaggggcggaccttgctgctcgtggccgcttttggcttggtcctccagggaccatgtgccaatactctccgcaactttactcgtgcgtccgaggccgtggcatgcggcgctgagctggcattgaaccagaccgccgaagtactgcagagagccaagcagccacttgtttcagccctgaataaaataaaagcaatcgcacgtaaaacaaaggaagtggcagatcgggtcagaaagttttttagaagcattatggacggggttaagcacattgcccgcgccctcaggaatgtatggcaatggttgctgcacataggcgacgtttgtaacagcgagctcggaaacccttacctaaaatgcgcccgagtcttcgacgacgctaaggactcttgtatgatggttattccccaggcttaccatctatgctacgtgctcatgcccttcaaactggctctctgcggcctcgctagcctagtgcaagttttttgcgttatccccaagtacattcagccttttttaagacaaacaatcggaaccccagtaatacaattgctcaatcgggtgagacaggagtttgagtttaatatgactgcgacacaccactttagtgtggatctgaatgccagccggagcttatcccaggttgcaatggatctgcacgaggccgtcagtatgaagcttcaccgcgtacgagaagcgctggctctcatgggtttcaccaccccgctgcttttagtgcttctgtacctgcaggctctgttttataggtactgctacctgaattgggaccactacgacaatatatatatcacctctaggttcctccgcatggaagctgtgcgcagtaccgcgggacttcccactgtcttgccgttatctgctcatgaggcgcggcgctatattcctccgggatcaatctttttgagccagtgggagaaattcttctatatcctggagacattcaatctgattcggcatctgctgttagtgctgtttctggtattcctcgattatgctgtgttttgggttctcgacctggcccgtcatcagttacagggcgagattgtggctcgatctccagtgctggtgtccctgacggtggaagggaccgggtacgctggtaatatttatcgggatctcgtctctgcatttgacgttttgcagcagggcaatatttcaatcctaagccggagatgtctgctgcggccctccgaacccgattctacgggttacattgtgatcggagtcatgtacggtctttgcttctttataacactcttcgggtcttatgtgagtcgtctgcggcgcgtgatttgcgcaagctactatccatcccgggagcaagagaggatcagctatctgtataatgttctcctgagccggcggacaaacctgttagccgctctgcaccggtcagttagacggagggctgctgaccagggccaccggtccgcctttcttgtactggcatcgcggtgcccatgtctggggccctttgttagccacttttggttgcaccaggcatactgtcttggctgcggacaaccacaggatgaaggagacatggaaaacacagtgagctgttccactccaggttgtcaggggctgtactgtctcacttgctttaggctcctggacaacacgtgctctgtctgtgcctcaccactctcctaccagggagacttagatttggagctggattcctctgacgaggagggacctcagctttggctcgccgcggcgcaacggaaagacccagagcaagcctggcttttacagcagcagctgcaggaggtgttgggacgaagtctgtccatggaaagtacaagcgagtcatctgatctggacgaggagaaaggcccccaacaacgcaagcatggacagcaaccgctgccagaggcacaccagcccgttagcattcttacaagccccgagccccatcgcccacccgaaacctctagcgcaactaaaggagcccccacgcctgcatctgagccgagcgtccctctcagcccaccaagtttacccgatccatctcacccccctccaaaatag

SEQ ID NO: 239179 - DNA, 1920 bp, Artificial Sequence
  derived and/or modified sequence
atgcccaaggtgatgaaggatgtggtgcaccccctgggcggggaggagcccagcatggcccgggctgtggtgcgctctgtgggcggcttcaccctgggcctgagcctggccacagcctacggcctgctggagctgctggtggagggccacagcccctggggctgcctggtgggcaccctgaccctggccgccttcctgagcctgggcatgggcttcagccggcaggtgcgggccaccgtgctgctgctgctgccccaggccttcagccggcagggccgcaccctgctgctggtggccgccttcggcctggtgctgcagggcccctgtgccaacaccctgaggaacttcacccgggccagcgaggccgtggcctgtggggctgagctggccctgaaccagacagctgaggtgctgcagagggccaagcagcccctggtgtctgccctgaacaagatcaaggccatcgccaggaagaccaaggaggtggccgacagagtgaggaagttcttccgcagcatcatggatggagtgaagcacatcgcccgggccctgagaaatgtgtggcagtggctgctgcacatcggagatgtgtgcaacagcgagctgggcaacccctacctgaagtgtgcccgggtgtttgatgatgccaaggacagctgcatgatggtgatcccccaggcctaccacctgtgctacgtgctgatgcccttcaagctggccctgtgtggcctggccagcctggtgcaggtgttctgtgtgatccccaagtacatccagcccttcctgcggcagaccatcggcacccctgtgatccagctgctgaacagagtgcggcaggagtttgagttcaacatgacagccacccaccacttctctgtggacctgaatgccagccgcagcctgagccaggtggccatggacctgcatgaagctgtgtccatgaagctgcaccgggtgcgggaggccctggccctgatgggcttcaccacccccctgctgctggtgctgctgtacctgcaggccctcttctaccgctactgctacctgaactgggaccactatgacaacatctacatcaccagccgcttcctgaggatggaggccgtgcgcagcacagctggcctgcccaccgtgctgcccctgagcgcccacgaggcccggcgctacatccccccaggcagcatcttcctgagccagtgggagaagttcttctacatcctggagaccttcaacctgatccgccacctgctgctggtgctcttcctggtgttcctggactatgctgtgttctgggtgctggacctggcccggcaccagctgcagggcgagatcgtggcccggagccctgtgctggtgtccctgactgtggagggcaccggctacgccggcaacatctacagagacctggtgtctgcctttgatgtgctgcagcagggcaacatcagcatcctgagccgccgctgcctgctgcggcccagcgagccagacagcacaggctacatcgtgattggagtgatgtatggcctgtgcttcttcatcaccctgtttggcagctatgtgtcccggctgcggcgggtcatctgtgccagctactaccccagccgggagcaggagcgcatctcctacctgtacaacgtgctgctgagcaggaggaccaacctgctggccgccctgcacaggtctgtgagaagaagagctgctgaccagggccacaggtctgccttcctggtgctggccagccgctgcccctgcctgggcccctttgtgagccacttctggctgcaccaggcctactgcctgggctgcggccagccccaggatgaaggagacatggagaacacagtgtcctgcagcaccccaggctgccagggcttcatctgcaagtggcactgcagcagcagcctggtgtgcaccccctag

SEQ ID NO: 239180 - DNA, 2322 bp, Artificial Sequence
  derived and/or modified sequence
atgcccaaggtgatgaaggatgtggtgcaccccctgggcggggaggagcccagcatggcccgggctgtggtgcgctctgtgggcggcttcaccctgggcctgagcctggccacagcctacggcctgctggagctgctggtggagggccacagcccctggggctgcctggtgggcaccctgaccctggccgccttcctgagcctgggcatgggcttcagccggcaggtgcgggccaccgtgctgctgctgctgccccaggccttcagccggcagggccgcaccctgctgctggtggccgccttcggcctggtgctgcagggcccctgtgccaacaccctgaggaacttcacccgggccagcgaggccgtggcctgtggggctgagctggccctgaaccagacagctgaggtgctgcagagggccaagcagcccctggtgtctgccctgaacaagatcaaggccatcgccaggaagaccaaggaggtggccgacagagtgaggaagttcttccgcagcatcatggatggagtgaagcacatcgcccgggccctgagaaatgtgtggcagtggctgctgcacatcggagatgtgtgcaacagcgagctgggcaacccctacctgaagtgtgcccgggtgtttgatgatgccaaggacagctgcatgatggtgatcccccaggcctaccacctgtgctacgtgctgatgcccttcaagctggccctgtgtggcctggccagcctggtgcaggtgttctgtgtgatccccaagtacatccagcccttcctgcggcagaccatcggcacccctgtgatccagctgctgaacagagtgcggcaggagtttgagttcaacatgacagccacccaccacttctctgtggacctgaatgccagccgcagcctgagccaggtggccatggacctgcatgaagctgtgtccatgaagctgcaccgggtgcgggaggccctggccctgatgggcttcaccacccccctgctgctggtgctgctgtacctgcaggccctcttctaccgctactgctacctgaactgggaccactatgacaacatctacatcaccagccgcttcctgaggatggaggccgtgcgcagcacagctggcctgcccaccgtgctgcccctgagcgcccacgaggcccggcgctacatccccccaggcagcatcttcctgagccagtgggagaagttcttctacatcctggagaccttcaacctgatccgccacctgctgctggtgctcttcctggtgttcctggactatgctgtgttctgggtgctggacctggcccggcaccagctgcagggcgagatcgtggcccggagccctgtgctggtgtccctgactgtggagggcaccggctacgccggcaacatctacagagacctggtgtctgcctttgatgtgctgcagcagggcaacatcagcatcctgagccgccgctgcctgctgcggcccagcgagccagacagcacaggctacatcgtgattggagtgatgtatggcctgtgcttcttcatcaccctgtttggcagctatgtgtcccggctgcggcgggtcatctgtgccagctactaccccagccgggagcaggagcgcatctcctacctgtacaacgtgctgctgagcaggaggaccaacctgctggccgccctgcacaggtctgtgagaagaagagctgctgaccagggccacaggtctgccttcctggtgctggccagccgctgcccctgcctgggcccctttgtgagccacttctggctgcaccaggcctactgcctgggctgcggccagccccaggatgaaggagacatggagaacacagtgtcctgcagcaccccaggctgccagggcctgtactgcctgacctgcttccggctgctggacaacacctgcagcgtgtgtgccagccccctgagctaccagggcgacctggacctggagctggacagcagtgatgaggagggcccccagctgtggctggccgccgcccagaggaaggaccctgagcaggcctggctgctgcagcagcagctgcaggaggtgctgggccgcagcctgtccatggagagcaccagcgagagcagtgacctggatgaggagaagggcccccagcagaggaagcacggccagcagcccctgcctgaggcccaccagcctgtgtccatcctgaccagccctgagccccaccggcccccagagaccagcagcgccaccaagggggcccccaccccagccagcgagcccagcgtgcccctgagcccccccagcctgcctgaccccagccaccccccacccaagtag

SEQ ID NO: 239181 - DNA, 1920 bp, Artificial Sequence
  derived and/or modified sequence
atgcccaaggtgatgaaggacgtggtgcaccccctgggcggcgaggaaccttctatggcacgggccgttgtgcggtcggtcggagggttcaccctcgggttgagcctggctaccgcatatggcctgctggagctgctggtcgaggggcactccccatgggggtgcctggtgggtacactgacgctcgctgcttttttgagtctggggatgggcttctcgcggcaggtaagagccaccgtcctgcttctgctgccgcaggcctttagccgacaggggagaacgctcttattggtggcggccttcggcctcgtgctccagggcccctgtgcaaataccctgaggaatttcacgagagcctctgaagcagtagcatgcggcgctgaactcgcactaaaccagacagctgaggtgttgcagagagcaaagcagcctctggtttcagctttgaacaagatcaaagcgattgccaggaagactaaggaagtagcagatcgggttagaaagttttttagatccattatggacggcgtcaagcacatcgcccgggccctgcgaaatgtttggcagtggctgcttcacatcggcgacgtgtgtaactcagagttaggcaacccatacctgaagtgcgccagggtgtttgatgatgctaaagactcatgcatgatggtgatacctcaggcgtatcatctttgctacgttttgatgcccttcaaactcgcactatgtggccttgctagcctggtgcaggttttctgcgtcatccctaaatatatacagcccttcttaagacaaactattggcacccctgttattcagctgttgaatagggtcagacaagagttcgaatttaatatgactgccacccaccacttcagtgtcgatctaaatgcctctcgatcgctttcccaagtcgctatggacctccacgaagcagtttcaatgaagctgcaccgggtacgggaggcactcgcccttatgggatttaccacgcctctgctgctcgtgctactctacctgcaggctcttttttatcgctactgctaccttaactgggaccactatgacaacatatacatcactagcaggttccttcggatggaagcggtgaggtccacagccgggctccctactgtcttgcctctctccgctcatgaagcgcgtaggtacattccaccgggaagtattttcctgtcacaatgggagaaatttttttacatcctggagacatttaatctcatacggcacctgttgttggtcctgttcctggtgttcctcgattacgcagtgttctgggtcttggacctcgcaagacatcagcttcagggtgaaatcgtcgctcgtagcccggtcttggtgagcctgacagtcgaaggaaccggttatgcaggcaatatctacagagacctcgtctccgctttcgatgttctgcaacagggcaacatcagtattctgtccagaagatgcctactgcgccccagtgaacctgacagcaccggctatatcgtgatcggcgtgatgtatggcctgtgcttttttattactctatttggaagttacgtgtcaaggctgcgacgagtgatctgtgcttcctattacccgtcccgggagcaggagcgtatatcctacctctacaatgtcttactgtcacgccgtactaacctgctcgcggccctacatcgttcagtaagaaggcgagcagcagatcagggacaccgatctgccttcttagtgctcgcgagtagatgcccttgtcttggtccgtttgtgagccacttctggcttcatcaggcatactgtttgggttgcggtcagccccaggacgagggagatatggaaaatacagttagctgcagtacccctggttgtcagggattcatttgcaaatggcactgtagttccagcctggtctgcacgccctag

SEQ ID NO: 239182 - DNA, 2322 bp, Artificial Sequence
  derived and/or modified sequence
atgcccaaggtgatgaaggacgtggtgcaccccctgggcggcgaggagccaagcatggctcgggcagtggtgcgatccgtgggcggatttaccctcggcctgagtttagcaaccgcttatggattgttggagttgcttgtcgagggccattcaccctgggggtgcttagtcgggaccttgactcttgcagcctttttgagcttgggtatggggttctctaggcaagtgcgggcaaccgttttactgctgctcccccaagccttcagccgacaaggtaggactttactgttggtcgccgccttcggactggtactgcagggtccgtgcgccaacaccctaaggaacttcacgcgagcctcagaggcagtggcctgcggggctgaactggctctcaaccaaaccgctgaggtcttgcagcgggctaaacagccactggtctccgccctcaataagatcaaagcgattgcaagaaaaaccaaagaggtggctgaccgggtcaggaagtttttcagatcgatcatggatggcgtcaaacatattgcacgggccctgcgtaacgtttggcaatggctgttacatatcggcgatgtttgtaactccgaacttgggaatccatatctgaagtgcgccagagtgtttgatgacgcaaaagacagttgcatgatggtcatcccccaagcatatcatctttgctacgtcctcatgcctttcaaattagctttgtgtgggcttgcctctttagtccaggtattttgcgtgattccgaagtatattcagcccttcttacgtcaaactataggcactcccgtaatccagctgctgaaccgcgtgaggcaggagttcgagtttaacatgaccgctacccatcatttcagtgttgatctgaatgcttctagatctctaagccaggtggccatggacctacacgaagccgtctcaatgaaattgcatagagtccgggaggcgctcgcccttatgggcttcacaacgcccttgctgttggtgctgctctatctgcaagctctgttttaccgatactgttacttaaattgggaccattacgacaatatctatattacgagtaggtttttgaggatggaagccgtcaggagtacggctggcctgccaacagtcctgccgctctctgctcacgaggcaagacgctacatcccgcctggtagcatctttctgagtcagtgggaaaaattcttctacattctggaaaccttcaacttaatcaggcaccttctcttggtgttattccttgtgtttctggactatgctgtgttctgggtcctggacctagctagacaccagctccaaggcgaaattgtggcccggtccccagtgcttgtatctctgaccgttgaggggactggctacgcaggaaacatctaccgcgatcttgtctccgcttttgatgttcttcaacagggtaatatttcaattctaagccgtagatgcctgctcaggcccagtgaacccgatagtaccgggtacattgtgattggagttatgtacgggctttgcttcttcattaccttattcggctcttatgttagtcgactgcggagagtcatctgcgccagctattatccatctagagagcaggaacggatctcctatctctacaatgttctgctgtcgcgcagaacaaatctcctggccgccttacatagatccgtgcgtcggagagcagctgaccaaggccaccggtccgcttttctggtcttagctagccgatgtccctgcttgggcccattcgtctcacatttctggctgcaccaggcgtattgcttaggctgtggccagccccaggatgagggcgatatggaaaatactgtctcctgcagtacacccggctgtcaggggctgtactgtctgacctgttttagactcttggataacacgtgtagcgtgtgcgcctccccactgagctaccagggggatttggatctggaactggattctagcgatgaggaaggtccgcagctgtggctggcggcagctcaacggaaggatccagagcaagcctggctgttgcaacaacagttgcaggaagttctcggccggagtttaagtatggagtcaacatccgagtctagtgacctggatgaggagaaaggcccccaacagagaaaacacggccagcagcccctaccagaggcccaccaaccagtgagtattcttacctctcccgagccgcatcggcctcccgaaacatcatccgccacaaagggcgcacctactccggcttccgagcccagtgtccccttaagtcccccttctctgccagaccccagccacccacctcccaaatag

SEQ ID NO: 239183 - DNA, 1920 bp, Artificial Sequence
  derived and/or modified sequence
atgccgaaggtgatgaaggatgtggtccatcccctgggcggtgaagaacctagtatggcacgcgcagtcgtgaggtcagtgggaggcttcaccctgggactgtcactggctacagcctacggtctgctggagctactcgtcgaagggcactcaccatggggatgcttagtgggaaccctgaccctggccgcattcctgtccctgggcatgggcttctctagacaggtccgcgctaccgttttattactgctgccgcaggcattttcccggcagggccgtactctcctgttggtagcagcattcggactcgtgctgcaggggccatgtgccaacacattacgaaacttcaccagagctagcgaggcagtggcgtgcggagcggaactggcactgaatcagacagcagaggtgcttcaacgcgctaagcagccactggtgtccgctctcaataaaattaaagctatcgcacgcaaaactaaggaggtcgccgatagagtgaggaagttcttccggagcattatggacggtgtgaagcatattgctagggctctgaggaacgtttggcaatggctgctgcacatcggggatgtctgcaattccgaactcggaaacccttacctcaagtgtgcccgagtgtttgacgacgctaaggactcctgcatgatggtgattccccaagcttaccatttatgttatgttttgatgccatttaaattggccctgtgtggactggctagcctcgtgcaagtcttctgcgtaatccccaaatatattcaaccatttctcaggcagaccatcgggacacctgtcattcagctgctaaaccgcgtcaggcaagaattcgaattcaatatgaccgctacacatcactttagtgtagacctcaatgcctcacgatcattgtcccaggtggcaatggatctccatgaagcagtcagcatgaagcttcacagggtacgggaagctctggccttgatgggctttacaacgcccctcctcctcgtcttactttacctccaggctctgttctacaggtattgttatttaaattgggatcactacgacaacatctacatcacttcacgctttttgcgcatggaggctgtgaggagcactgcaggtctccccacagtcctgcccctctcggctcatgaagctcgacggtatattccacctggatcaatttttctgtcgcagtgggaaaaatttttttacattctggagacctttaacttgattaggcatctgctcctggtcttgtttcttgttttcctggattacgccgtcttctgggtgctcgacctggcacgccatcaattacagggagagattgtggccaggagcccagtgcttgtgtccttgaccgtggagggtaccggctatgccggtaacatctaccgtgacctcgttagcgcatttgatgtattgcaacagggaaatatttccatcctatcccgacgttgtctgctgcggccatctgagcctgactccacaggctacatcgtcatcggcgtgatgtatggcctgtgctttttcattactctctttggatcctacgtgtctagactgcgcagggtgatttgtgctagttattatccttcccgggagcaggaaaggatctcttacctgtacaatgtgctgctttcaagacgaacgaacctcctcgccgcactacatcgatccgtgcggagacgtgcagccgaccagggccacaggtccgccttcctcgtgctggcatctcggtgcccgtgcctgggccctttcgtctcccacttctggctccaccaagcctattgcttgggttgtggccagccccaagacgaaggtgacatggagaataccgtgagttgttcaacacctggctgccagggctttatatgcaagtggcattgtagctcttccctcgtctgcacaccatag

SEQ ID NO: 239184 - DNA, 2322 bp, Artificial Sequence
  derived and/or modified sequence
atgccaaaggtcatgaaagatgtggtccatcctctgggcggtgaagagccctccatggcgcgtgctgtcgtgagatccgtcggcggattcaccctcggcctctcacttgctaccgcgtacggactcctggagctgctcgttgagggtcatagtccttgggggtgcctggtgggtactctgacactggccgcattcctgagcctcggtatgggattcagccgccaggtacgagcgaccgtgctgctcttacttccacaggcgttctctagacaggggaggaccctcctcctggtggccgctttcggtctcgtgctgcaggggccttgcgccaatacattgagaaattttactcgcgcttctgaggcagtcgcatgtggggcagaactggcgttgaatcagactgcagaggtactccagagagcaaagcagcctctggtctctgcccttaataagatcaaggctatcgcgaggaagacaaaggaggtcgcggaccgggtgcggaaattcttccgctccatcatggatggggttaagcacatcgcacgagctttgcgtaatgtatggcagtggctactccacattggcgatgtctgcaatagtgagctaggtaatccctacctaaaatgcgccagggtttttgacgatgccaaagactcatgcatgatggtcattccccaggcctaccatctgtgctacgtgctcatgcccttcaagctggcgctgtgcgggctcgcttcccttgtgcaggtgttctgcgtcattccaaaatacatccaaccgtttctacggcagactatagggactcccgttattcagctgcttaaccgggtgaggcaagaattcgaattcaacatgacagccacccaccacttttcggtggatctcaatgcctcccggtctctgagccaggttgccatggacctacacgaagccgtctcaatgaagttgcacagagtcagggaggctttagcactgatgggatttacaactcccctcttgctcgtgctgttatacttacaggccctgttttaccgttactgctaccttaactgggaccattacgataatatctatattacctctcggttcctgcggatggaggccgtgaggagcaccgctggccttcccacagtcctacccttatctgctcacgaggccagacgatacatcccccctggctctattttcctttcacaatgggagaaatttttctacatcctggagacatttaatttaatcagacatttattattggtgctatttcttgtctttctggactacgcagtgttctgggttctggatctggcacggcaccagctgcaaggtgagattgtggcgcgatccccagtgctcgtgagcttgacagtagagggcactggatatgctggtaacatctaccgcgatctggtcagtgccttcgacgttctgcaacaagggaatatctccatcctgtctcgcaggtgtctgcttcggcctagtgaacctgacagtacgggatatatcgtgattggcgtaatgtacggcctgtgtttttttattaccctgtttggctcttatgtttctcgcctgcgacgcgtgatctgcgcaagttactacccttcccgggaacaagagaggattagctatctctataatgtgctgctctcacgacgtaccaatctgctcgccgcactccaccgcagcgtgagacgcagggcagcagatcagggccatagatctgcatttctggtgctggcctcacgctgcccatgcctggggccattcgtgtctcatttctggctccatcaggcctactgcctgggatgtggccaacctcaggacgaaggcgacatggaaaatacagtatcatgcagcacccccggttgccagggcctgtactgcctcacatgcttccggctgctggacaacacatgcagtgtctgtgcatcgcccctcagctaccagggtgacctggatctcgagctggacagctccgacgaggaaggcccacagttgtggcttgcagccgctcagcggaaggatcctgagcaggcgtggctgctgcagcagcaactacaggaggttctggggcgaagcctgtctatggaaagcacgtccgagtcttctgacttggatgaggaaaaggggccacaacaacgaaagcatggtcagcagccactcccagaggctcaccaacccgtctccattcttacgtcccccgagccccatcggcctccagaaaccagctctgcaacaaaaggtgcacctaccccagcctcggaaccatctgtccctctctctccgccatctctgcctgatcctagccacccccctcccaaatag

SEQ ID NO: 239185 - protein, 344 aa, Artificial Sequence
  derived and/or modified sequence
MAGSGCAWGAEPPRFLEAFGRLWQVQSRLGSGSSASVYRVRCCGNPGSPPGALKQFLPPGTTGAAASAAEYGFRKERAALEQLQGHRNIVTLYGVFTIHFSPNVPSRCLLLELLDVSVSELLLYSSHQGCSMWMIQHCARDVLEALAFLHHEGYVHADLKPRNILWSAENECFKLIDFGLSFKEGNQDVKYIQTDGYRAPEAELQNCLAQAGLQSDTECTSAVDLWSLGIILLEMFSGMKLKHTVRSQEWKANSSAIIDHIFASKAVVNAAIPAYHLRDLIKSMLHDDPSRRIPAEMALCSPFFSIPFAPHIEDLVMLPTPVLRLLNVLDDDYLENEEEYEGLC

SEQ ID NO: 239186 - DNA, 1035 bp, Artificial Sequence
  derived and/or modified sequence
atggccggcagcggctgcgcctggggcgccgagccccccagattcctggaggccttcggcagactgtggcaggtgcagagcagactgggcagcggcagcagcgccagcgtgtacagagtgagatgctgcggcaaccccggcagcccccccggcgccctgaagcagttcctgccccccggcaccaccggcgccgccgccagcgccgccgagtacggcttcagaaaggagagagccgccctggagcagctgcagggccacagaaacatcgtgaccctgtacggcgtgttcaccatccacttcagccccaacgtgcccagcagatgcctgctgctggagctgctggacgtgagcgtgagcgagctgctgctgtacagcagccaccagggctgcagcatgtggatgatccagcactgcgccagagacgtgctggaggccctggccttcctgcaccacgagggctacgtgcacgccgacctgaagcccagaaacatcctgtggagcgccgagaacgagtgcttcaagctgatcgacttcggcctgagcttcaaggagggcaaccaggacgtgaagtacatccagaccgacggctacagagcccccgaggccgagctgcagaactgcctggcccaggccggcctgcagagcgacaccgagtgcaccagcgccgtggacctgtggagcctgggcatcatcctgctggagatgttcagcggcatgaagctgaagcacaccgtgagaagccaggagtggaaggccaacagcagcgccatcatcgaccacatcttcgccagcaaggccgtggtgaacgccgccatccccgcctaccacctgagagacctgatcaagagcatgctgcacgacgaccccagcagaagaatccccgccgagatggccctgtgcagccccttcttcagcatccccttcgccccccacatcgaggacctggtgatgctgcccacccccgtgctgagactgctgaacgtgctggacgacgactacctggagaacgaggaggagtacgagggcctgtgctag

SEQ ID NO: 239187 - DNA, 1035 bp, Artificial Sequence
  derived and/or modified sequence
atggccggttcaggctgtgcttggggcgccgaacctccccggtttctagaagcttttggaaggctgtggcaagtccaaagccgacttggtagcggaagcagcgctagtgtctatagggtaaggtgctgcggtaaccctggcagtcctcccggcgcacttaagcagtttctgcccccgggtaccaccggagccgcagccagcgctgcagagtacggattccggaaggaaagagccgctttagagcaactgcaggggcataggaatatagttaccctttatggcgtattcacaatccacttctcccctaatgtgccctcaaggtgtttactgctggagctgttagacgtctctgtgtctgagctgctcctatattcgtcccaccagggttgcagcatgtggatgatacaacactgcgctagggacgttcttgaggctctggcctttctgcaccatgagggctacgtccatgccgatctcaaaccgcgcaacatcctctggtccgcagaaaatgagtgtttcaaactgatcgactttggcctgagcttcaaggaaggaaaccaagatgttaagtacattcagaccgatggataccgggcccctgaggcagaactccagaattgtttggcacaggctggactgcagtctgatacagagtgcacctctgccgtagatctctggagcctgggcatcatcttgctcgaaatgttctcaggcatgaagctaaagcacaccgtccgcagccaggaatggaaagccaactcttccgcaatcatagatcacatttttgctagcaaggctgtcgtgaacgctgcaattcccgcctaccacctgagggatctcataaaatccatgctgcatgacgatccttcccgaaggattccggccgaaatggctttatgttctccgtttttctccattcccttcgcaccacatattgaggacctcgtgatgctccccactccagtgctcaggctgttgaatgtgcttgatgacgattatctggagaacgaagaggagtacgagggcctgtgttag

SEQ ID NO: 239188 - DNA, 1035 bp, Artificial Sequence
  derived and/or modified sequence
atggccggcagcggctgtgcctggggcgctgagcccccacgcttcctggaggccttcggccgcctgtggcaggtgcagagccggctgggcagcggcagcagcgcctctgtgtacagagtgcgctgctgcggcaaccctggcagccccccaggggccctgaagcagttcctgcccccaggcaccaccggggctgctgccagcgctgctgaatatggcttcaggaaggagcgggccgccctggagcagctgcagggccacagaaatattgtgaccctgtatggagtcttcaccatccacttcagccccaacgtgcccagccgctgcctgctgctggagctgctggatgtgtctgtgtctgagctgctgctgtacagcagccaccagggctgcagcatgtggatgatccagcactgtgccagagatgtgctggaggccctggccttcctgcaccacgagggctacgtgcatgctgacctgaagcccaggaacatcctgtggagcgcagaaaatgaatgcttcaagctgattgactttggcctgtccttcaaggagggcaaccaggatgtgaagtacatccagacagatggctaccgggcccctgaggccgagctgcagaactgcctggcccaggccggcctgcagagcgacacagagtgcaccagcgctgtggacctgtggagcctgggcatcatcctgctggagatgttttctggcatgaagctgaagcacacagtgcgcagccaggagtggaaggccaacagcagcgccatcatcgaccacatctttgccagcaaggctgtggtgaatgctgccatcccagcctaccacctgcgggacctgatcaagtccatgctgcatgatgaccccagccgccgcatcccagctgagatggccctgtgcagccccttcttcagcatcccctttgccccccacatcgaggacctggtgatgctgcccacccctgtgctgcggctgctgaatgtgctggatgatgactacctggagaatgaggaggagtatgagggcctgtgctag

SEQ ID NO: 239189 - DNA, 1035 bp, Artificial Sequence
  derived and/or modified sequence
atggccggcagcggctgcgcctggggcgccgagcccccccggttccttgaggcattcggaagactctggcaggtacagtcccgactgggctccggcagtagcgcctcggtgtatcgcgtgcggtgttgcgggaacccaggttccccccctggagctctgaagcaatttcttccacctggaaccacgggagcggccgctagcgcagccgaatacggtttcagaaaagagcgcgccgccttggaacaactccagggccataggaatatcgtcaccttatacggggtattcacaattcacttctctcccaatgtgccctcacgctgtctgttactggaactactcgatgtctctgtgagcgaactgctgttgtactcgtcacatcaaggttgctcaatgtggatgatacagcactgtgctcgggatgtgctggaggctctggcgtttcttcatcatgaaggctacgtccatgctgacctgaagccaagaaatattttgtggtctgcggaaaatgagtgtttcaagcttattgactttggtctgtcatttaaggagggcaaccaggatgttaagtacatccaaaccgacggctatcgggcccctgaagctgagctccagaattgcctggcgcaagctggcctgcagtcggacactgaatgtacctccgccgtggacttgtggtcgctcgggataatcttactcgaaatgttttcgggcatgaagcttaagcatactgtcagatcccaggagtggaaggccaattctagcgccattatcgatcacattttcgcgtcaaaagccgtagtgaatgcggccatcccagcgtatcaccttcgggacttgattaaatccatgcttcacgatgacccttccagacgtatacctgctgagatggccctatgctccccgtttttctccatcccatttgcccctcatatagaggacctggtgatgctaccaactccagtgctgcggcttctgaatgtgctggacgatgactacctcgagaatgaagaagagtacgaggggctatgttag

SEQ ID NO: 239190 - DNA, 1035 bp, Artificial Sequence
  derived and/or modified sequence
atggcgggaagcgggtgcgcctggggcgctgagcccccacgattccttgaagccttcggtcgcctgtggcaggtgcagtctagactggggtcgggtagctccgcttccgtgtaccgtgtgcggtgctgtggcaatcctggatctccccctggggcacttaaacagtttcttccccctggaaccaccggcgctgctgccagcgctgctgaatatggattcagaaaagagcgggcagctcttgaacaactccaagggcaccgtaatatcgtgaccttgtacggggtgttcaccattcacttttccccaaacgttccatctcgctgcttgctgcttgaactgttggatgtctcggtgtcagaactcctgttgtacagtagccaccagggctgttcaatgtggatgattcagcactgtgcaagggatgttttggaggccctcgcattcctccatcatgaagggtacgtgcatgctgaccttaaacccagaaacattctgtggtcagctgagaatgagtgcttcaaactcatcgactttggactcagtttcaaggaaggcaaccaagatgttaagtacatccaaacagacgggtaccgggcacctgaagccgagctgcaaaattgcctcgctcaagcgggattgcaaagtgatacggagtgtacttctgccgtggatctgtggtcgcttggaatcatactgctcgagatgttttcagggatgaaactcaagcacaccgtgaggagccaggagtggaaagccaactcaagcgctataattgaccatattttcgccagcaaagccgttgtaaacgccgctatacctgcctatcatctaagagatttaatcaaatcaatgctccatgacgacccctcgaggaggatccctgctgaaatggccttgtgtagtccatttttctccataccattcgccccacatattgaggatctggtgatgctccctacccccgtgctgcgactgctgaacgtgttggatgacgattatttagagaacgaagaagagtacgagggcttgtgctag

SEQ ID NO: 239191 - DNA, 8446 bp, Artificial Sequence
  derived and/or modified sequence
atttccggcttctgggactcgggtgcaccacggcttccggtgtcatggctgcttgaagtcccgggagtcggtgaggcggctgcaggtccctccctgcggagccgctggtccggctggcggagatgtgaccgcgggcccggccggcctgcctcaggcgtcgcgtcagctcccgtgtccgtgcccttaacccacaccgatggcgggatccggctgcgcctggggcgcggagccgccgcgttttctggaggccttcgggcggctgtggcaggtacagagccgtctgggtagcggctcctccgcctcggtgtatcgggttcgctgctgcggcaaccctggctcgccccccggcgccctcaagcagttcttgccgccaggaaccaccggggctgcggcctctgccgccgagtatggtttccgcaaagagagggcggcgctggaacagttgcagggtcacagaaacatcgtgactttgtatggagtgtttacaatccacttttctccaaatgtgccatcacgctgtctgttgcttgaactcctggatgtcagtgtttcggaattgctcttatattccagtcaccagggttgttccatgtggatgatacagcattgtgcccgagatgttttggaggcccttgcttttcttcatcatgagggctatgtccatgcggacctcaaaccacgtaacatattgtggagtgcagagaatgaatgttttaaactcattgactttggacttagcttcaaagaaggcaatcaggatgtaaagtatattcagacagacgggtatcgggctccagaagcagaattgcaaaattgcttggcccaggctggcctgcagagtgatacagaatgtacctcagctgttgatctgtggagcctaggaatcattttactggaaatgttctcaggaatgaaactgaaacatacagtcagatctcaggaatggaaggcaaacagttctgctattattgatcacatatttgccagtaaagcagtggtgaatgccgcaattccagcctatcacctaagagaccttatcaaaagcatgcttcatgatgatccaagcagaagaattcctgctgaaatggcattgtgcagcccattctttagcattccttttgcccctcatattgaagatctggtcatgcttcccactccagtgctaagactgctgaatgtgctggatgatgattatcttgagaatgaagaggaatatgaaggtctttgttgagtatgcaaatgctggtgattccaaagctgcgcagaaattactgactggaaggatgtttgatgggaagtttgttgtggctacattctacccgctgagtgcctacaagaggggatatctgtatcaaaccttgctttaatcagtaacctaaggactgtttcctttttctcctcttccatttcttgggttattccacatatgaatgcaggactacccccttaccattttaagaaggtactttatacatttatttaatcctactaatgtgcagccattgcccaagcagtgactgcgttgcatacatttggcactgagtaggacaagacctctcagctatacattgaggggttttagagcatccatgtgggcaacccttttttgtgcgggagagcaggtgttgctcttcagtatgtagcctaaaaaaatcttaattatttcatggatcatgaagcaaggatgaataatatcatgtcttggtaaatactaacaaatttgttaggtttggtgacatcatttacagattatttctttatgttgtccagtggttcttccttattgttgatatccataagctggcactggatgctctcagtaatgttaagtaattgtcaagcagcagttacctactgtgttcttaacactgagttgtgaattttttcttaaagcagtactgtagtactgaatattcctttaaaggaactgcagtgagcctatctaagtttttttaaattaaggcttttaaaatagaaagctgatgcttgatcttgcacaatttttatgtctagtatgtatgcttgagtgaatgtgcgagtatgaatgattagagaaaatttgagtcagtgtactttatagtgtgaatcctgtgagctaatacagtctatacttatttcttccctacctgtttcacatccgtaagatttaagatatacattttttgagaggtagtctgtctgatacaatgtaaatgacaaaacataattcctgagaggcccagaacaaactggagtctagcctggagttaaattgagacttctaaaatgattggaacaaagactaagttgtgccagatgtaaatcaacccctcttttagtttactttagactttgtattagctcatcttttttgtagtaaatctatagttttaaggtttctcaagatgtggctctacctactatgatgaaaattgaagtgggtcaaaagaattagatgtacagtgaagggaaaagaaaaaaaatgggcgaagagagggtggaaaataaaaggattcttttttcttcctttctgtttctcgtatccctgctccctttttcctccccttccctcattctttgcctctatccttagctgaagacaaactagaggagcagcatcccaggtagtttggcttttgactgcaaggtagttaagaaaggtgtagatataatgaggtagaagtagaaaggaagaaaaactcaaagaattcttaaaaggattcatagcaacataatgtgtccctgagtagaggatgctgctatgcgtgagttcatggacacaagttgattacatggtttttagaattataattatggattcttcttatttcatggtaggttgtctttaaagatataaaaattaggatgcctttatgaagcactgattataccaaaaaaaaaagacaagttatatacaggttattaatttttttatttatttattttttcctaaggaaaaagtcttctatctttccctgctggaagcctcctcatatttccttatgtttgccatgcaggttgctgagagtccagttagaatttgcattttacagaatgaaatactttaccccattcaaacaattattgtttgacattttagttatttataattgtcaaattcaggactctcctttaatgtttattatgaaaccaaatttggcataaggaggctgatttatgaattaccaaagggtcttgtggcatgttccccaatacatgcccttagaaggaagaactattattttttattttggccctttcaggagttgattataaattggtttgttttcaagtcagaattcaagtgggcagaacccgtattgtgaagacctaaactttcctaaatgttcatatgggtagcagattttgtggtgattagaaacatcaggtccttaaatacgatgaacatgggatacaaaggaattctttataagggcaagtatcctaagttagcacatttacttttctctcccctccgcccccaaaagaaaaatccttacaaataaactgcaggtaggcttctaagcctagtcctgcagtatgctgctaacatcttgatgccaatcttcacagcattctttgattgtcatcttattgctgatacattcatacatatatttagtgcttgacactgtagaattttgttacagaagatggttactagattttaagggagctgagggaataattgatgagccttgaattaaccatgcatttaattagattttttgttgttgttgttgttgttttgagatgatgtcttgctctgttgcccaggctggagtgcagtggctcaatctcggctcactgcaacctctgcctcgcaggtttgagcgattctcctgtctcagcctccccagtagctgggtttacaggcgcttgccaccacacctggctagatgttttatattaaagccagagaattgaaaaagaaatgcctcctgtgattgaaattattttatagctcttagcccgttctaccaaagatcacattagcagattacccctccctcctgtgatattatctttcttaaacctgaaccaaatatcaaaagatacaagtttcatgattaggatgaaatatatacatagggattttggtttattgaagttattgaaagacctagaaattttctttttgagagaaagggtaaagaggtgagggttcatgtcacttaacccctacccttttgggcaaattttgtctcaggtagtgtttcattccctaaattaatacctgtgcttccttgcctctcaccttcccagttacttctttggggtattactgtggcacattgtacacccagaaaaggcacatacagtgattattttgtgggaaatacttgattcttttgaaatatatttggagggggtagctagctagccactgtcaaaactaatgctgtatttacaggacaaaaacaagtagagttggacacctcagtaagagacagcattaactaaaagtactgactgccttttaaaggaatttttaaaactattctcttgcaataagagatccgcatttattaccactggatgtcttccttttttgtggccaccaatatagcagctctctttagagggattccctttctgctatgccttgagccaaactggctgcttttagaacaaaaaccataagtatggttttactcgaacttctctttgtttttattgagagaaatattgccttctttttggtactccagctgctaaagagtgctgagatatgttaaattattttttaaaagaaaatctccaaatacttatttaacttgtcttctagattcatgttgcttatattttaactattgagcaagtttattataaggaatgctgccatatagagaaagctgaagagaaaccatgggcagaaggcttttttctgtcttattacactggaccttcactctggtaagggcatcagttacttttctggaataaaaggcggagttagagcacttatcagatgctgtttcatggcttgttttagttaatttatcatgcagataactaacatttgggtatctttttgttttaggtcttattttctgactgttaggcctatcttacacataagttctactatcagtatacttggcagcatgacttttttttttttttacagttaatttaatgaaaatcagcaccattgtaaatgatagtaattgtaacaacatagttactgggtgaaggagtaggggagacactcagtaaccatctatttacctagacacttatgcaggggtacatgctaggtggctttattcagattcgggtacattggaatcacatcatgactttgagtctgatggctgtgtagataaagatttaagcaagtgccttgtgtttgctggaaaatattaaaactcatttgggtgaaagcttcccagatgatgataattaatagcacttctgcctttttcctggagtaacttttagattgagtcacatatgatagtataaaagtccaaaattttctgggtttacctttgttttatttttcatatatatattcactgtctgcctggaaatagccttggtttaccttatttttttgtatatgtaaaactattcatatttgattttattccaatattatatatgatggaaaagccagaattgtctggcagaatttaattcttccttggatctctagttctgtttttaatatcaggttccttcatcaaattttactactgtagctctgtgatataatttcatttcttgtcaattatggtcacatatagacaagtacttggtcacaattagctcaaaagaatccccatttcttaaggtgctcagtcaatcacctttattttgagatggtagtttttcaagttagtattacttactagctttcttgatgaatataaaaatgttgtctccatcatacagagctgagcctcttgtggtatattaagataagtcccattcttaatcacagaagaacatggatattttagtttttggagtacccagaattgtaaagattttgtttcattttgttttaggatagcttctctgcctaatactataggatatgtcatgttcgttattgtagccacctccctcagatgtttttcactatttttaaattatataatgaccagtagattcacagtagcatgtacttgacaagtgccatggatatttaagaagaaggtaaataattttaatattttttgctgtaattttataggagcagtggactgtaagagaaatatctataaatcagagagtatttaggaaactttgtattttataggtggtcattaaagtgatcttcaggatataagatagtttacacaaactttattctcctgataggaaatttttattcattttcctaccactcagcacttttgttctgccttgtactgcttatgaggattaatgttttaaatttgctttatttgtgcttttcagagagttgtcataattgtggcagttgtgtttgtggcactgtaaatgctgaaattcatgggaaacttaccaaatgactgcttgagtgttatttcccattaaattgggtagctgtcacaataaccagaagaaatcttgtggcccttttgaagaaagccatgtatgttttgttacctaggttcatagtattttaatttaaaggcaaagagaagcattctacttatttgtcttataaaccattaatcgttttttgtgcagaagagagcttattttgttatactgctttgtataatggaaataagtcacattctgggggaaaaaaactggaattgtttgtattttgtttttttggggggggatctttatgtgaaaaatcagagctacttgttaccataagcccttactatcaacaagataattatttgtaatcacttttttatcccaggttggaattgctttccccttctaagttatcttcccttaataatatttatgataccaggacagtgagggtataagagcaaatgtagtgaggtattcaaaaatcctgcatatatggactcaaaagttctttagttatttgaattatatatagctatattattttattagcttgggttgtcagaagattgccaattttaagagtaaagaggagagagataagtaataaaaatagaggaggggaagaaaatggctcccttactggtcttagtaatcttctatatagttaatgagctaaaaaatgatacttaaagttccaggtttggtaccgctagcatagaaacattgcctttcctacacattcctcatcattgtttcctcagaaaattattttaagagtttgtgaaaccagattaaatatctatattcagtttggcctaatttttaaaaataaatatttatactccagcttttgtgtatttggtgtacatcaccacttatgcaaatcaaggatcagaaaactggaggttagccatctccattatttccttttgcacattgggtacagtgggtggcattagtatgcactagctgcaaagtcacagcaccttatggaaataagtatgtttattataataaaaaaaagttaagctgcatctctgtagattatttactttgcagactgtaaagctgccctatcttttccagcagaatttactcttccattcttaattcttttttgaaatatcttaaataatttaacattcctttataacttcttaacagtgtcaaaactggggtagaagggattttattttttcccaaaagggttccatctttgctatctgttgatcagccttagaaaatctaagtatgatcaataaattttaatggttgatggcatcctgtgtcagctggagtagttggttgtgaatattaaaacctagtactattttccctcagtaacatgtaattgctacattttttataagaaggtatggttagaaaaaaatgtgaaagatcacttaaaccaaagccagttacaaggagtaatctctcctgttggtttaccttcacctcagaactacaagaatattacaatacatagtgaatagttgtctgtaacatttctaccagttgtttcagtagcatattggtcttggcatttcttggcactgtggttctgctgtattatttgtgatgtcttattgtttgtgagcttttgttttttttttaaagaaaaaacaaaaactaagtgggactatgtatgtagatgtgtgtcagtaccaaaaagttattttctcaaatccctaaatttctgatttccattcaagtcttttaaactctttcctgctgaatagcaaagaacttttattttccactttcctatattcctaaaaagtgtgaacaatgcgtttcagttgactgtattgcatacttttttgctgaagactttttctgtaaacacaattgccttgttcagttttgttgtaaactgacttaccataagatgcactgttgataatgctttctgatgtgtgtttgataagagtgataaaataaaagcttaaaaataaaggagttgctttttaatttc

SEQ ID NO: 239192 - protein, 1081 aa, Artificial Sequence
  derived and/or modified sequence
MDIRKEKRLNMALQMSNFKKALNRFEKLVEQTAAQKRDERAGLFIHKEDAIGYDKFYASVQKLFGPDVKNQDVKRFYRKLCNNTDASADWCEIFGYFSSEEDPIASQLDEENLVFFVSRKRRILISGSRRRDVIKSIVKIPHLDLLITATQKGLITVFNNQDTSWITGCDYLLQLKRIVATTERTIIVWDYKAQGSSQENYFVIKPMDHCLLCVCVVPLPDHLCRDDILLGDDGGFVNRFTVNSDDFGIKQAKSKRKLQNQVLDSKNFKSVKRKLHNDWVMKIRYISALNCFGSCSLDSNHSLVLESLKRLEDNLPVREFSMPRGANTFCYCVKANVIVTGGDDKVIRLWHPNISTKPVGKLVGHMFSIAEIVTNEKDQHVVSLSSAKVFRVWDIQTLSLLQVFHDSQGGPGDMQIYSMIYDANHGMLITGSSVMDMYPLTRMIQDTKQVPHTHEREINVMLYNKYFHQVLTICSESIIRVWELETGLQVYQILEPHGFNTEVTSAAVDESGFLFATGAYNGTVRIWDFGSGQEMKVLPEGKDWKEDEHCLRRLIFLKAQEKHQQLVLALERNGTIKMIQGKEDDIYLMVIWELPDVVPFLQDGKHAVHLRMSTRDRNMAIPFPDVELIVERNFSQPTDNPTMDLLRVNCIDLLQVEGYNLIAAGTLNGVIILWNFVTSTVKKVYRPEDCFTVNPDLHPKHFKINDILFLFRTPECARRSSQDSICSSSQCESSKGPQSSKGSKQSIHDSEVKGEQTDVMVGKQQPMDKKHPGIANLPEAQPPILVTAHEDGHLRLWTLEGRLLKDMLPFTKHSAISLTSLYTDSCTRILLAGNVEGHVILCNISSFLDPPHDEKKFKQLLSWRAHSLEIIQVIYVEEKQVVLTASIDGSVRLWHALNGHYCGYFGQRRLFELSQTRDFILPCDVTEYPIEIKEESKFTEKQKYEYPLIFDREKWRKMSSVSLLFKRTPPKAFEVEQDFKFFKSLSSPKIRRYPLEGFVTENREAGIVFGSLPIYSISSPTSLRFLPLIGVEAQKDSSDGITGKKKGGHVQREKAPRRRSLKKNLVPQINLASSFFPAIPK

SEQ ID NO: 239193 - protein, 914 aa, Artificial Sequence
  derived and/or modified sequence
MDIRKEKRLNMALQMSNFKKALNRFEKLVEQTAAQKRDERAGLFIHKEDAIGYDKFYASVQKLFGPDVKNQDVKRFYRKLCNNTDASADWCEIFGYFSSEEDPIASQLDEENLVFFVSRKRRILISGSRRRDVIKSIVKIPHLDLLITATQKGLITVFNNQDTSWITGCDYLLQLKRIVATTERTIIVWDYKAQGSSQENYFVIKPMDHCLLCVCVVPLPDHLCRDDILLGDDGGFVNRFTVNSDDFGIKQAKSKRKLQNQVLDSKNFKSVKRKLHNDWVMKIRYISALNCFGSCSLDSNHSLVLESLKRLEDNLPVREFSMPRGANTFCYCVKANVIVTGGDDKVIRLWHPNISTKPVGKLVGHMFSIAEIVTNEKDQHVVSLSSAKVFRVWDIQTLSLLQVFHDSQGGPGDMQIYSMIYDANHGMLITGSSVMDMYPLTRMIQDTKQVPHTHEREINVMLYNKYFHQVLTICSESIIRVWELETGLQVYQILEPHGFNTEVTSAAVDESGFLFATGAYNGTVRIWDFGSGQEMKVLPEGKDWKEDEHCLRRLIFLKAQEKHQQLVLALERNGTIKMIQGKEDDIYLMVIWELPDVVPFLQDGKHAVHLRMSTRDRNMAIPFPDVELIVERNFSQPTDNPTMDLLRVNCIDLLQVEGYNLIAAGTLNEGHVILCNISSFLDPPHDEKKFKQLLSWRAHSLEIIQVIYVEEKQVVLTASIDGSVRLWHALNGHYCGYFGQRRLFELSQTRDFILPCDVTEYPIEIKEESKFTEKQKYEYPLIFDREKWRKMSSVSLLFKRTPPKAFEVEQDFKFFKSLSSPKIRRYPLEGFVTENREAGIVFGSLPIYSISSPTSLRFLPLIGVEAQKDSSDGITGKKKGGHVQREKAPRRRSLKKNLVPQINLASSFFPAIPK

SEQ ID NO: 239194 - DNA, 3246 bp, Artificial Sequence
  derived and/or modified sequence
atggacatcagaaaggagaagagactgaacatggccctgcagatgagcaacttcaagaaggccctgaacagattcgagaagctggtggagcagaccgccgcccagaagagagacgagagagccggcctgttcatccacaaggaggacgccatcggctacgacaagttctacgccagcgtgcagaagctgttcggccccgacgtgaagaaccaggacgtgaagagattctacagaaagctgtgcaacaacaccgacgccagcgccgactggtgcgagatcttcggctacttcagcagcgaggaggaccccatcgccagccagctggacgaggagaacctggtgttcttcgtgagcagaaagagaagaatcctgatcagcggcagcagaagaagagacgtgatcaagagcatcgtgaagatcccccacctggacctgctgatcaccgccacccagaagggcctgatcaccgtgttcaacaaccaggacaccagctggatcaccggctgcgactacctgctgcagctgaagagaatcgtggccaccaccgagagaaccatcatcgtgtgggactacaaggcccagggcagcagccaggagaactacttcgtgatcaagcccatggaccactgcctgctgtgcgtgtgcgtggtgcccctgcccgaccacctgtgcagagacgacatcctgctgggcgacgacggcggcttcgtgaacagattcaccgtgaacagcgacgacttcggcatcaagcaggccaagagcaagagaaagctgcagaaccaggtgctggacagcaagaacttcaagagcgtgaagagaaagctgcacaacgactgggtgatgaagatcagatacatcagcgccctgaactgcttcggcagctgcagcctggacagcaaccacagcctggtgctggagagcctgaagagactggaggacaacctgcccgtgagagagttcagcatgcccagaggcgccaacaccttctgctactgcgtgaaggccaacgtgatcgtgaccggcggcgacgacaaggtgatcagactgtggcaccccaacatcagcaccaagcccgtgggcaagctggtgggccacatgttcagcatcgccgagatcgtgaccaacgagaaggaccagcacgtggtgagcctgagcagcgccaaggtgttcagagtgtgggacatccagaccctgagcctgctgcaggtgttccacgacagccagggcggccccggcgacatgcagatctacagcatgatctacgacgccaaccacggcatgctgatcaccggcagcagcgtgatggacatgtaccccctgaccagaatgatccaggacaccaagcaggtgccccacacccacgagagagagatcaacgtgatgctgtacaacaagtacttccaccaggtgctgaccatctgcagcgagagcatcatcagagtgtgggagctggagaccggcctgcaggtgtaccagatcctggagccccacggcttcaacaccgaggtgaccagcgccgccgtggacgagagcggcttcctgttcgccaccggcgcctacaacggcaccgtgagaatctgggacttcggcagcggccaggagatgaaggtgctgcccgagggcaaggactggaaggaggacgagcactgcctgagaagactgatcttcctgaaggcccaggagaagcaccagcagctggtgctggccctggagagaaacggcaccatcaagatgatccagggcaaggaggacgacatctacctgatggtgatctgggagctgcccgacgtggtgcccttcctgcaggacggcaagcacgccgtgcacctgagaatgagcaccagagacagaaacatggccatccccttccccgacgtggagctgatcgtggagagaaacttcagccagcccaccgacaaccccaccatggacctgctgagagtgaactgcatcgacctgctgcaggtggagggctacaacctgatcgccgccggcaccctgaacggcgtgatcatcctgtggaacttcgtgaccagcaccgtgaagaaggtgtacagacccgaggactgcttcaccgtgaaccccgacctgcaccccaagcacttcaagatcaacgacatcctgttcctgttcagaacccccgagtgcgccagaagaagcagccaggacagcatctgcagcagcagccagtgcgagagcagcaagggcccccagagcagcaagggcagcaagcagagcatccacgacagcgaggtgaagggcgagcagaccgacgtgatggtgggcaagcagcagcccatggacaagaagcaccccggcatcgccaacctgcccgaggcccagccccccatcctggtgaccgcccacgaggacggccacctgagactgtggaccctggagggcagactgctgaaggacatgctgcccttcaccaagcacagcgccatcagcctgaccagcctgtacaccgacagctgcaccagaatcctgctggccggcaacgtggagggccacgtgatcctgtgcaacatcagcagcttcctggaccccccccacgacgagaagaagttcaagcagctgctgagctggagagcccacagcctggagatcatccaggtgatctacgtggaggagaagcaggtggtgctgaccgccagcatcgacggcagcgtgagactgtggcacgccctgaacggccactactgcggctacttcggccagagaagactgttcgagctgagccagaccagagacttcatcctgccctgcgacgtgaccgagtaccccatcgagatcaaggaggagagcaagttcaccgagaagcagaagtacgagtaccccctgatcttcgacagagagaagtggagaaagatgagcagcgtgagcctgctgttcaagagaaccccccccaaggccttcgaggtggagcaggacttcaagttcttcaagagcctgagcagccccaagatcagaagataccccctggagggcttcgtgaccgagaacagagaggccggcatcgtgttcggcagcctgcccatctacagcatcagcagccccaccagcctgagattcctgcccctgatcggcgtggaggcccagaaggacagcagcgacggcatcaccggcaagaagaagggcggccacgtgcagagagagaaggcccccagaagaagaagcctgaagaagaacctggtgccccagatcaacctggccagcagcttcttccccgccatccccaagtag

SEQ ID NO: 239195 - DNA, 2745 bp, Artificial Sequence
  derived and/or modified sequence
atggacatcagaaaggagaagagactgaacatggccctgcagatgagcaacttcaagaaggccctgaacagattcgagaagctggtggagcagaccgccgcccagaagagagacgagagagccggcctgttcatccacaaggaggacgccatcggctacgacaagttctacgccagcgtgcagaagctgttcggccccgacgtgaagaaccaggacgtgaagagattctacagaaagctgtgcaacaacaccgacgccagcgccgactggtgcgagatcttcggctacttcagcagcgaggaggaccccatcgccagccagctggacgaggagaacctggtgttcttcgtgagcagaaagagaagaatcctgatcagcggcagcagaagaagagacgtgatcaagagcatcgtgaagatcccccacctggacctgctgatcaccgccacccagaagggcctgatcaccgtgttcaacaaccaggacaccagctggatcaccggctgcgactacctgctgcagctgaagagaatcgtggccaccaccgagagaaccatcatcgtgtgggactacaaggcccagggcagcagccaggagaactacttcgtgatcaagcccatggaccactgcctgctgtgcgtgtgcgtggtgcccctgcccgaccacctgtgcagagacgacatcctgctgggcgacgacggcggcttcgtgaacagattcaccgtgaacagcgacgacttcggcatcaagcaggccaagagcaagagaaagctgcagaaccaggtgctggacagcaagaacttcaagagcgtgaagagaaagctgcacaacgactgggtgatgaagatcagatacatcagcgccctgaactgcttcggcagctgcagcctggacagcaaccacagcctggtgctggagagcctgaagagactggaggacaacctgcccgtgagagagttcagcatgcccagaggcgccaacaccttctgctactgcgtgaaggccaacgtgatcgtgaccggcggcgacgacaaggtgatcagactgtggcaccccaacatcagcaccaagcccgtgggcaagctggtgggccacatgttcagcatcgccgagatcgtgaccaacgagaaggaccagcacgtggtgagcctgagcagcgccaaggtgttcagagtgtgggacatccagaccctgagcctgctgcaggtgttccacgacagccagggcggccccggcgacatgcagatctacagcatgatctacgacgccaaccacggcatgctgatcaccggcagcagcgtgatggacatgtaccccctgaccagaatgatccaggacaccaagcaggtgccccacacccacgagagagagatcaacgtgatgctgtacaacaagtacttccaccaggtgctgaccatctgcagcgagagcatcatcagagtgtgggagctggagaccggcctgcaggtgtaccagatcctggagccccacggcttcaacaccgaggtgaccagcgccgccgtggacgagagcggcttcctgttcgccaccggcgcctacaacggcaccgtgagaatctgggacttcggcagcggccaggagatgaaggtgctgcccgagggcaaggactggaaggaggacgagcactgcctgagaagactgatcttcctgaaggcccaggagaagcaccagcagctggtgctggccctggagagaaacggcaccatcaagatgatccagggcaaggaggacgacatctacctgatggtgatctgggagctgcccgacgtggtgcccttcctgcaggacggcaagcacgccgtgcacctgagaatgagcaccagagacagaaacatggccatccccttccccgacgtggagctgatcgtggagagaaacttcagccagcccaccgacaaccccaccatggacctgctgagagtgaactgcatcgacctgctgcaggtggagggctacaacctgatcgccgccggcaccctgaacgagggccacgtgatcctgtgcaacatcagcagcttcctggaccccccccacgacgagaagaagttcaagcagctgctgagctggagagcccacagcctggagatcatccaggtgatctacgtggaggagaagcaggtggtgctgaccgccagcatcgacggcagcgtgagactgtggcacgccctgaacggccactactgcggctacttcggccagagaagactgttcgagctgagccagaccagagacttcatcctgccctgcgacgtgaccgagtaccccatcgagatcaaggaggagagcaagttcaccgagaagcagaagtacgagtaccccctgatcttcgacagagagaagtggagaaagatgagcagcgtgagcctgctgttcaagagaaccccccccaaggccttcgaggtggagcaggacttcaagttcttcaagagcctgagcagccccaagatcagaagataccccctggagggcttcgtgaccgagaacagagaggccggcatcgtgttcggcagcctgcccatctacagcatcagcagccccaccagcctgagattcctgcccctgatcggcgtggaggcccagaaggacagcagcgacggcatcaccggcaagaagaagggcggccacgtgcagagagagaaggcccccagaagaagaagcctgaagaagaacctggtgccccagatcaacctggccagcagcttcttccccgccatccccaagtag

SEQ ID NO: 239196 - DNA, 3246 bp, Artificial Sequence
  derived and/or modified sequence
atggatattcggaaagaaaaacgcctgaacatggctcttcagatgagcaactttaagaaggctttaaacagattcgagaagctcgtggaacagacagccgctcagaaacgcgatgagcgggctggactgtttatccacaaggaggatgccattggttatgacaagttttacgcaagtgttcagaaattgttcggacccgatgtgaagaaccaggatgtcaagcggttctatcgcaagttgtgcaacaacacagatgctagcgccgactggtgtgaaatcttcgggtacttctcctcggaagaggatcccatcgcctctcagcttgacgaagaaaacctagtgtttttcgtgtcacgaaagcgacggatcctgatctcaggctcacgacgaagggatgtgatcaagagcatcgtcaagatcccccatctggatctactaatcactgctacgcaaaagggcctaattactgttttcaacaaccaggacacgtcttggattactggatgcgactatttgttacagctgaagcgcatagtggctactacagagaggaccatcattgtgtgggactacaaagcgcaaggctcttcccaggaaaactattttgtcattaagccgatggaccattgtctcctgtgcgtgtgcgtagtgccactgccagatcacctttgccgggacgacattttgcttggggatgacggtgggttcgtaaataggtttacagtgaattcagatgatttcggcattaagcaggcgaagagcaaaaggaagttgcagaaccaggtcttggactcaaagaattttaagtcagtgaaacgaaagcttcacaacgactgggtcatgaagatacgctatatctctgcattgaattgcttcggctcctgctccctggattctaatcacagtctggttctggaatccttaaaaagacttgaggacaatttaccggtcagagaattctcaatgcccaggggagctaacactttttgttattgtgtgaaggcgaatgttatagtgaccgggggcgacgacaaggtcatcaggctgtggcatcctaatatctcgactaagccagtgggcaagctggtgggtcatatgttcagtatagcggaaatcgtgactaatgagaaagatcaacacgtagtttcactatctagcgcaaaggtattccgggtctgggatattcagacactaagtctgttgcaggtgtttcacgattctcagggcggccccggggatatgcagatctactccatgatctatgatgccaaccatggcatgctcattactggctctagtgtgatggatatgtaccctctgacaaggatgatacaggatacgaagcaggtacctcacacccatgagagggaaatcaacgtcatgctttacaacaaatacttccatcaagtgctgacaatatgctctgaaagtattattcgcgtatgggagctcgaaactggacttcaggtataccagatcctggaaccgcacgggttcaacaccgaggttacgtctgctgccgtcgatgagtctggctttctgttcgccacaggggcctataatggaacggttaggatctgggatttcggctctggacaagaaatgaaagtcctacctgaggggaaggactggaaagaggacgagcactgtctgagacggctgatcttcttaaaagcccaggaaaaacatcagcagttggtgctggccctggagcgaaacgggacaatcaagatgattcaaggcaaggaggatgatatatatcttatggtaatatgggaactccccgatgtcgtgccgtttctgcaagacgggaaacacgccgtgcaccttcggatgagcactcgcgataggaacatggcaatccccttccctgacgtggaactgattgtggagaggaactttagtcaacccaccgacaaccctaccatggatctccttcgggtcaattgcattgacctgctgcaggtagagggatataatctgattgccgctgggacgttgaatggagtgattatcctgtggaacttcgtaacaagtacagtgaagaaagtgtaccgccctgaggactgcttcacagtgaacccagatctgcaccccaagcactttaagattaacgatatcctctttctctttcgaacaccagaatgcgcacgccgcagttcccaagactccatctgctcgtcctcacagtgtgaatcttccaagggccctcaatcctcaaagggcagcaagcaaagcatccacgactcagaggttaagggagaacaaacagacgtgatggtgggtaaacagcagcctatggataaaaagcaccccggaatagcaaacctgccagaggcccagcctcccattctagtgaccgcccatgaggatggacatctgagattgtggactctcgaaggacgtctgctcaaggacatgctgccctttactaaacactccgctatctcattgacttcactctataccgactcttgtacccgaatccttctggctgggaacgtcgagggacatgtgatcctttgtaatatatcttcatttctggaccctcctcacgacgagaaaaagtttaagcaactcctatcctggagagctcactccctcgaaatcatccaggtgatctacgtcgaagagaagcaggtcgtgctgactgcctcgattgacggctcagtgcgactgtggcatgctctcaatgggcattactgtggctactttggtcagagacggttgtttgagctctctcagaccagggacttcatattaccttgcgacgtcacagagtaccctattgagatcaaggaagagtccaagtttaccgaaaagcagaagtacgaatacccactgatcttcgacagggagaagtggagaaaaatgtcctcagtgagccttttatttaagaggacaccccctaaggcattcgaagttgagcaagatttcaaattctttaaaagcttgtcatccccaaaaattaggaggtacccattggaaggcttcgtgaccgagaaccgggaggctggtattgtcttcggcagcctccccatatattcaattagcagcccaacgtccctccgtttcctacccttaataggcgttgaggcgcagaaggactcgtccgacggcatcactggcaaaaagaagggaggccacgtacagagagaaaaggcaccccggcgccgatctttaaagaaaaacctagtcccacaaattaatctcgcctcatcttttttcccggccatccctaagtag

SEQ ID NO: 239197 - DNA, 2745 bp, Artificial Sequence
  derived and/or modified sequence
atggatatcaggaaggagaaaagactgaacatggcgctgcagatgtctaattttaaaaaagcactcaaccggtttgagaagttagtcgaacagacagccgcccagaagagggatgaaagggcggggctgtttattcataaggaggacgccatcgggtacgataaattctatgcttccgttcagaaactattcggtcccgacgtcaaaaatcaagatgttaagcggttctataggaaactgtgtaataataccgatgcttctgcggactggtgcgagatttttggctacttctctagcgaagaggacccgattgcttcccagttagacgaagagaatctagtcttctttgtcagtcggaaacgccgcatccttatcagtgggtccaggaggcgggacgtaatcaagtctattgtgaaaattcctcatctcgacttgctgataactgcaacacaaaagggtctgataactgtgtttaacaatcaggatacatcgtggatcactggatgcgactaccttctgcagctgaagcggatcgttgcaacaaccgagcgaaccatcatcgtgtgggattacaaggcccaggggagctcccaggagaattacttcgttataaaacccatggatcattgtctgttgtgtgtttgtgtcgttcctttacctgatcatctctgcagagacgatatactgttgggagatgacggaggcttcgtgaaccgctttacggttaattccgatgactttggaatcaagcaggctaagtccaagagaaaactgcagaatcaggtcctagacagtaagaatttcaaatccgttaaaagaaagcttcacaacgactgggtaatgaaaatacggtacatcagcgcacttaactgcttcgggtcatgcagtttagactcgaatcacagtctggttctagaaagcttgaaaagactagaggacaacctccctgttcgggagttttcaatgcctcgcggtgccaataccttctgttattgtgtgaaagccaatgtcatcgtgacgggcggggatgataaagtgatccggctttggcacccaaatatatcaaccaagccagtggggaagttggtggggcatatgttttctatcgcggagattgttaccaatgagaaggatcagcacgttgtgtctttaagctcggccaaggttttccgagtttgggatatacaaactctgagcctcttacaagtgttccacgatagtcaaggggggccaggggacatgcaaatttatagcatgatttatgatgctaaccatggcatgctgatcaccggctccagtgttatggacatgtatcccttgactcgcatgattcaggacacaaaacaggtaccccatactcatgagagagaaataaatgtgatgctgtacaataaatatttccaccaagtcctcacaatttgttcagagtccatcatcagggtgtgggaactggagacaggcttgcaggtttaccaaatcctcgaaccgcacggatttaacaccgaagtgacttcagcggccgtggacgaaagtggattcctgtttgccacgggggcctacaacggtaccgtaagaatctgggactttggatccggtcaggaaatgaaagtgctgcccgagggtaaggactggaaagaggatgagcattgcctgcggcgcctaattttcctgaaagctcaagagaagcaccagcaactggtgctggctttggagcggaatggcactatcaagatgattcagggcaaggaagatgacatttacttgatggttatttgggaactaccggatgttgtcccattcctccaggacgggaagcacgcagttcacctaagaatgagcacccgtgatagaaatatggcaatacccttccccgatgtggaacttatcgtggaaagaaatttctcccagccaaccgacaaccccaccatggatctactgcgagtgaattgcatcgacctgttgcaggtggaaggatataatctgatcgcagccgggacactcaacgaaggacatgttatattgtgtaacatatcttctttcctggaccctcctcacgatgaaaagaaattcaaacagttgctaagctggagggcacattcgctggagatcatccaggtgatctatgtggaagaaaagcaggtagtgcttactgcctcaatcgacggtagtgtgagactgtggcatgctctcaatgggcactattgtgggtacttcgggcagcgtcgtctgtttgaattatcgcaaacccgagactttattcttccttgtgacgtgactgaatatcctatagagattaaagaggaatctaagtttaccgagaaacaaaaatacgagtacccactgatcttcgatagagagaagtggcgaaagatgtcttcagtttccctactttttaagcgaacccccccgaaagccttcgaggttgagcaagacttcaagtttttcaaaagtctatcatctccaaagattaggcgttacccgctggagggatttgttactgagaaccgtgaagcaggaattgtatttgggtctctgcctatctacagcatctcctcccccacctctctgcgcttcctgccattaattggagtagaagcccagaaggattcttctgacggaatcactgggaaaaaaaagggcggccatgtgcaaagagagaaggcgccccggagaaggtccctgaagaaaaatctagtaccccaaattaacctggcctccagtttcttccctgcaattcctaaatag

SEQ ID NO: 239198 - DNA, 3246 bp, Artificial Sequence
  derived and/or modified sequence
atggacatcaggaaggagaagaggctgaacatggccctgcagatgagcaacttcaagaaggccctgaacagatttgagaagctggtggagcagacagctgcccagaagagagatgaaagagctggcctcttcatccacaaggaggatgccatcggctatgacaagttctacgcctctgtgcagaagctgtttggaccagatgtgaagaaccaggatgtgaagcgcttctacaggaagctgtgcaacaacacagatgccagcgctgactggtgtgagatcttcggctacttcagcagcgaggaggaccccatcgccagccagctggatgaggagaacctggtgttctttgtgtccaggaagaggcgcatcctgatcagcggcagcagaagaagagatgtgatcaagagcatcgtgaagatcccccacctggacctgctgatcacagccacccagaagggcctcatcaccgtcttcaacaaccaggacacctcctggatcaccggctgtgactacctgctgcagctgaagagaattgtggccaccacagagaggaccatcatcgtgtgggactacaaggcccagggcagcagccaggagaactacttcgtcatcaagcccatggaccactgcctgctgtgtgtgtgtgtggtgcccctgcctgaccacctgtgcagagatgacatcctgctgggagatgatggcggctttgtgaaccgcttcaccgtgaacagtgatgactttggcatcaagcaggccaagagcaagaggaagctgcagaaccaggtgctggacagcaagaacttcaagtctgtgaagaggaagctgcacaatgactgggtgatgaagatccgctacatcagcgccctgaactgcttcggcagctgcagcctggacagcaaccacagcctggtgctggagagcctgaagaggctggaggacaacctgcctgtgcgggagttctccatgcccaggggggccaacaccttctgctactgtgtgaaggccaacgtcatcgtgactggaggagatgacaaggtgatccggctgtggcaccccaacatcagcaccaagcctgtgggcaagctggtgggccacatgttcagcattgctgagatcgtgaccaatgagaaggaccagcacgtggtgtccctgagcagcgccaaggtgttccgggtgtgggacatccagaccctgagcctgctgcaggtgttccatgacagccagggcggccctggggacatgcagatctacagcatgatctatgatgccaaccacggcatgctgatcaccggcagctctgtgatggacatgtaccccctgaccaggatgatccaggacaccaagcaggtgccccacacccatgagcgggagatcaacgtgatgctgtacaacaagtacttccaccaggtgctgaccatctgcagcgagagcatcatccgggtgtgggagctggagaccggcctgcaggtgtaccagatcctggagccccacggcttcaacacagaggtgaccagcgctgctgtggatgaaagtggcttcctgtttgccactggagcctacaatggaacagtgcgcatctgggactttggaagtggccaggagatgaaggtgctgcctgagggcaaggactggaaggaggatgagcactgcctgcggcggctcatcttcctgaaggcccaggagaagcaccagcagctggtgctggccctggagagaaatggcaccatcaagatgatccagggcaaggaggatgacatctacctgatggtgatctgggagctgcctgatgtggtgcccttcctgcaggacggcaagcatgctgtgcacctgaggatgagcacccgggacaggaacatggccatccccttcccagatgtggagctgattgtggagaggaacttcagccagcccacagacaaccccaccatggacctgctgcgggtgaactgcatcgacctgctgcaggtggagggctacaacctgattgctgctggcaccctgaatggagtcatcatcctgtggaactttgtgaccagcacagtgaagaaggtgtacagacctgaggactgcttcaccgtgaacccagacctgcaccccaagcacttcaagatcaatgacatcctcttcctgttccgcaccccagaatgtgcccggcgcagcagccaggacagcatctgcagcagcagccagtgtgagagcagcaagggcccccagagcagcaagggcagcaagcagagcatccatgacagcgaggtgaagggggagcagacagatgtgatggtgggcaagcagcagcccatggacaagaagcaccctggcatcgccaacctgcctgaggcccagccccccatcctggtgacagcccatgaagatggccacctgcggctgtggaccctggagggccgcctgctgaaggacatgctgcccttcaccaagcacagcgccatcagcctgaccagcctgtacacagacagctgcacccgcatcctgctggccggaaatgtggagggccacgtgatcctgtgcaacatcagcagcttcctggacccccctcatgatgagaagaagttcaagcagctgctgtcctggagggcccacagcctggagatcatccaggtgatctacgtggaggagaagcaggtggtgctgacagccagcattgatggctctgtgcggctgtggcacgccctgaatggccactactgcggctacttcggccagaggcggctgtttgagctgagccagacccgggacttcatcctgccctgtgatgtgacagagtaccccatcgagatcaaggaggagagcaagttcacagagaagcagaagtatgagtaccccctcatctttgaccgggagaagtggaggaagatgagctctgtgtccctgctcttcaagaggaccccacccaaggcctttgaggtggagcaggacttcaagttcttcaagagcctgagcagccccaagatccgccgctaccccctggagggctttgtgacagaaaatcgggaggccggcatcgtgtttggcagcctgcccatctacagcatcagcagccccaccagcctgcgcttcctgcccctgattggagtggaggcccagaaggacagcagtgatggcatcaccgggaagaagaagggcggccacgtgcagcgggagaaggccccccggcggcgcagcctgaagaagaacctggtgccccagatcaacctggccagcagcttcttccctgccatccccaagtag

SEQ ID NO: 239199 - DNA, 2745 bp, Artificial Sequence
  derived and/or modified sequence
atggacatcaggaaggagaagaggctgaacatggccctgcagatgagcaacttcaagaaggccctgaacagatttgagaagctggtggagcagacagctgcccagaagagagatgaaagagctggcctcttcatccacaaggaggatgccatcggctatgacaagttctacgcctctgtgcagaagctgtttggaccagatgtgaagaaccaggatgtgaagcgcttctacaggaagctgtgcaacaacacagatgccagcgctgactggtgtgagatcttcggctacttcagcagcgaggaggaccccatcgccagccagctggatgaggagaacctggtgttctttgtgtccaggaagaggcgcatcctgatcagcggcagcagaagaagagatgtgatcaagagcatcgtgaagatcccccacctggacctgctgatcacagccacccagaagggcctcatcaccgtcttcaacaaccaggacacctcctggatcaccggctgtgactacctgctgcagctgaagagaattgtggccaccacagagaggaccatcatcgtgtgggactacaaggcccagggcagcagccaggagaactacttcgtcatcaagcccatggaccactgcctgctgtgtgtgtgtgtggtgcccctgcctgaccacctgtgcagagatgacatcctgctgggagatgatggcggctttgtgaaccgcttcaccgtgaacagtgatgactttggcatcaagcaggccaagagcaagaggaagctgcagaaccaggtgctggacagcaagaacttcaagtctgtgaagaggaagctgcacaatgactgggtgatgaagatccgctacatcagcgccctgaactgcttcggcagctgcagcctggacagcaaccacagcctggtgctggagagcctgaagaggctggaggacaacctgcctgtgcgggagttctccatgcccaggggggccaacaccttctgctactgtgtgaaggccaacgtcatcgtgactggaggagatgacaaggtgatccggctgtggcaccccaacatcagcaccaagcctgtgggcaagctggtgggccacatgttcagcattgctgagatcgtgaccaatgagaaggaccagcacgtggtgtccctgagcagcgccaaggtgttccgggtgtgggacatccagaccctgagcctgctgcaggtgttccatgacagccagggcggccctggggacatgcagatctacagcatgatctatgatgccaaccacggcatgctgatcaccggcagctctgtgatggacatgtaccccctgaccaggatgatccaggacaccaagcaggtgccccacacccatgagcgggagatcaacgtgatgctgtacaacaagtacttccaccaggtgctgaccatctgcagcgagagcatcatccgggtgtgggagctggagaccggcctgcaggtgtaccagatcctggagccccacggcttcaacacagaggtgaccagcgctgctgtggatgaaagtggcttcctgtttgccactggagcctacaatggaacagtgcgcatctgggactttggaagtggccaggagatgaaggtgctgcctgagggcaaggactggaaggaggatgagcactgcctgcggcggctcatcttcctgaaggcccaggagaagcaccagcagctggtgctggccctggagagaaatggcaccatcaagatgatccagggcaaggaggatgacatctacctgatggtgatctgggagctgcctgatgtggtgcccttcctgcaggacggcaagcatgctgtgcacctgaggatgagcacccgggacaggaacatggccatccccttcccagatgtggagctgattgtggagaggaacttcagccagcccacagacaaccccaccatggacctgctgcgggtgaactgcatcgacctgctgcaggtggagggctacaacctgattgctgctggcaccctgaatgaaggacatgtgatcctgtgcaacatcagcagcttcctggacccccctcatgatgagaagaagttcaagcagctgctgtcctggagggcccacagcctggagatcatccaggtgatctacgtggaggagaagcaggtggtgctgacagccagcattgatggctctgtgcggctgtggcacgccctgaatggccactactgcggctacttcggccagaggcggctgtttgagctgagccagacccgggacttcatcctgccctgtgatgtgacagagtaccccatcgagatcaaggaggagagcaagttcacagagaagcagaagtatgagtaccccctcatctttgaccgggagaagtggaggaagatgagctctgtgtccctgctcttcaagaggaccccacccaaggcctttgaggtggagcaggacttcaagttcttcaagagcctgagcagccccaagatccgccgctaccccctggagggctttgtgacagagaaccgggaggccggcatcgtgtttggcagcctgcccatctacagcatcagcagccccaccagcctgcgcttcctgcccctcatcggcgtggaggcccagaaggacagcagtgatggcatcaccgggaagaagaagggcggccacgtgcagcgggagaaggcccccaggagaagaagcctgaagaagaacctggtgccccagatcaacctggccagcagcttcttccctgccatccccaagtag

SEQ ID NO: 239200 - DNA, 3246 bp, Artificial Sequence
  derived and/or modified sequence
atggacatccggaaggagaagcggctgaacatggccctgcagatgagtaatttcaaaaaggccttaaaccggttcgagaagctcgtagagcagaccgcagcccaaaaaagggacgaacgggctgggttatttatacataaagaggatgccattggatatgacaagttttacgcctctgtgcagaaactcttcggtcctgacgtgaagaaccaggacgtcaaacgattttataggaagctgtgtaacaacacagacgcttcggctgactggtgtgaaatttttgggtatttctccagtgaagaagatccaatagcctctcagctcgatgaggagaatttggtgttcttcgtgagtcggaaaagacgtatactaattagcggcagtcggcgaagggatgtgattaaatccattgtaaagattcctcacttggacctgctcatcacagctacacagaaaggacttatcaccgtcttcaataaccaggacacaagctggatcaccggctgtgactatctgcttcagttgaagagaattgtcgccacaacagaaaggaccatcatcgtctgggattacaaagcccagggatccagtcaggaaaattactttgttatcaaaccgatggaccactgtctgttgtgtgtgtgcgtcgtgccactaccggatcacctttgtcgagacgacattttattgggagatgatggggggttcgtgaaccggttcacagtcaatagtgatgattttgggataaaacaggccaagagtaagcggaagttgcagaaccaagtgcttgatagcaagaacttcaaaagcgtgaagagaaagctccacaacgattgggtaatgaaaatcagatacatctctgccctgaactgtttcggcagctgctctctggatagcaaccattccctagtcctggagagcttaaagcggctcgaagacaacctgcctgtgcgcgagttttccatgccacggggcgcaaacaccttttgctattgtgtgaaggctaatgtgatcgtcaccggaggagatgacaaagtgatcaggctttggcaccccaatatctctacaaaaccagtgggaaaactagtgggacacatgttttccatagccgagattgtgactaacgagaaggatcagcacgtggtctccttgtcatccgccaaagtattccgcgtctgggacattcagacgctttccttgctgcaagtgttccatgatagccaaggtggtcccggggatatgcagatatatagtatgatttacgacgcaaaccatgggatgttgataacaggttccagcgtgatggacatgtaccctctaacacggatgattcaggacaccaagcaagttccccacactcatgagagagagattaatgtcatgctgtataacaagtactttcatcaggtgcttacaatatgtagcgagagcataatcagggtgtgggaactggagaccggcctgcaggtctatcagatactggagccccatggctttaacacagaggtgacttcagctgctgtggatgagtcaggatttctgttcgccaccggagcatacaatgggaccgtacgcatttgggactttggtagtggccaggagatgaaagtcctgcccgagggcaaggactggaaggaagacgaacattgtctgcgacgcctcattttcctgaaggcacaggagaagcatcagcagctggtgctggctctcgagcgaaacggtactatcaagatgattcagggcaaagaggatgatatatatctgatggtgatttgggagctgccagacgtcgtgcctttcctgcaggacggtaaacacgcagtgcatctgcgcatgagcacaagggaccgaaacatggccattccattcccagatgttgagctcatcgtcgagcggaacttctctcagccgactgataacccaacaatggacctgctccgtgtgaactgtatcgatctgctgcaagtggagggttacaacctaatcgctgcaggaacactcaatggggttattattctatggaacttcgtgacatccacggtgaagaaagtttacagaccagaagattgctttactgtcaatcctgacctccatccaaagcatttcaagattaatgacatcctgttcctgtttagaacacctgaatgcgcaagaagatcttcccaggatagcatatgctcgtcctcccagtgcgagtctagtaagggacctcaatcaagtaaaggctccaaacaatcgattcacgactccgaggtgaagggcgagcaaaccgacgtcatggttggaaagcaacagcctatggacaaaaaacaccccgggatagctaacctgccagaggctcaacctcctatcctggtgactgctcacgaagacgggcacttgcgcttatggaccctggagggaaggttgctcaaagatatgcttccatttactaaacactccgcaatctccctgacgtcactctacaccgattcctgtacccgtattctgctcgccggcaatgtcgagggacacgttattctttgtaacattagctcatttttggatcctccacatgatgagaagaagttcaagcagttactctcctggagagctcattctctagaaatcatccaagtcatttacgtcgaagaaaagcaggtcgtattaactgccagcattgatggcagtgtgcggctgtggcacgccctgaacggccattactgcggttatttcggtcaacggagactgtttgagctgtcacagacccgggactttatcctgccatgcgacgtcacagagtatccgatagagataaaagaggagtcaaaattcacagaaaaacaaaagtacgaatacccacttatatttgacagggagaagtggaggaagatgtcctccgtttctttattgttcaagcgtacgcccccaaaggccttcgaagtggagcaagattttaaatttttcaagagcctgagttctcccaagatccgcaggtatcctctcgaagggttcgtaactgaaaatagagaagccgggatagtcttcggttctctcccgatatattctatcagttctccaacgtccctgcgcttcctcccgctgatcggggtggaagcccagaaggactcctcagatggcattactgggaaaaaaaagggcggccatgttcaacgggagaaagctccgagacgaaggtccctgaaaaagaatctggtgcctcagataaacctggcctctagcttcttccctgccatccccaaatag

SEQ ID NO: 239201 - DNA, 2745 bp, Artificial Sequence
  derived and/or modified sequence
atggacatccggaaggagaagcggctgaacatggccctgcagatgagcaatttcaagaaagccctgaacaggttcgaaaaactcgtcgagcagaccgcagctcagaagcgcgacgagcgggcaggactgtttatccataaggaggacgccatcggctatgacaagttttacgcgtctgtccagaagctgtttgggccggatgttaagaatcaggatgtcaagaggttttatcgaaagctgtgtaacaataccgacgcctctgcagattggtgcgaaatattcggctacttcagttcagaagaagatccgattgcgtcacagttggatgaagagaatcttgtcttcttcgtttcccgcaaacgccggatcttgatttcgggctcaagaagaagggatgtgataaaatcaatcgttaaaatcccgcacctggacttactgatcaccgcgacccagaagggcctgataacggtgtttaataatcaagacactagttggatcacaggatgtgactacctgctgcagctcaaacgtatcgtggctacgactgaaagaacaatcatcgtctgggactacaaggcccagggctccagtcaggaaaattactttgttattaaacctatggaccattgtttattatgtgtctgtgtggtccccctgcctgaccacttgtgtagagacgatattttgcttggagatgatggaggcttcgtgaaccggttcactgtgaacagtgatgacttcggtatcaagcaggctaaaagcaaacgaaagctccagaaccaggtgctcgattctaaaaactttaagtctgtgaagaggaaacttcataacgattgggtgatgaagattaggtatatctcggccctgaactgcttcgggagttgcagcctggactctaatcactccctagtgttggagagcttgaagaggctggaagacaacctgccggtgcgggaattttccatgcctaggggcgctaacaccttctgctattgtgttaaagccaatgtcatcgtcaccgggggcgacgacaaagtgattaggttgtggcaccctaatatttccacaaaacccgtgggcaaactcgtggggcatatgttttctatcgcagagatagtaacaaacgagaaagaccagcacgtggtctctctctctagcgctaaagtatttagggtctgggacatccagaccctgagtctcctacaggtgtttcatgactcccagggcgggccaggggatatgcagatctacagcatgatatatgacgccaaccatggcatgctgatcaccggatcatctgtgatggacatgtatccactgaccagaatgattcaggacacgaaacaggtacctcacacacatgagcgggagattaacgtaatgctttacaataaatatttccatcaagtgctgacaatttgtagcgagtccataatacgcgtctgggagttggaaacaggcctgcaagtgtaccagattttggagcctcacgggtttaacactgaagtcacctctgccgccgtggatgaaagcggattcctgttcgccacaggcgcttacaacggtacggtccgcatctgggacttcggttccgggcaggaaatgaaggtgctccccgaaggcaaggattggaaggaggacgagcactgcttgagaagactgatcttcctgaaagcccaggagaagcaccagcagctggtcttggccttagaacgtaatggaaccatcaaaatgattcaggggaaggaagatgatatctacctgatggtgatatgggaattgcctgatgtggtccccttcctccaagacggaaaacacgccgtgcatcttaggatgtcaactagagatcgcaacatggctattccatttccagacgtcgagctgatcgtggagcggaatttttctcagccaacggacaatccaaccatggacctgctccgagtgaattgtatcgacctgctccaagtggaggggtacaacctgatcgctgccggaacactgaatgaaggccatgtcatcctctgtaacatatcctcattcttggatccacctcacgatgagaagaagttcaagcaactgctgagttggagggcccattctctagaaattatacaggtgatctatgtggaagagaagcaagtggtcctcacggcatccattgatggcagcgttaggctgtggcacgctctgaacggccattattgcgggtattttggacaacggcggctttttgaactgtcacagactcgggatttcatcctgccttgcgatgttacagagtaccccatcgagataaaggaggaatcaaaattcacggaaaaacagaaatacgaatacccgctcatctttgaccgggaaaaatggaggaagatgtcaagtgtgtcgctgctgtttaagcggacccccccgaaagcatttgaggtcgagcaagactttaagttctttaagagcctgagctccccaaagatacggaggtatccactagaggggttcgtcacggaaaatcgcgaagccggcatcgtttttgggtcgcttcccatttattccatttcctcacccacctcactgcggttcctaccgctgatcggggtcgaagctcagaaggatagttcagacggcattacgggaaaaaaaaagggaggccacgttcagcgggagaaggcacctcgacgaaggtcactgaaaaagaatctcgtcccacagattaatctggcctcttccttcttccccgccatccctaagtag

SEQ ID NO: 239202 - DNA, 3246 bp, Artificial Sequence
  derived and/or modified sequence
atggatattagaaaagaaaagcgtctcaatatggcacttcagatgagtaacttcaaaaaagctctgaaccgctttgagaagttggttgagcaaaccgccgctcagaaacgcgacgagcgggcaggcctttttatacataaggaagatgccatcggatacgacaaattctacgcatcagtccagaaactgttcggacctgacgtgaagaaccaggatgtgaaacggttttacagaaagctctgcaataacactgatgcctcagccgactggtgtgaaatcttcggttacttctcatctgaagaagatccaatagcaagccagctggacgaggaaaatctggtgtttttcgtgtcacgaaagagacgtatcctaatttctggatcacgtaggcgtgatgtgatcaagtcgatcgtgaagatcccccatctagatcttctgattacggcgacgcagaagggactgatcactgtgtttaataatcaggatacttcttggatcacgggatgcgattacttgcttcagctgaaacgtatagttgccacgaccgaacgaaccatcatagtctgggattacaaagctcagggaagtagccaggaaaattatttcgttattaaaccaatggatcattgcctgctgtgcgtgtgcgtcgtccctctgccagaccatctttgtagggatgacattttgctgggcgacgatggcggttttgttaatcggttcaccgtgaatagcgatgacttcgggattaaacaggccaagagtaaaaggaagctgcagaatcaggttctggattccaagaatttcaagagcgtgaagaggaagctgcacaatgattgggtcatgaagattaggtacattagtgcgctgaactgtttcggttcctgttcactggacagtaaccactctctagtcctcgagagcttgaagcggctggaggacaatctccccgtgcgcgaatttagcatgccgaggggggctaataccttttgctactgtgtcaaggctaatgtcatcgtgaccggcggagatgacaaagtgatcagactgtggcacccaaatatcagcaccaagccagtggggaaactggtcggacacatgttttccatagccgagattgtgaccaatgagaaagatcagcatgtggtgtccctgagtagcgccaaggtgttccgcgtctgggacattcagaccttaagtttactccaggttttccacgactcacagggaggcccaggcgatatgcagatttactcaatgatctatgatgcaaaccacggtatgttgattaccggaagttccgtgatggatatgtacccgttgacccgtatgatccaagatacaaaacaggtgccccatactcacgaaagggaaattaatgtgatgttgtacaataagtactttcatcaggtgctgaccatttgttcagagtctattattagggtttgggagctggagaccgggctgcaggtctaccagatcctcgagccgcatggatttaacaccgaggttacgagcgccgcagtggacgagagcggattcctgtttgcgactggggcttataacggtactgttaggatttgggacttcgggtctggccaggaaatgaaggtcctacccgagggtaaagactggaaagaggacgaacattgcctacgcagattgatttttctaaaggcacaagaaaagcaccagcaactcgtgctggcactggagcgaaatggaactattaaaatgattcaggggaaggaggatgatatctacctgatggtgatttgggaactccccgacgtagtgcccttcctgcaggacggcaagcacgctgtccacttgaggatgtctacacgggaccgaaacatggctattccttttcctgatgtggaacttatcgtggagaggaatttttcccagcctaccgacaaccctactatggatctgctcagggtaaactgtatagacttgctgcaagtggaggggtataatctcattgcagctgggacccttaatggcgtcatcattctctggaactttgtcacaagtacagttaagaaagtgtacagacccgaggattgttttactgtcaacccagatctccaccccaaacactttaaaattaatgacatcctgtttctgttccgcactcctgaatgtgcccgacgctcttcacaggatagcatatgtagctctagccagtgcgagtccagtaagggtccacagtcatccaaaggcagcaagcaatccatccacgattctgaagtaaagggtgaacagaccgacgtcatggttggaaaacaacagcccatggacaaaaaacatccaggaatcgcaaaccttcctgaagcccagcctcctattctcgtgacggcccacgaggatgggcacctccgactctggacgctggaaggcagacttctgaaagatatgctcccattcacgaaacatagcgctatttcattaacctctctgtacaccgacagctgcacacggatcttactggccggtaatgtagaaggtcatgtcatcttgtgcaatattagcagctttttagatccaccacacgacgagaagaaatttaagcaactgctctcttggcgggcacattccctcgaaattattcaggttatctacgtggaggaaaagcaggtggtcttgaccgcctccatcgatgggagtgtacgcctgtggcacgctctcaatggtcactattgtgggtacttcgggcagcgaagactgttcgaactttcacagacccgagattttatcctgccctgcgacgtgactgagtaccccatagaaataaaagaggaaagtaaattcaccgaaaaacagaagtatgaatatcccctcatcttcgacagagagaaatggcggaaaatgtcctccgtgtcattactgttcaaaagaacgcccccaaaagcattcgaggtggagcaagattttaagttttttaagtcactgtcatcccccaaaattaggaggtatccgctggaaggtttcgttacagagaaccgggaagccggaatcgtgtttggaagtttacccatctattcaatcagcagccccactagtctcaggttcttgcccctcatcggggtggaggctcaaaaggacagctctgatggcatcaccggcaagaaaaagggtggacacgtgcaaagggagaaagctccaagacgcaggagtctaaagaaaaatcttgtccctcaaattaacctggcttcctcattttttcccgctatcccaaaatag

SEQ ID NO: 239203 - DNA, 2745 bp, Artificial Sequence
  derived and/or modified sequence
atggatatacgcaaggagaaacggctaaacatggctctgcagatgagtaacttcaagaaggctctgaacagattcgagaagctcgtggaacaaacagccgctcaaaagagagacgaacgcgcaggcctgttcatacataaagaggatgccatcggttatgacaaattttatgcttcagtccagaagctcttcggacccgacgtcaagaaccaagatgttaaacggttctacagaaagctgtgtaacaacaccgatgcatcagcagactggtgtgaaatattcggctacttcagctctgaggaagacccaatagcatcgcagcttgacgaagagaatctggtcttcttcgtgtctaggaagcgcagaatattgatctctggttccaggcggagggacgtcatcaagagtattgtgaaaatccctcacctggatctgctcatcacagcgacacagaagggtctgattactgtttttaataatcaggacaccagttggattacggggtgcgattacctgttgcagctcaaacggattgtcgctaccaccgagagaactattatcgtgtgggactataaggctcaaggatccagccaggagaactatttcgtcatcaagccaatggatcactgcttgctgtgcgtttgcgtggtgccactgcccgatcatttatgccgcgatgacattttactgggggatgacgggggatttgtgaaccgctttaccgtaaattctgacgactttggaatcaaacaggctaagtctaagcgcaagcttcaaaatcaagtgctggattctaagaactttaaatccgtcaaacggaagttgcataatgactgggtcatgaaaatccgctatataagcgcactgaattgcttcggttcttgctcccttgattccaaccattccctggtgctggagagcttaaaaagacttgaggacaatctccccgtaagggagttctccatgcctagaggcgctaataccttttgctactgcgttaaggcaaatgttatcgtcaccggtggcgatgacaaagtgattaggttgtggcatccgaacatttctacaaaacccgtggggaagctcgtgggccatatgttcagtattgccgaaatagtcaccaatgaaaaggaccagcatgtggttagcctttcctccgccaaagtgtttagagtgtgggacattcagacgctatcactgctccaggtgttccacgattcacaagggggaccgggagacatgcagatttactcgatgatctatgacgccaaccacggtatgctgattactggtagttctgtgatggatatgtaccccctaacccggatgattcaggataccaagcaggtgccgcacactcatgaacgcgaaatcaacgtgatgctgtacaataagtatttccatcaggtcctgacaatatgctccgaatcaattattcgggtgtgggaattagaaaccgggttacaagtataccagatcctcgaacctcatggattcaacacagaagtgacatctgctgcagtggatgaatcaggctttctctttgcaactggcgcatataacgggactgtcagaatctgggactttggatctgggcaggagatgaaagtgctccctgaggggaaagactggaaagaggatgagcattgcctgagacgactgatcttcctgaaagcccaggagaagcaccagcagttggtgcttgcactggaacgcaacgggaccatcaaaatgatacagggaaaagaggatgacatttatctcatggttatttgggaacttccagacgttgttcccttcctacaggatgggaaacacgccgttcacctgcggatgagtactcgagaccgaaacatggccattccctttccagacgtcgagttgatcgttgagcgcaatttcagccagcccacggataatcccaccatggacctgctccgggttaattgcattgacctcctgcaagtggaaggctataacctgatcgcggcaggtacactgaatgaagggcacgtgatcctgtgcaacattagcagtttccttgatcccccacacgacgagaaaaagttcaaacagctgctctcttggagggcacatagtctggaaattatccaagttatctacgtggaggaaaaacaggttgtccttactgcgagcatcgatggcagcgtaaggctatggcacgctttaaacggtcattactgtggctactttggacagaggagactattcgaactcagtcagacacgcgacttcattcttccctgcgatgtaacagagtatcctattgaaataaaagaggagtctaaattcactgagaagcaaaaatacgagtaccctcttatctttgatcgtgaaaagtggcgcaaaatgtccagcgtgtccctgctgtttaagaggacgcctccaaaagctttcgaagtcgagcaggattttaaattctttaagtccctgtcctctccaaagatcaggcgctatcctctcgagggtttcgtgactgagaatagggaggcgggaattgtgttcggctccctccctatatattcaatctcaagcccaacatcgctgaggttccttcccctgatcggcgtcgaagctcaaaaggatagctccgatggcatcactgggaaaaaaaaaggaggccatgtacagagggaaaaagcacctcgtcggaggagccttaagaagaacctggtcccacagatcaatctggcttcaagcttttttcccgctatccccaagtag

SEQ ID NO: 239204 - DNA, 4371 bp, Artificial Sequence
  derived and/or modified sequence
atcagacctaaatcagctttcctccctgctaacatcctagtggcaactcttactcctacccgcactatgggattttaagatcaaaggaattagacctagggcaaaaactgagacagcagggaggcactgtaacaactggaaagttttccaaattggtaaacttgcagtattctttctgtacagaagtaaaagatcccctatgtccctatggatatcaggaaggaaaagcgtctcaacatggcacttcagatgagcaatttcaaaaaggctttgaacaggtttgaaaaattggttgaacaaacagcagcccagaaaagagatgaaagagcaggcttatttatccataaagaagatgcaattggttatgacaagttttatgcatcggtacagaagctctttggtccagatgtgaagaatcaagatgtgaaacgcttttacaggaaactgtgcaacaacacggatgcatctgcagactggtgtgagatctttggatacttctcctctgaagaagatcctattgcttcccagttggatgaagaaaatttggttttctttgtgtctagaaaaaggcgaattttaatttcaggtagtagaagacgagatgtgattaagagcattgtcaagatacctcacctggatttactaataacagctactcagaaaggattaataacagtttttaataaccaggacacctcctggattacagggtgtgattacctcttgcagctgaaacgaatcgtagccacaaccgaaaggaccattattgtctgggattataaagctcaagggagcagccaggaaaattattttgtcataaaaccaatggatcactgcctcctgtgtgtgtgtgtggtgcctttgcctgaccatctctgccgagatgacatcctcttgggggatgatgggggttttgtgaacagattcacagtcaacagtgatgactttggaataaagcaggcaaaatccaaaagaaaattacaaaatcaggtcttagactcaaagaactttaaaagtgttaaaaggaagctacataatgactgggttatgaaaattagatatatttcagccctaaattgttttggatcctgctccttagacagtaatcattcattagttttggaatccttgaagagactcgaggataatttgcctgtcagagagttttccatgccaagaggagccaacactttttgctactgtgttaaggcaaatgtgattgtcactggaggagatgataaggtcatccggttgtggcaccccaatatcagcaccaagccagtagggaaacttgtaggacacatgttcagtatcgccgagatcgtaaccaatgaaaaagatcaacatgtcgtcagcctttcctctgcaaaggttttccgggtgtgggatatacaaactctttcactattacaagtcttccatgacagccagggaggaccaggagacatgcagatttactctatgatatatgatgccaatcatggcatgcttattacgggatctagtgttatggacatgtatcctttgactaggatgatacaagatacaaaacaggttcctcacactcatgaacgagaaatcaatgtcatgctttacaacaaatattttcatcaagtactcactatctgctctgaatccataattagggtatgggaactcgagactgggctccaagtataccagattttagaacctcatggtttcaatactgaagtgacttctgcagctgtcgatgaaagtggatttctttttgccacaggagcgtataatggaacagtcagaatctgggactttggcagtgggcaggagatgaaggtgttgccggaggggaaagactggaaggaggacgagcactgcctacgacgcctcattttcctcaaagcccaagaaaaacaccagcagctggtcctggccttggagcgcaacgggactatcaaaatgatccagggtaaggaagatgatatctacctcatggtgatctgggagctgcctgatgttgtgcctttcctacaagatgggaaacatgctgtgcatctgagaatgtctactagagacaggaacatggctattcctttcccagatgtcgagttgatagttgagaggaacttttctcaacctactgataatcccaccatggatttattacgagtgaactgcattgatttactacaagtagaaggatataatttgatagcagctggaaccttaaatggtgtgatcatcttatggaattttgtgacgtctactgtcaaaaaagtgtaccgacctgaagattgcttcactgtaaaccctgacttgcatcccaagcactttaaaattaatgacatactgttcctctttcgtacccctgaatgtgcaaggagatcaagtcaggattccatatgttcttcatcccagtgtgaatccagcaaaggtccacagagcagtaagggaagcaagcaaagcatacatgacagtgaggttaaaggtgaacaaacagatgtaatggtgggaaagcaacagccaatggacaaaaaacaccctggaattgccaatttaccagaagcccagccacctatccttgtcactgctcatgaggatggacacctccgcttgtggactctggagggaagactactgaaagatatgctacctttcacaaaacattctgccatttctctgacatcgctgtatactgattcatgtacgaggatactactggctggaaatgtggaaggacatgttatcctttgcaatattagctctttcctggatccacctcatgatgaaaagaaattcaagcagctgctttcctggcgtgctcattctttggaaattattcaagtaatctatgtagaagaaaaacaagtggtacttactgcctccatcgatggctcagtaaggctctggcatgccctcaatggacattattgtggatattttggacagcgaaggctctttgaattatcacagacaagagatttcattttgccttgtgatgttactgaatatcccatagaaataaaagaagaaagcaagttcacagagaagcaaaaatatgaatatcctctgatatttgaccgggaaaaatggagaaaaatgagctcagtgtctctacttttcaaacgcacacctcccaaggcctttgaagtggaacaggatttcaagtttttcaagtctctttcttctcctaagattcgaagatatcccttggaaggtttcgtgactgaaaacagagaggcagggattgttttcggctctctgcctatatacagtatatcaagccccactagtctaagatttcttccactgattggcgtagaagcccaaaaggactcttcagatggcattacaggaaagaagaagggaggtcatgttcaacgtgaaaaagcaccacgaagaagaagtttgaaaaaaaatttagtcccacaaataaatctggcttcttccttcttcccagctatacccaagtaaggagaaaaaatcagaaatggctgctgcacataaaatggcaacgtttggatgatacctgctctttatttcaggatgagagggagaaaccaccagacactatcagtcatctctggtgtcaggccatcctattgatgggaaagattgcttagggagttctggtgaccttaactctgaataccaagcaagcagcaagcagccagaagtttaggcggtgtttcttatttactgtcagcaaactgacacataagaaaacaaatgaaatcaacagcattagtaggtctaaaataatatggttatcaatgtttagctttccacttcctcccattggtcaccttactccacagcaagaatgactgtcagaacatgtgcagtaaaaggcactttcaagtcatgctatgtgttgtacaaaaagaattattaaaaagaaaaatgtaccagtcagatctctagatgtttgtcttcttcatttagagaaatattatctggaagaaaatgtcctaagtttctcaaagtcagaaattatttctatgtagtccagacctgactccagataaatataaaagacggcaaagaaaggaagaaaaatgggtcatagaaatagaaaaagcatagtaacatggtagatttaaccttaaatatatcaataattatgaaacctttaataggttaaagtatgcaagtttaaaaggttgtcagaatggattaaaaaaacaaaatccaactatatgttgtttacaagaaacacatctaacatacaaggacaccaaactcttaaagataaaagaatgaaaaaagatgtatgatgcaaaaactaacctaaagaaaatcaatatagccatattaatattaaaatacactttaagaaaataaacaagaatctttataaaagttttataaagttattaataataactcaaa

SEQ ID NO: 239205 - DNA, 3870 bp, Artificial Sequence
  derived and/or modified sequence
atcagacctaaatcagctttcctccctgctaacatcctagtggcaactcttactcctacccgcactatgggattttaagatcaaaggaattagacctagggcaaaaactgagacagcagggaggcactgtaacaactggaaagttttccaaattggtaaacttgcagtattctttctgtacagaagtaaaagatcccctatgtccctatggatatcaggaaggaaaagcgtctcaacatggcacttcagatgagcaatttcaaaaaggctttgaacaggtttgaaaaattggttgaacaaacagcagcccagaaaagagatgaaagagcaggcttatttatccataaagaagatgcaattggttatgacaagttttatgcatcggtacagaagctctttggtccagatgtgaagaatcaagatgtgaaacgcttttacaggaaactgtgcaacaacacggatgcatctgcagactggtgtgagatctttggatacttctcctctgaagaagatcctattgcttcccagttggatgaagaaaatttggttttctttgtgtctagaaaaaggcgaattttaatttcaggtagtagaagacgagatgtgattaagagcattgtcaagatacctcacctggatttactaataacagctactcagaaaggattaataacagtttttaataaccaggacacctcctggattacagggtgtgattacctcttgcagctgaaacgaatcgtagccacaaccgaaaggaccattattgtctgggattataaagctcaagggagcagccaggaaaattattttgtcataaaaccaatggatcactgcctcctgtgtgtgtgtgtggtgcctttgcctgaccatctctgccgagatgacatcctcttgggggatgatgggggttttgtgaacagattcacagtcaacagtgatgactttggaataaagcaggcaaaatccaaaagaaaattacaaaatcaggtcttagactcaaagaactttaaaagtgttaaaaggaagctacataatgactgggttatgaaaattagatatatttcagccctaaattgttttggatcctgctccttagacagtaatcattcattagttttggaatccttgaagagactcgaggataatttgcctgtcagagagttttccatgccaagaggagccaacactttttgctactgtgttaaggcaaatgtgattgtcactggaggagatgataaggtcatccggttgtggcaccccaatatcagcaccaagccagtagggaaacttgtaggacacatgttcagtatcgccgagatcgtaaccaatgaaaaagatcaacatgtcgtcagcctttcctctgcaaaggttttccgggtgtgggatatacaaactctttcactattacaagtcttccatgacagccagggaggaccaggagacatgcagatttactctatgatatatgatgccaatcatggcatgcttattacgggatctagtgttatggacatgtatcctttgactaggatgatacaagatacaaaacaggttcctcacactcatgaacgagaaatcaatgtcatgctttacaacaaatattttcatcaagtactcactatctgctctgaatccataattagggtatgggaactcgagactgggctccaagtataccagattttagaacctcatggtttcaatactgaagtgacttctgcagctgtcgatgaaagtggatttctttttgccacaggagcgtataatggaacagtcagaatctgggactttggcagtgggcaggagatgaaggtgttgccggaggggaaagactggaaggaggacgagcactgcctacgacgcctcattttcctcaaagcccaagaaaaacaccagcagctggtcctggccttggagcgcaacgggactatcaaaatgatccagggtaaggaagatgatatctacctcatggtgatctgggagctgcctgatgttgtgcctttcctacaagatgggaaacatgctgtgcatctgagaatgtctactagagacaggaacatggctattcctttcccagatgtcgagttgatagttgagaggaacttttctcaacctactgataatcccaccatggatttattacgagtgaactgcattgatttactacaagtagaaggatataatttgatagcagctggaaccttaaatgaaggacatgttatcctttgcaatattagctctttcctggatccacctcatgatgaaaagaaattcaagcagctgctttcctggcgtgctcattctttggaaattattcaagtaatctatgtagaagaaaaacaagtggtacttactgcctccatcgatggctcagtaaggctctggcatgccctcaatggacattattgtggatattttggacagcgaaggctctttgaattatcacagacaagagatttcattttgccttgtgatgttactgaatatcccatagaaataaaagaagaaagcaagttcacagagaagcaaaaatatgaatatcctctgatatttgaccgggaaaaatggagaaaaatgagctcagtgtctctacttttcaaacgcacacctcccaaggcctttgaagtggaacaggatttcaagtttttcaagtctctttcttctcctaagattcgaagatatcccttggaaggtttcgtgactgaaaacagagaggcagggattgttttcggctctctgcctatatacagtatatcaagccccactagtctaagatttcttccactgattggcgtagaagcccaaaaggactcttcagatggcattacaggaaagaagaagggaggtcatgttcaacgtgaaaaagcaccacgaagaagaagtttgaaaaaaaatttagtcccacaaataaatctggcttcttccttcttcccagctatacccaagtaaggagaaaaaatcagaaatggctgctgcacataaaatggcaacgtttggatgatacctgctctttatttcaggatgagagggagaaaccaccagacactatcagtcatctctggtgtcaggccatcctattgatgggaaagattgcttagggagttctggtgaccttaactctgaataccaagcaagcagcaagcagccagaagtttaggcggtgtttcttatttactgtcagcaaactgacacataagaaaacaaatgaaatcaacagcattagtaggtctaaaataatatggttatcaatgtttagctttccacttcctcccattggtcaccttactccacagcaagaatgactgtcagaacatgtgcagtaaaaggcactttcaagtcatgctatgtgttgtacaaaaagaattattaaaaagaaaaatgtaccagtcagatctctagatgtttgtcttcttcatttagagaaatattatctggaagaaaatgtcctaagtttctcaaagtcagaaattatttctatgtagtccagacctgactccagataaatataaaagacggcaaagaaaggaagaaaaatgggtcatagaaatagaaaaagcatagtaacatggtagatttaaccttaaatatatcaataattatgaaacctttaataggttaaagtatgcaagtttaaaaggttgtcagaatggattaaaaaaacaaaatccaactatatgttgtttacaagaaacacatctaacatacaaggacaccaaactcttaaagataaaagaatgaaaaaagatgtatgatgcaaaaactaacctaaagaaaatcaatatagccatattaatattaaaatacactttaagaaaataaacaagaatctttataaaagttttataaagttattaataataactcaaa

SEQ ID NO: 239206 - DNA, 378 bp, Artificial Sequence
  derived and/or modified sequence
atggagagacacaccagccaccccaacagaaaggtgcccgccaaggaggaggccaacgccgtgcccctgtgcagagccaagcccagccccagctacatcaacctgcaggccagcagcccccccgccaccttcctgaacatccagaccaccaagctgcccagcgtggaccacaagcccaaggagtgcctgggcctgctggagtgcatgtacgccaacctgcagctgcagacccagctggcccagcagcagatggccgtgctggagcacctgcaggccagcgtgacccagctggcccccggcagaggcagcaacaacagcagcctgcccgccctgagccccaaccccctgctgaaccacctgccccagttcagcaagtag

SEQ ID NO: 239207 - DNA, 378 bp, Artificial Sequence
  derived and/or modified sequence
atggagcgccatacatctcatcccaatcggaaggttcctgccaaagaggaggcaaatgccgtacctctctgtcgtgctaagcctagccccagctacatcaatctccaggcctcctccccacctgctacctttctgaacatccaaactactaagctcccctcagttgaccataagcctaaggagtgcttaggcctcttggaatgcatgtacgcaaatttgcagctgcagactcaactcgcgcagcagcaaatggcagtgttggagcacctgcaggcatccgtgacacagctggctcccggcagggggtccaataattctagcctccccgctttgtctccaaaccccctgcttaatcatctccctcagttctctaaatag

SEQ ID NO: 239208 - DNA, 378 bp, Artificial Sequence
  derived and/or modified sequence
atggaaaggcatacctctcacccgaaccgaaaagtgccagccaaggaggaggcgaacgccgtccccttgtgcagggctaaaccatccccttcttatataaatctccaggctagctcccctcccgccacttttcttaatattcagacaaccaaactgcctagcgttgatcacaaaccaaaagagtgtcttggcttgttggaatgcatgtatgcaaatctgcagctgcaaacccaactggcacagcaacaaatggcagttttagagcacttgcaggcatccgtgacacagttggcccctggccgcggctccaataattcttctcttccagctctgtctcccaaccctcttctcaaccatttaccccagttttccaaatag

SEQ ID NO: 239209 - DNA, 378 bp, Artificial Sequence
  derived and/or modified sequence
atggaaaggcacacttcccaccctaacaggaaagttccagccaaggaggaagctaatgccgtgcctctgtgtcgtgcgaaaccgtcaccaagctacatcaacttacaagcatcaagccctccagccacattcctgaacatacagaccacaaagctgccctctgtagatcataaacccaaggaatgcctcggcctgctggagtgcatgtacgcaaatttgcagcttcagacgcagctggcacagcaacagatggctgttttggagcatctacaagcttccgttacccagcttgccccagggcggggctccaataattccagcctccctgcactttcgcccaatcccctcctgaatcacctaccacagttctccaaatag

SEQ ID NO: 239210 - DNA, 378 bp, Artificial Sequence
  derived and/or modified sequence
atggaaagacatacctcccaccccaaccgaaaggtgcccgcaaaggaagaagcaaatgcagtcccactgtgccgtgctaaaccatctccaagctatatcaatctgcaagcttcctctccgcctgcaaccttcctgaacatccagacgactaagcttccttccgtggatcataaacccaaggagtgcctggggttactggaatgcatgtatgccaatttacaactgcagacccagctcgctcagcaacagatggccgtgttggagcacctccaggcgtcagtgacacagcttgccccgggtagggggtccaataatagctctcttcccgcattgtcccccaatcccctgttaaatcatctgccccagttctcgaagtag

SEQ ID NO: 239211 - DNA, 378 bp, Artificial Sequence
  derived and/or modified sequence
atggaaaggcacacctcacaccctaacagaaaagttccagccaaggaggaagcgaacgccgtgccactttgtcgggctaaacctagccccagctacatcaacctgcaggcaagttctccgccggccaccttcctcaatatccagacgactaaattaccctcagtggaccataaacctaaggagtgtctcggtcttctcgagtgtatgtacgccaatctgcagctccagacccagctggcacagcaacagatggccgtgctagaacacctccaggcgtcagtcacacaactggccccagggcggggctccaataactctagtctcccagcactatctcccaatcccctgctcaatcatctccctcagttcagcaagtag

SEQ ID NO: 239212 - DNA, 378 bp, Artificial Sequence
  derived and/or modified sequence
atggagcggcacaccagccaccccaacaggaaggtgcctgccaaggaggaggccaatgctgtgcccctgtgccgggccaagcccagccccagctacatcaacctgcaggccagcagccccccagccaccttcctgaacatccagaccaccaagctgcccagcgtggaccacaagcccaaggaatgtctgggcctgctggagtgcatgtatgccaacctgcagctgcagacccagctggcccagcagcagatggctgtgctggagcacctgcaggcctctgtgacccagctggcccctggccggggcagcaacaacagcagcctgcctgccctgagccccaaccccctgctgaaccacctgccccagttcagcaagtag

SEQ ID NO: 239213 - DNA, 378 bp, Artificial Sequence
  derived and/or modified sequence
atggagcggcacaccagccaccccaaccggaaggtgcccgccaaggaggaggccaacgcagtgccgctttgtcgggcgaaaccatccccgagttacattaaccttcaggcttcatcacccccagccacattcctgaatatccagacaactaaacttccgagcgtggatcacaaacctaaggaatgtttaggactcctcgagtgtatgtacgccaatttgcagcttcagacgcagctggcccagcaacagatggctgtattggaacacctgcaagcctctgttacccagctcgcccccggcagaggatcaaacaacagctcccttcccgctctcagccctaacccactactgaatcacctgccacagttttctaagtag

SEQ ID NO: 239214 - DNA, 378 bp, Artificial Sequence
  derived and/or modified sequence
atggagcggcacaccagccaccccaaccggaaggtgcccgccaaggaggaagcaaatgctgttccgctttgccgggcaaagcccagtccaagttacattaacctccaggcgagctctcctccagccacctttctgaatatccagacaaccaaactgcccagcgttgaccataaaccgaaggagtgcctgggccttctggagtgtatgtacgcaaatttgcagctccaaacccagctagcgcaacagcagatggcagtgttagaacacttacaggcctctgtgacacagttggctccgggccggggctcaaataattcctcgctgcctgccctctctccaaatccactcctgaatcatctccctcagttcagtaaatag

SEQ ID NO: 239215 - DNA, 378 bp, Artificial Sequence
  derived and/or modified sequence
atggagcggcacaccagccaccccaaccggaaggtgcccgccaaggaggaagctaatgctgtccccctttgcagggctaagccaagccccagttacataaatcttcaggcctcttccccgccagcaacattcctgaacatccaaacaaccaaactgccatccgtcgaccacaagcctaaggaatgtctggggctcctggagtgtatgtatgctaatctccaactgcagacccagctggcgcaacagcagatggccgtattagagcacctgcaggcatccgtgacgcaattggcaccaggccggggtagtaacaattcttccctaccagccctttcacctaaccccctgctgaatcacttgccacagttctcaaaatag

SEQ ID NO: 239216 - DNA, 378 bp, Artificial Sequence
  derived and/or modified sequence
atggagcggcacaccagccaccccaaccggaaggtgcccgccaaggaggaggccaatgcagtgcccctgtgccgcgctaagccaagcccatcatatataaatctgcaagcttcatccccccccgccacctttcttaatatccagaccactaagcttcccagtgtagatcataagcctaaagaatgtttagggttgctagaatgtatgtacgccaaccttcagctccaaacacaattggctcaacagcagatggcagttctggagcatctgcaggcctctgttactcagcttgcccctggacgtgggtcaaataactcgtcacttccagccctgagtccgaacccgctgctgaaccatcttccccaatttagtaagtag

SEQ ID NO: 239217 - DNA, 378 bp, Artificial Sequence
  derived and/or modified sequence
atggagcggcacaccagccaccccaaccggaaggtgcccgccaaggaggaagctaatgccgtcccgctctgtcgagctaaaccaagcccaagctacatcaatctccaggcaagctctccaccggctacgttcttgaatatacagacaacgaagctaccatctgtcgatcacaagcccaaagagtgtctcggactgttggagtgtatgtatgccaacctccagctacaaactcagctagcacagcaacaaatggctgtgctcgaacacttgcaggctagtgttacccaactggccccaggtcggggatccaataattcgtctctcccggcactgtcgcctaacccactacttaatcatctgccccaattctcaaagtag

SEQ ID NO: 239218 - DNA, 378 bp, Artificial Sequence
  derived and/or modified sequence
atggagcggcatactagtcatcctaatcgaaaggtgccggcaaaggaagaggcaaatgccgtaccgttatgtcgggcaaagccctcaccgagctatatcaatctgcaggccagttctccaccagccacatttctgaatatacagaccaccaaactgccttccgttgatcacaagcccaaggaatgtctgggactgctagaatgcatgtacgctaacctgcaactccagacacagctggcccaacagcagatggccgttctggaacacctgcaggcttcagtcacccagctagcccctggacgaggctcgaacaattccagcttacccgcactctccccgaaccctctgctcaatcacttgccacaattctctaagtag

SEQ ID NO: 239219 - DNA, 378 bp, Artificial Sequence
  derived and/or modified sequence
atggaacgacacaccagccaccccaatcgcaaggttccagcgaaggaggaggccaatgcagtcccattgtgcagagcaaaacctagtcccagctacatcaacctccaagcctctagccctccagccactttcctcaatattcagacaacgaagttaccatcagtggaccacaagcctaaggaatgcctcggattgcttgagtgtatgtacgctaacctgcaactccaaacccagctcgcgcagcagcaaatggcagtgctggagcacctgcaggccagcgtaacacagttagccccagggcgtggctcaaataatagcagcctgccagctctgtctcctaatcctctgctcaaccacttgccgcagttcagcaagtag

SEQ ID NO: 239220 - DNA, 378 bp, Artificial Sequence
  derived and/or modified sequence
atggagaggcatacatcccaccccaataggaaagtcccagccaaagaggaagcaaacgccgtccccctttgcagggctaaaccttctccttcgtacattaatctgcaggcctcctctccaccggctacctttcttaatatacaaaccacgaagctgccctctgttgatcacaaacctaaggaatgtcttggcctgctggagtgcatgtacgctaatctccagctccagacccaattggctcaacagcagatggctgttctggaacacctgcaagcaagcgtgacccagctggccccaggacgagggtccaacaactcttctctccccgcactatcgcccaatccccttttaaatcatctccctcagttctccaagtag

SEQ ID NO: 239221 - DNA, 378 bp, Artificial Sequence
  derived and/or modified sequence
atggagagacacacatcacaccccaatcggaaggtgcccgcaaaggaggaggccaatgccgtccccctgtgcagagcaaagccaagcccaagttacattaatctgcaagctagcagtccacctgccacctttctgaacatccagaccaccaaactgccgtccgttgatcataaacccaaggagtgccttggactgcttgagtgcatgtatgctaacttacagcttcagacccagctagctcagcagcaaatggccgtgctcgagcatctacaggcttccgtgacccaactcgcgccaggcagaggtagtaacaacagtagccttccagctctatccccaaacccactgttgaaccacctcccccagttttccaagtag

SEQ ID NO: 239222 - DNA, 378 bp, Artificial Sequence
  derived and/or modified sequence
atggagcggcacacgagccacccaaatcgaaaggtacctgccaaggaggaggcaaatgcagtgccactctgccgggcaaaaccatctcccagctacataaacctccaggctagctcccctcccgcaaccttcctgaatatacagactactaaactgccttccgtggaccataaacctaaggaatgcctggggttgttagagtgtatgtatgccaacctgcagttacaaacacaattggctcagcagcaaatggcggtacttgagcatttgcaggctagcgtgacacagttggcccctggcagaggctctaataacagctctttgccggctctgagtcccaatccgcttttaaatcatctgccccagtttagtaaatag

SEQ ID NO: 239223 - protein, 428 aa, Artificial Sequence
  derived and/or modified sequence
MPSGCYVPRSEPRLLPAPPPAGARVGALRSAQGDGPTSGHWDGGAEKADFNAKRKKKVAEIHQALNSDPTDVAALRRMAISEGGLLTDEIRRKVWPKLLNVNANDPPPISGKNLRQMSKDYQQVLLDVRRSLRRFPPGMPEEQREGLQEELIDIILLILERNPQLHYYQGYHDIVVTFLLVVGERLATSLVEKLSTHHLRDFMDPTMDNTKHILNYLMPIIDQVNPELHDFMQSAEVGTIFALSWLITWFGHVLSDFRHVVRLYDFFLACHPLMPIYFAAVIVLYREQEVLDCDCDMASVHHLLSQIPQDLPYETLISRAGDLFVQFPPSELAREAAAQQQAERTAASTFKDFELASAQQRPDMVLRQRFRGLLRPEDRTKDVLTKPRTNRFVKLAVMGLTVALGAAALAVVKSALEWAPKFQLQLFP

SEQ ID NO: 239224 - protein, 403 aa, Artificial Sequence
  derived and/or modified sequence
MALRSAQGDGPTSGHWDGGAEKADFNAKRKKKVAEIHQALNSDPTDVAALRRMAISEGGLLTDEIRRKVWPKLLNVNANDPPPISGKNLRQMSKDYQQVLLDVRRSLRRFPPGMPEEQREGLQEELIDIILLILERNPQLHYYQGYHDIVVTFLLVVGERLATSLVEKLSTHHLRDFMDPTMDNTKHILNYLMPIIDQVNPELHDFMQSAEVGTIFALSWLITWFGHVLSDFRHVVRLYDFFLACHPLMPIYFAAVIVLYREQEVLDCDCDMASVHHLLSQIPQDLPYETLISRAGDLFVQFPPSELAREAAAQQQAERTAASTFKDFELASAQQRPDMVLRQRFRGLLRPEDRTKDVLTKPRTNRFVKLAVMGLTVALGAAALAVVKSALEWAPKFQLQLFP

SEQ ID NO: 239225 - DNA, 1287 bp, Artificial Sequence
  derived and/or modified sequence
atgcccagcggctgctacgtgcccagaagcgagcccagactgctgcccgcccccccccccgccggcgccagagtgggcgccctgagaagcgcccagggcgacggccccaccagcggccactgggacggcggcgccgagaaggccgacttcaacgccaagagaaagaagaaggtggccgagatccaccaggccctgaacagcgaccccaccgacgtggccgccctgagaagaatggccatcagcgagggcggcctgctgaccgacgagatcagaagaaaggtgtggcccaagctgctgaacgtgaacgccaacgaccccccccccatcagcggcaagaacctgagacagatgagcaaggactaccagcaggtgctgctggacgtgagaagaagcctgagaagattcccccccggcatgcccgaggagcagagagagggcctgcaggaggagctgatcgacatcatcctgctgatcctggagagaaacccccagctgcactactaccagggctaccacgacatcgtggtgaccttcctgctggtggtgggcgagagactggccaccagcctggtggagaagctgagcacccaccacctgagagacttcatggaccccaccatggacaacaccaagcacatcctgaactacctgatgcccatcatcgaccaggtgaaccccgagctgcacgacttcatgcagagcgccgaggtgggcaccatcttcgccctgagctggctgatcacctggttcggccacgtgctgagcgacttcagacacgtggtgagactgtacgacttcttcctggcctgccaccccctgatgcccatctacttcgccgccgtgatcgtgctgtacagagagcaggaggtgctggactgcgactgcgacatggccagcgtgcaccacctgctgagccagatcccccaggacctgccctacgagaccctgatcagcagagccggcgacctgttcgtgcagttcccccccagcgagctggccagagaggccgccgcccagcagcaggccgagagaaccgccgccagcaccttcaaggacttcgagctggccagcgcccagcagagacccgacatggtgctgagacagagattcagaggcctgctgagacccgaggacagaaccaaggacgtgctgaccaagcccagaaccaacagattcgtgaagctggccgtgatgggcctgaccgtggccctgggcgccgccgccctggccgtggtgaagagcgccctggagtgggcccccaagttccagctgcagctgttcccctag

SEQ ID NO: 239226 - DNA, 1212 bp, Artificial Sequence
  derived and/or modified sequence
atggccctgagaagcgcccagggcgacggccccaccagcggccactgggacggcggcgccgagaaggccgacttcaacgccaagagaaagaagaaggtggccgagatccaccaggccctgaacagcgaccccaccgacgtggccgccctgagaagaatggccatcagcgagggcggcctgctgaccgacgagatcagaagaaaggtgtggcccaagctgctgaacgtgaacgccaacgaccccccccccatcagcggcaagaacctgagacagatgagcaaggactaccagcaggtgctgctggacgtgagaagaagcctgagaagattcccccccggcatgcccgaggagcagagagagggcctgcaggaggagctgatcgacatcatcctgctgatcctggagagaaacccccagctgcactactaccagggctaccacgacatcgtggtgaccttcctgctggtggtgggcgagagactggccaccagcctggtggagaagctgagcacccaccacctgagagacttcatggaccccaccatggacaacaccaagcacatcctgaactacctgatgcccatcatcgaccaggtgaaccccgagctgcacgacttcatgcagagcgccgaggtgggcaccatcttcgccctgagctggctgatcacctggttcggccacgtgctgagcgacttcagacacgtggtgagactgtacgacttcttcctggcctgccaccccctgatgcccatctacttcgccgccgtgatcgtgctgtacagagagcaggaggtgctggactgcgactgcgacatggccagcgtgcaccacctgctgagccagatcccccaggacctgccctacgagaccctgatcagcagagccggcgacctgttcgtgcagttcccccccagcgagctggccagagaggccgccgcccagcagcaggccgagagaaccgccgccagcaccttcaaggacttcgagctggccagcgcccagcagagacccgacatggtgctgagacagagattcagaggcctgctgagacccgaggacagaaccaaggacgtgctgaccaagcccagaaccaacagattcgtgaagctggccgtgatgggcctgaccgtggccctgggcgccgccgccctggccgtggtgaagagcgccctggagtgggcccccaagttccagctgcagctgttcccctag

SEQ ID NO: 239227 - DNA, 1287 bp, Artificial Sequence
  derived and/or modified sequence
atgccaagtggttgttatgtgcctaggagcgaaccccgcctgctgccagcaccaccaccggcgggagcccgggtgggggcactgcgctcagctcaaggtgacgggcctacctctgggcactgggatgggggagcagaaaaggctgattttaacgctaagagaaaaaaaaaggtggctgagatccaccaagcgctcaattcagatcctacggatgtcgcggctctccgaagaatggcgatctcagagggaggtcttttaactgacgaaattaggcggaaagtgtggcccaagctgctaaacgtgaacgccaacgacccccctcctatctcaggtaaaaatctgcggcagatgtccaaagattaccagcaggtcctgcttgacgtccgccgctcccttaggagatttccccctggcatgcctgaggaacagcgcgagggcctgcaagaggagttaatagatatcattttactaatcctcgaaagaaacccgcagctgcattactaccaggggtatcatgacattgttgtaacctttctgcttgtggtcggcgagcgtctggcgacctcactggtggaaaagctttccacccaccacttgagggacttcatggaccctaccatggataacacaaaacacattctaaattatctgatgcctatcatcgatcaagtcaatccagagctgcacgattttatgcagtctgctgaggtcggaacgatcttcgcactctcatggcttataacctggttcggtcatgtgctcagcgacttccggcatgtggttcggctgtacgatttcttcctggcctgtcaccctctgatgcctatttacttcgccgcggtcattgtcctctatagagagcaagaagtcctggattgcgactgcgacatggctagcgttcaccacttgctgtcccagatccctcaagacctcccatatgagacacttatctcaagagccggcgacctttttgtgcagttcccaccaagcgagcttgctcgcgaagccgctgcgcaacaacaagctgagaggacagctgcgtctaccttcaaagattttgagttggcctctgctcagcagcgaccagacatggtgctgcgccaaaggtttcgcgggcttcttcgccctgaggacaggacaaaggacgtcctcactaaaccccgcaccaacagatttgtgaaactcgctgtcatggggctaacggtggccctgggcgcggctgcgttagccgtggtaaaaagcgccctagagtgggctccaaagtttcagctgcagctgtttccatag

SEQ ID NO: 239228 - DNA, 1212 bp, Artificial Sequence
  derived and/or modified sequence
atggcactgcgatcagctcagggagatggtccaacttctggccactgggacggaggggcagaaaaggccgacttcaatgctaagagaaaaaagaaggtggctgagattcatcaggccctcaacagcgaccccaccgacgtggctgccctgcgacggatggccatcagcgaaggcggtctgctgactgacgaaatcaggagaaaagtctggcccaagctcctgaacgtaaacgcaaatgatcccccccctatctcagggaagaacctgagacaaatgtctaaggactaccagcaggtgctgctggatgtcaggcgctcccttcgaagatttccacccggcatgcctgaagagcagagagagggtttgcaggaggagctgatcgacatcatcttgctaatccttgagcgtaaccctcagctccactactaccaggggtaccacgatattgttgtgacttttcttctggtagtcggagagagactggccacctccctagtagaaaaactcagcacgcaccacctaagggactttatggatccaacgatggataacacaaagcatatcctcaactatctaatgcccatcattgatcaggtgaacccggagttgcatgacttcatgcagtccgcggaggttggaacaatctttgcactgagttggttaatcacttggtttggccatgtcctgagcgacttcaggcacgtggtgaggctgtacgactttttcctggcatgccaccccctgatgccaatctatttcgcagcggtgatcgtgctgtaccgcgagcaggaggttctggactgcgactgcgacatggcaagcgtccaccatttgctgtcacaaatccctcaagatctcccttacgaaacacttataagtagagccggggacctgtttgtccaattccctccgagcgagttggctcgcgaagccgcagcacagcagcaagccgaacggactgcggcttccacgttcaaggacttcgaactcgcctcagcccagcaaaggcctgacatggtcctccgccaaaggtttagaggcctgctccgcccggaagaccgaacaaaggacgtgctgacaaaaccccgaacaaatcgttttgtgaagctggcagtaatgggactgacagtcgcgctgggcgccgccgctctggctgttgtcaaaagcgcattagaatgggcccccaaatttcagctgcaactctttccatag

SEQ ID NO: 239229 - DNA, 1212 bp, Artificial Sequence
  derived and/or modified sequence
atggctctgcggtcagcccagggtgatggaccgacatccggccactgggacggcggagcagaaaaagctgatttcaatgcaaagagaaaaaaaaaagtggctgaaatccaccaggctctgaattcggaccccacggacgtcgctgccctgcgtaggatggcgatttcagaggggggactactgacagatgaaatccgaaggaaggtgtggccaaaactgctgaacgtgaatgctaacgacccccctcctatttcgggcaagaaccttcgccagatgtccaaggactaccagcaggtgctgttggacgtgcgtagaagcctgagacggttcccccccggaatgcctgaggagcagagggagggcttgcaggaagagctcatcgacattatccttctaatcctggagaggaatccacaactgcattattatcagggctaccacgacattgtcgttacattcctgttggttgtgggcgagcggctggccacctccctcgttgagaaactatcaacccatcatctgagagatttcatggaccctaccatggataataccaagcatattttgaattatctgatgcctattatagatcaggtgaatcctgaactgcatgactttatgcaatcggccgaggtgggcacgattttcgcccttagttggttgatcacatggtttgggcatgtgctgagcgacttccgtcacgttgtgcggctgtacgattttttccttgcctgccaccctctgatgcccatctatttcgccgctgtaatagtgctgtacagagaacaggaggtcctcgactgtgattgcgatatggccagcgtccaccacttgctgtcgcagattcctcaggatctgccatacgagactctgatctcgagggctggggatctgttcgtgcaattcccacctagtgagctggcacgggaagcagcagcccagcaacaagcagagagaacggctgcatcgacgttcaaggactttgagttggcctctgcacaacagcgcccagatatggtactgaggcagaggttccgaggcctgctccgcccagaagacaggacgaaggacgtcctgaccaaacctcgtaccaaccgctttgtaaaacttgccgttatgggactcacagtggcgctgggtgccgccgcgcttgccgtcgtcaaaagtgccctagagtgggcccccaagttccagcttcaactttttccttag

SEQ ID NO: 239230 - DNA, 1287 bp, Artificial Sequence
  derived and/or modified sequence
atgcccagcggctgctacgtgcccaggtctgagccccggctgctgcctgcccctcctcctgctggggcccgggtgggcgccctgcggagcgcccagggagatggccccaccagcggccactgggatggcggcgctgagaaggctgacttcaatgccaagaggaagaagaaggtggccgagatccaccaggccctgaacagcgaccccacagatgtggccgccctgcggaggatggccatcagcgagggcggcctgctgacagatgagatccggaggaaggtgtggcccaagctgctgaatgtgaatgccaatgaccccccacccatcagcggcaagaacctgcggcagatgagcaaggactaccagcaggtgctgctggatgtgagaagaagcctgcggcgcttccccccaggcatgcctgaggagcagcgggagggcctgcaggaggagctgattgacatcatcctgctgatcctggagaggaacccccagctgcactactaccagggctaccatgacatcgtggtgaccttcctgctggtggtgggggagcggctggccaccagcctggtggagaagctgagcacccaccacctgcgggacttcatggaccccaccatggacaacaccaagcacatcctgaactacctgatgcccatcatcgaccaggtgaaccctgagctgcatgacttcatgcagagcgctgaggtgggcaccatctttgccctgtcctggctgatcacctggtttggccacgtgctgagtgacttcagacatgtggtgcggctgtatgacttcttcctggcctgccaccccctgatgcccatctactttgctgctgtgattgtgctgtaccgggagcaggaggtgctggactgtgactgtgacatggcctctgtgcaccacctgctgagccagatcccccaggacctgccctatgagaccctcatcagccgggccggggacctgtttgtgcagttcccccccagcgagctggcccgggaggccgccgcccagcagcaggccgagaggacagctgccagcaccttcaaggactttgagctggccagcgcccagcagaggccagacatggtgctgcggcagcgcttccggggcctgctgcggcctgaggacaggaccaaggatgtgctgaccaagcccaggaccaacagatttgtgaagctggccgtgatgggcctgactgtggccctgggcgctgctgccctggccgtggtgaagagcgccctggagtgggcccccaagttccagctgcagctgttcccctag

SEQ ID NO: 239231 - DNA, 1212 bp, Artificial Sequence
  derived and/or modified sequence
atggccctgcggagcgcccagggagatggccccaccagcggccactgggatggaggagctgagaaggctgacttcaatgccaagaggaagaagaaggtggccgagatccaccaggccctgaacagcgaccccacagatgtggccgccctgcggaggatggccatcagcgagggcggcctgctgacagatgagatccggaggaaggtgtggcccaagctgctgaatgtgaatgccaatgaccccccacccatcagcggcaagaacctgcggcagatgagcaaggactaccagcaggtgctgctggatgtgcggcgcagcctgcggcgcttccccccaggcatgcctgaggagcagcgggagggcctgcaggaggagctgattgacatcatcctgctgatcctggagaggaacccccagctgcactactaccagggctaccatgacatcgtggtgaccttcctgctggtggtgggggagcggctggccaccagcctggtggagaagctgagcacccaccacctgcgggacttcatggaccccaccatggacaacaccaagcacatcctgaactacctgatgcccatcatcgaccaggtgaaccctgagctgcatgacttcatgcagagcgctgaggtgggcaccatctttgccctgtcctggctgatcacctggtttggacatgtgctgagtgacttccgccacgtggtgcggctgtatgacttcttcctggcctgccaccccctgatgcccatctactttgctgctgtgattgtgctgtaccgggagcaggaggtgctggactgtgactgtgacatggcctctgtgcaccacctgctgagccagatcccccaggacctgccctatgagaccctcatcagcagagctggggacctgtttgtgcagtttcctccttctgagctggcccgggaggccgccgcccagcagcaggccgagaggacagctgccagcaccttcaaggactttgagctggccagcgcccagcagaggccagacatggtgctgcggcagcgcttccggggcctgctgcggcctgaggacaggaccaaggatgtgctgaccaagcccaggaccaacagatttgtgaagctggccgtgatgggcctgactgtggccctgggcgccgccgccctggccgtggtgaagagcgccctggagtgggcccccaagttccagctgcagctgttcccctag

SEQ ID NO: 239232 - DNA, 1287 bp, Artificial Sequence
  derived and/or modified sequence
atgcccagcggctgctacgtgccccggagcgagccccggctgctgcccgccccccccccggctggcgcacgcgtgggcgccctccggagtgcgcagggtgacgggcccacaagcggacattgggacggcggcgcagagaaggccgattttaatgccaagcgcaaaaagaaggtggccgaaatccaccaggcacttaattctgaccctaccgatgtggccgctctgaggcgaatggcgatcagtgaaggcggacttcttacagacgagattagaagaaaggtctggccaaaattgttgaatgtcaatgcgaatgaccctccacctattagcggcaagaacctaaggcagatgtctaaggattatcagcaggtcttgctcgacgtccgccgaagcctgaggagattccctcctggtatgccggaggaacagagggagggcctccaggaagagctgatcgatataatcttgttgatcctggaacggaacccacaacttcattactaccagggctaccacgacatcgtggtgaccttcctactggtagttggagagcgtctggccacatctttggttgagaagctgtcaactcaccacttacgagacttcatggacccaacaatggataataccaaacacatcttaaattaccttatgcctataatagatcaggttaatcccgaattacacgatttcatgcagtccgctgaagtcggtactatatttgcattaagctggctgatcacatggttcgggcatgttctctctgacttcagacacgttgtgcggctttatgattttttcttggcgtgccaccctctgatgcccatctactttgccgctgtcattgttctgtacagggagcaggaagtcctggattgcgactgcgatatggcttccgttcaccaccttctgtcccagataccacaagatcttccctatgaaaccttgattagccgggcgggcgacctatttgttcaatttcctcccagcgagctggcacgggaggccgctgcccagcaacaggctgagcgcaccgccgcgagcactttcaaggacttcgaattggcctccgcccagcagcgacctgacatggtgctcagacagcgctttagaggtctgctacgccccgaggatagaactaaggacgtcttaaccaagccacgaaccaataggttcgtgaagctcgccgtgatgggactaaccgtggctttgggtgccgctgcactagctgtcgtgaagtcggctctagagtgggcgcccaagttccaactacagctctttccctag

SEQ ID NO: 239233 - DNA, 1212 bp, Artificial Sequence
  derived and/or modified sequence
atggccctgcggagcgcccagggcgacggccccaccagcggccactgggacggaggcgctgaaaaagcagattttaatgctaaacggaagaagaaggtggccgagatccaccaagctctcaattccgatcccaccgatgtggctgcactccgtcggatggcgattagcgaagggggtttacttacagatgagataaggcgaaaggtatggccgaaacttttaaacgtgaacgccaacgatccgcctcccatttctggcaaaaatttgcgccagatgtcaaaggactaccagcaggtgttgcttgatgttcggcgttcgctccggaggtttccccctggaatgccagaggagcagagagagggtcttcaggaagaactgatcgacatcattttactgattctcgagaggaaccctcaactacactactaccagggctatcacgacattgttgtgactttcctcctggtggttggcgagaggctggcgacaagccttgttgaaaaactgagcacccatcacctgagggattttatggaccccaccatggacaacactaaacacatcctcaattaccttatgccgattatagatcaggtcaaccccgaattacatgatttcatgcagagcgctgaagtagggactatattcgcccttagttggttaatcacttggttcggacacgttctgagcgatttccggcatgtggtgcgcctgtacgatttttttctggcatgccatccattaatgccgatatacttcgcagccgtgattgtgttgtatcgcgagcaggaagttctggactgcgactgcgacatggcgtccgttcaccatctgctaagccagataccacaggacttgccatatgagaccctgatctctcgggcgggagacctatttgttcagttccccccatctgagctcgcgagggaggccgctgcccaacaacaggccgagcggactgcagcgagcacgtttaaagacttcgagctggcctcggcacagcagcggcctgatatggtgcttcggcaacgttttagggggctacttcgccctgaggatcggacaaaggacgtgcttacaaaaccacgaacgaaccgatttgtgaaattagctgtgatgggcctgacggtagccttaggcgcggctgccctggcagtggtcaagagtgccctggaatgggcaccgaaattccagcttcagctgtttccatag

SEQ ID NO: 239234 - DNA, 1212 bp, Artificial Sequence
  derived and/or modified sequence
atggccctgcggagcgcccagggcgacggccccaccagcggccactgggacgggggtgcagagaaagcggacttcaacgcgaagcggaaaaaaaaggtcgccgagattcaccaggccctcaatagcgaccccacagatgttgccgctcttagacgaatggctatctccgaggggggactgttgactgacgaaataagacgcaaggtgtggcccaaactcctgaacgtgaatgcaaatgacccacctccaatatccggtaaaaatctgcgacagatgagcaaggactaccagcaagtgctgttagatgttagacgaagtctgaggagatttccccccgggatgcccgaagaacaacgtgagggcctacaggaggagcttatcgatattattcttctgatactcgaacgaaacccccaactgcactattatcaaggctaccatgatattgtcgtcaccttcctgctggttgtgggcgaacggctcgcaacgtctttagtcgagaagttaagtacccaccacctgcgggatttcatggatccgaccatggacaataccaaacatatcttgaactacctaatgcctattatcgaccaggtgaaccccgagctgcacgactttatgcagagcgcagaggttggaacaatcttcgccttgtcctggcttatcacctggtttggccacgtgctctctgactttaggcatgtggtgcgactttatgacttctttttggcatgtcatccactgatgcccatatacttcgccgccgtgattgtcctttatagagagcaagaagtcctggattgcgactgcgacatggccagtgtccatcacctcttaagtcagattcctcaagatttgccctacgaaacgctgatcagcagagcaggtgatctgtttgtccagtttccccctagcgagctggcaagggaagcggccgcacagcagcaggctgagagaacagcagccagcacttttaaagactttgagctggccagcgcacaacagcgcccagacatggtccttcggcagagattcagagggctgctcaggccagaggaccgaacaaaagatgtgctgaccaaacctagaacgaaccgctttgtcaaactggccgtcatgggactgaccgtcgcactcggagcggccgccctggccgtggtgaaatccgcgctggagtgggccccaaaattccagctccagttattcccctag

SEQ ID NO: 239235 - DNA, 1287 bp, Artificial Sequence
  derived and/or modified sequence
atgccttcaggatgctacgtccctcggagcgagccaaggctcctgccagctcccccacccgctggtgcaagagtgggcgcactcagaagcgctcaaggcgatggccctacctccggccattgggatggcggagcagagaaggccgattttaatgcaaagcgcaagaaaaaagtggcggaaattcatcaggccttaaatagcgaccctaccgatgtcgcggcactgcgcaggatggccatttctgaaggcggattactgaccgatgaaattaggaggaaggtatggccaaagctcctcaatgtcaatgctaacgatcccccacctatttctggcaaaaacctacggcagatgtccaaggattaccagcaggtcctcctcgatgtccggaggtctctacgcaggtttcctcccggaatgcccgaagagcagcgcgaaggcctgcaggaggaacttattgacattatactcctgattctcgaaagaaacccccagctgcattattaccagggatatcacgatatcgtggttaccttcctgctggtcgtaggggagaggctggccaccagcctggtggaaaagctttccacccaccaccttcgggatttcatggatccaacaatggacaacacaaaacacattctcaactatttgatgcccattatcgaccaggtgaaccctgaacttcacgatttcatgcagtccgctgaagtgggcacaatctttgccctgtcttggctcataacgtggttcggacacgtgctaagcgattttcgccatgttgtgcggttgtacgatttttttctggcatgccaccccttaatgcctatctatttcgctgcagtcattgtactctatagggaacaggaggtgctggattgtgactgcgacatggcatcagttcaccatctacttagccagattcctcaggaccttccatacgagacactgataagcagagccggagaccttttcgtgcagttccctcccagtgagctggcccgagaggccgctgcacaacaacaggcagagcggacggcagcgtccacctttaaagacttcgaactggcctcggcccagcagcggcctgacatggtcctgaggcaaagatttagagggttattgcgtcctgaggacaggaccaaggatgtgctgaccaagcccaggaccaatagattcgttaaacttgcagttatgggcctgacagtcgccctgggtgctgccgcactcgccgtagtgaaatccgctctcgaatgggcaccgaagttccagctccagctatttccttag

SEQ ID NO: 239236 - DNA, 1212 bp, Artificial Sequence
  derived and/or modified sequence
atggctctgagatcagcgcagggagacgggccaacttctggccactgggacggaggagctgaaaaggcggactttaacgccaagaggaagaaaaaagtcgccgagattcaccaagctctgaactctgacccaactgacgtcgcagctctacggagaatggcgatcagcgagggaggactgctgaccgatgagatccggagaaaagtgtggcccaaactactgaacgttaatgcgaacgatccccctcctattagcgggaagaatctgcggcagatgtccaaagactaccagcaagtattgttagacgttagaaggagcctgaggcggtttcctcccggaatgcctgaggagcagcgtgaaggcctacaggaggaactgatcgatattattctgcttatcctcgaacgcaacccccagttgcactactaccagggttaccacgacatagtcgtgactttcttgctggtagtcggagagagattggccaccagcctcgttgagaaacttagcactcaccaccttcgagatttcatggatcccaccatggacaacacaaagcatatcctcaactacttgatgcctatcatagatcaagtcaacccagagctccacgattttatgcagtccgccgaggtggggactattttcgccctgtcctggcttattacatggttcgggcacgtcctgagcgacttccggcatgtcgttaggctttatgacttttttctggcctgccaccccctcatgcctatctattttgctgccgtcattgttctctatcgagagcaggaagtgctggattgcgattgtgacatggctagtgtacaccacctgctgagccagattcctcaggatttgccgtacgagactttgatctctagagcaggtgatctcttcgtccagttccctccttcagagctggcaagggaagccgctgcacagcagcaggccgagaggacagctgctagcacctttaaggatttcgaactggcctccgcacagcagagaccagatatggttctacgccaaagattccgagggctgctcaggcccgaagatcggaccaaagacgtactgactaagcctagaaccaacaggttcgttaagctcgctgtgatgggacttactgtggccctcggtgctgcggctctggctgtggtcaaatcagcgctggagtgggctcctaaattccaattacagctgttcccctag

SEQ ID NO: 239237 - DNA, 1212 bp, Artificial Sequence
  derived and/or modified sequence
atggctctacgctcagctcagggtgatggccctacttccggtcactgggatggcggagctgaaaaagccgatttcaacgcgaagcggaaaaagaaggtggcagaaatacaccaggctctgaactcagaccccacagatgtggctgccctcaggcgcatggcaatatctgaaggcggactcttaaccgatgaaattcggaggaaggtgtggccgaagctactcaacgtcaacgccaacgatcccccacccatcagtggaaagaatctgaggcaaatgagtaaagactaccaacaggtgcttctggacgtccgtcggagcctcaggcgctttcccccaggcatgcccgaggagcagcgggaaggcttacaagaggaacttatcgacattatacttcttatcttggagcgcaacccgcagctgcactactatcagggataccacgacatcgtggtaactttcctgctggtggtcggggagaggctggccacatctctggtggagaagctgtctacccaccacttgcgggatttcatggaccccactatggacaacactaagcacatcctcaattacctgatgcctatcatcgaccaggtgaatcccgagctgcacgattttatgcagagtgccgaggtcggaacgatattcgcgttgtcctggctgattacgtggttcggtcacgtgctgtctgatttccgacatgtggttagattatacgacttctttctcgcctgccaccccctcatgcctatatatttcgcagcagttattgtactctaccgggaacaggaagtgttggattgcgattgcgatatggcctccgtgcaccacctgcttagtcagatcccgcaggacctgccttatgaaactctaattagccgcgctggagacctttttgtccagttcccccctagcgaacttgcacgcgaagctgctgcacagcagcaggcagagcggaccgccgcatctaccttcaaggactttgagctggcttccgctcaacaacggcctgacatggtgctgcgccagcgctttcgcggtctgctgaggccggaagatcggacgaaagatgttctgaccaaacccagaacaaatcgattcgtcaagctcgcagtaatgggtctaactgtcgccctgggggcagctgccctagcggtcgtgaagtccgcactggaatgggcccctaagttccaactgcagctgttcccctag

SEQ ID NO: 239238 - DNA, 4393 bp, Artificial Sequence
  derived and/or modified sequence
atgccgagcgggtgctacgtcccgcggtcggagccgcgtcttctcccggctccgccaccagccggggctcgggtgggggccctccggagtgcgcagggcgacggccccacctccggccactgggacggcggcgcggagaaggcagactttaacgccaaaaggaaaaagaaagtggcagagatacaccaggctctgaacagtgatcccactgatgtggctgcccttagacgcatggctatcagtgaaggagggctcctgactgatgagatcagacgaaaagtgtggcccaagctcctcaatgtcaatgccaatgacccacctcctatatcagggaagaacctacggcagatgagcaaggactaccaacaagtgttgctggacgtccggcggtcattgcggcggttccctcctggcatgccagaggaacagagagaagggctccaggaagaactgattgacatcatcctcctcatcttggagcgcaaccctcagctgcactactaccagggctaccatgacattgtggtcacatttctgctggtggtaggcgagaggctggcaacatccctggtagaaaaattatctacccaccacctcagggattttatggatccaacaatggacaacaccaagcatatattaaactatctgatgcccatcattgaccaggtgaatccagagctccatgacttcatgcagagtgctgaggtagggaccatctttgccctcagctggctcatcacctggtttgggcatgtcctgtctgacttcaggcacgtcgtgcggttatatgacttcttcctggcctgccacccactgatgccgatttactttgcagccgtgattgtgttgtatcgcgagcaggaagtcctggactgtgactgtgacatggcctcggtccaccacctgttgtcccagatccctcaggacttgccctatgagacactgatcagcagagcaggagacctttttgttcagtttcccccatccgaacttgctcgggaggccgctgcccaacagcaagctgagaggacggcagcctctactttcaaagactttgagctggcatcagcccagcagaggcctgatatggtgctgcggcagcggtttcggggacttctgcggcctgaagatcgaacaaaagatgtcctgaccaagccaaggaccaaccgctttgtgaaattggcagtgatggggctgacagtggcacttggagcggctgcactggctgtggtgaaaagtgccctggaatgggcccctaagtttcagctgcagctgtttccctgaaagccagagaagaccttcctcttacatcacattaaggtctcacccttccatggaaggattgggaggggtggaatttcctttattaaaagggtttctgtccagagttttttattcctgccaccctgccctgcccgtttgtgtttgcctttacttcagaggccagtagcagagcctacctgacacagaggggacctgggggcctggcacagaatcttatgcctctcccagtgggcttttggatgggctctctgccacctccctggtgttggaggaagtgggtttctgaagcttgcagctgcttttgcaacctgctgggcctgggctgccctagttaccgggaacctcctagtcaccccatagaaggtgaactggaacatgggatgccctcttactgctcctgcttgcctgcatcagatggacacagaaggagggggctgctgctgaaggagtcaggcttgggatggagagcaagaggccaaaggactcgtctgggagcatgatcggcccctcttactagcagctccatcagctgatcagaaatcagagacagaagggaactaggttactcgttaaatcctacctattttcagcctagaaatcacatgggcgtttccagtcaagtgggaaggaagctcatttttagggcctagacctagactagttttgcctgcctttttttcctccctgctttcttctacaagccacacaacattgcttataaaaggtacttttattactatttttagaatatatacaccccatatgtaaattaccctcacttttaaagtaataatagttccttcacggaaaaaaaaatagttctcatcagaaggatgagcttctaagatcctgaattttactttctacttgattaacattttcgctttagccagagttgctatttgcaaacagctttccacttccaaagtgccactttctgaccggtttttcttcctgttttcctcaaatcatcctactcccaaataggcacccactcactaccttggcgtcgttttttgggtctgacttgactcgtcaactgctggtctctcccacctggttggaaatgtcgttggaaacttgcaaagactctccagaccttagggaacaagaggcatcactcagtccttctgggacagcttccctgtaagcaaagccaggtttgttttagattcactctggcctgaaaaaaaaagtgccttttgctgctttaaagaattggggtatatggtatgaagcagccatgtacttgtattttcctggtctttcctgggcactcttctctcttggcagatgttttcttaaagtgaacacaccagaagcactctaccccaccatatccagtcctctttgcatgcctgttgtgtgcagggtggagggtgtcccacgtgccagagcagctgggagccctgtccgctgagttacactaagcactttatttttatttattttattattattttcttttttctgagatggagtctcactctgttgcccaggctggagtgcagtggtgcagtctcagctcactgcaacctccgcctcccaagttcaggcaattctcgctgcctcagcctcccgagtagctgggactacaggcacctgctaccacgcctgactaatttttgtatttttagtagagatggggtttcgccacgttggccaggctggtctcgaactcctgacctcaggtgatctgcccgtctcgtcctcccaaagtgctgggattacaggtgtgagccaccacgcccagccaccactacgcactttaaaaccaaaaaaagctcaaagggatggatcattgtccatggctcaggagccccactgtggggtaagtgtgatgtcgatggattaatttagacagtggtgtattcatcagggcaaaggaaattcttccagaggtgatgatgcggcagatattcccagtgctctcccaaagcaagctggccctcttgtcatcctctcagtgggcggcaccagctgcccctccttccacaagtactcaagcctgtttgtaaatactgaaggaattgatggggttgaggaaaggaggtgcatgtgaccagggtcccaaggccacagcttttcagatcctaggaagcaagtggcatttgcttgagttgtggcctcggaaggagaatgtttatctgttttctaactttgctgacaccaggattctccctgtcattgagaagaaagcattatctaattaccttcaggtggtttacttattctgtaaagaatatgtgtaaatattttgtacagagccctgtatcaaataaacagccatatgtggttactaatcacctcttctgtcattccgtccttggccaccgctcagtgggaatggtctctgatctggatgctcccaccttccatgtcaggcccagaactgtgccatggtctgtggactcctggtcagccttgactggctaggagaccttgggcagtacctacagtcttgctgtttctgtttcatctgcaagaattatgacccacacactccagctgcagcccagggcactgtgatattttatacgtgtgtagatgtttttgtccacagttcctggttcatcactcccataaccctttgttataatgttgggacactgcaggcctcagaaaacggaatctctgtctgtgaccttctcctgccccatttcacttgctcaacaccagactttaatctgactgtagctcataagaccctcattccagagagggtgctgccccatacccggaaggaggaacgctgcacagagaggccaagaagcatctggacagacaggccttgctgggtttagaccttatgctttttgtccagtttcatctcaacacagctgccatgcttcagccatgcctatccaatgacgtctccataaaaggcccaggaacacgggagcttctgaagagctgaacatgtggagggaggggaacgagaacttgtccatgtgccaagagggtggcgcacccccactccatggggacagaagctccagcatttgcccaggacccgtccagacctcaccctgtgtgtatcttcatctggctgtttacttatttgtatccttttctaataatgtttgtaataaactggtaaacataa

SEQ ID NO: 239239 - DNA, 4466 bp, Artificial Sequence
  derived and/or modified sequence
agcggggcgcctgcgcgcctgcgcgccgctggccgacggaggggagcctgccgatgccgagcgggtgctacgtcccgcggtcggagccgcgtcttctcccggctccgccaccagccggggctcgggtgggggcccggggccccggggcatggccctccggagtgcgcagggcgacggccccacctccggccactgggacggcggcgcggagaaggcagactttaacgccaaaaggaaaaagaaagtggcagagatacaccaggctctgaacagtgatcccactgatgtggctgcccttagacgcatggctatcagtgaaggagggctcctgactgatgagatcagacgaaaagtgtggcccaagctcctcaatgtcaatgccaatgacccacctcctatatcagggaagaacctacggcagatgagcaaggactaccaacaagtgttgctggacgtccggcggtcattgcggcggttccctcctggcatgccagaggaacagagagaagggctccaggaagaactgattgacatcatcctcctcatcttggagcgcaaccctcagctgcactactaccagggctaccatgacattgtggtcacatttctgctggtggtaggcgagaggctggcaacatccctggtagaaaaattatctacccaccacctcagggattttatggatccaacaatggacaacaccaagcatatattaaactatctgatgcccatcattgaccaggtgaatccagagctccatgacttcatgcagagtgctgaggtagggaccatctttgccctcagctggctcatcacctggtttgggcatgtcctgtctgacttcaggcacgtcgtgcggttatatgacttcttcctggcctgccacccactgatgccgatttactttgcagccgtgattgtgttgtatcgcgagcaggaagtcctggactgtgactgtgacatggcctcggtccaccacctgttgtcccagatccctcaggacttgccctatgagacactgatcagcagagcaggagacctttttgttcagtttcccccatccgaacttgctcgggaggccgctgcccaacagcaagctgagaggacggcagcctctactttcaaagactttgagctggcatcagcccagcagaggcctgatatggtgctgcggcagcggtttcggggacttctgcggcctgaagatcgaacaaaagatgtcctgaccaagccaaggaccaaccgctttgtgaaattggcagtgatggggctgacagtggcacttggagcggctgcactggctgtggtgaaaagtgccctggaatgggcccctaagtttcagctgcagctgtttccctgaaagccagagaagaccttcctcttacatcacattaaggtctcacccttccatggaaggattgggaggggtggaatttcctttattaaaagggtttctgtccagagttttttattcctgccaccctgccctgcccgtttgtgtttgcctttacttcagaggccagtagcagagcctacctgacacagaggggacctgggggcctggcacagaatcttatgcctctcccagtgggcttttggatgggctctctgccacctccctggtgttggaggaagtgggtttctgaagcttgcagctgcttttgcaacctgctgggcctgggctgccctagttaccgggaacctcctagtcaccccatagaaggtgaactggaacatgggatgccctcttactgctcctgcttgcctgcatcagatggacacagaaggagggggctgctgctgaaggagtcaggcttgggatggagagcaagaggccaaaggactcgtctgggagcatgatcggcccctcttactagcagctccatcagctgatcagaaatcagagacagaagggaactaggttactcgttaaatcctacctattttcagcctagaaatcacatgggcgtttccagtcaagtgggaaggaagctcatttttagggcctagacctagactagttttgcctgcctttttttcctccctgctttcttctacaagccacacaacattgcttataaaaggtacttttattactatttttagaatatatacaccccatatgtaaattaccctcacttttaaagtaataatagttccttcacggaaaaaaaaatagttctcatcagaaggatgagcttctaagatcctgaattttactttctacttgattaacattttcgctttagccagagttgctatttgcaaacagctttccacttccaaagtgccactttctgaccggtttttcttcctgttttcctcaaatcatcctactcccaaataggcacccactcactaccttggcgtcgttttttgggtctgacttgactcgtcaactgctggtctctcccacctggttggaaatgtcgttggaaacttgcaaagactctccagaccttagggaacaagaggcatcactcagtccttctgggacagcttccctgtaagcaaagccaggtttgttttagattcactctggcctgaaaaaaaaagtgccttttgctgctttaaagaattggggtatatggtatgaagcagccatgtacttgtattttcctggtctttcctgggcactcttctctcttggcagatgttttcttaaagtgaacacaccagaagcactctaccccaccatatccagtcctctttgcatgcctgttgtgtgcagggtggagggtgtcccacgtgccagagcagctgggagccctgtccgctgagttacactaagcactttatttttatttattttattattattttcttttttctgagatggagtctcactctgttgcccaggctggagtgcagtggtgcagtctcagctcactgcaacctccgcctcccaagttcaggcaattctcgctgcctcagcctcccgagtagctgggactacaggcacctgctaccacgcctgactaatttttgtatttttagtagagatggggtttcgccacgttggccaggctggtctcgaactcctgacctcaggtgatctgcccgtctcgtcctcccaaagtgctgggattacaggtgtgagccaccacgcccagccaccactacgcactttaaaaccaaaaaaagctcaaagggatggatcattgtccatggctcaggagccccactgtggggtaagtgtgatgtcgatggattaatttagacagtggtgtattcatcagggcaaaggaaattcttccagaggtgatgatgcggcagatattcccagtgctctcccaaagcaagctggccctcttgtcatcctctcagtgggcggcaccagctgcccctccttccacaagtactcaagcctgtttgtaaatactgaaggaattgatggggttgaggaaaggaggtgcatgtgaccagggtcccaaggccacagcttttcagatcctaggaagcaagtggcatttgcttgagttgtggcctcggaaggagaatgtttatctgttttctaactttgctgacaccaggattctccctgtcattgagaagaaagcattatctaattaccttcaggtggtttacttattctgtaaagaatatgtgtaaatattttgtacagagccctgtatcaaataaacagccatatgtggttactaatcacctcttctgtcattccgtccttggccaccgctcagtgggaatggtctctgatctggatgctcccaccttccatgtcaggcccagaactgtgccatggtctgtggactcctggtcagccttgactggctaggagaccttgggcagtacctacagtcttgctgtttctgtttcatctgcaagaattatgacccacacactccagctgcagcccagggcactgtgatattttatacgtgtgtagatgtttttgtccacagttcctggttcatcactcccataaccctttgttataatgttgggacactgcaggcctcagaaaacggaatctctgtctgtgaccttctcctgccccatttcacttgctcaacaccagactttaatctgactgtagctcataagaccctcattccagagagggtgctgccccatacccggaaggaggaacgctgcacagagaggccaagaagcatctggacagacaggccttgctgggtttagaccttatgctttttgtccagtttcatctcaacacagctgccatgcttcagccatgcctatccaatgacgtctccataaaaggcccaggaacacgggagcttctgaagagctgaacatgtggagggaggggaacgagaacttgtccatgtgccaagagggtggcgcacccccactccatggggacagaagctccagcatttgcccaggacccgtccagacctcaccctgtgtgtatcttcatctggctgtttacttatttgtatccttttctaataatgtttgtaataaactggtaaacataa

SEQ ID NO: 239240 - DNA, 2024 bp, Artificial Sequence
  derived and/or modified sequence
gcgccgctggccgacggaggggagcctgccgatgccgagcgggtgctacgtcccgcggtcggagccgcgtcttctcccggctccgccaccagccggggctcgggtgggggcccggggccccggggcatggccctccggagtgcgcagggcgacggccccacctccggccactgggacggcggcgcggagaaggcagactttaacgccaaaaggaaaaagaaagtggcagagatacaccaggctctgaacagtgatcccactgatgtggctgcccttagacgcatggctatcagtgaaggagggctcctgactgatgagatcagacgaaaagtgtggcccaagctcctcaatgtcaatgccaatgacccacctcctatatcagggaagaacctacggcagatgagcaaggactaccaacaagtgttgctggacgtccggcggtcattgcggcggttccctcctggcatgccagaggaacagagagaagggctccaggaagaactgattgacatcatcctcctcatcttggagcgcaaccctcagctgcactactaccagggctaccatgacattgtggtcacatttctgctggtggtaggcgagaggctggcaacatccctggtagaaaaattatctacccaccacctcagggattttatggatccaacaatggacaacaccaagcatatattaaactatctgatgcccatcattgaccaggtgaatccagagctccatgacttcatgcagagtgctgaggtagggaccatctttgccctcagctggctcatcacctggtttgggcatgtcctgtctgacttcaggcacgtcgtgcggttatatgacttcttcctggcctgccacccactgatgccgatttactttgcagccgtgattgtgttgtatcgcgagcaggaagtcctggactgtgactgtgacatggcctcggtccaccacctgttgtcccagatccctcaggacttgccctatgagacactgatcagcagagcaggagacctttttgttcagtttcccccatccgaacttgctcgggaggccgctgcccaacagcaagctgagaggacggcagcctctactttcaaagactttgagctggcatcagcccagcagaggcctgatatggtgctgcggcagcggtttcggggacttctgcggcctgaagatcgaacaaaagatgtcctgaccaagccaaggaccaaccgctttgtgaaattggcagtgatggggctgacagtggcacttggagcggctgcactggctgtggtgaaaagtgccctggaatgggcccctaagtttcagctgcagctgtttccctgaaagccagagaagaccttcctcttacatcacattaaggcacccactcactaccttggcgtcgttttttgggtctgacttgactcgtcaactgctggtctctcccacctggttggaaatgtcgttggaaacttgcaaagactctccagaccttagggaacaagaggcatcactcagtccttctgggacagcttccctgcctcagaaaacggaatctctgtctgtgaccttctcctgccccatttcacttgctcaacaccagactttaatctgactgtagctcataagaccctcattccagagagggtgctgccccatacccggaaggaggaacgctgcacagagaggccaagaagcatctggacagacaggccttgctgggtttagaccttatgctttttgtccagtttcatctcaacacagctgccatgcttcagccatgcctatccaatgacgtctccataaaaggcccaggaacacgggagcttctgaagagctgaacatgtggagggaggggaacgagaacttgtccatgtgccaagagggtggcgcacccccactccatggggacagaagctccagcatttgcccaggacccgtccagacctcaccctgtgtgtatcttcatctggctgtttacttatttgtatccttttctaataatgtttgtaataaactggtaaacataa

SEQ ID NO: 239241 - protein, 501 aa, Artificial Sequence
  derived and/or modified sequence
MGCGLRKLEDPDDSSPGKIFSTLKRPQVETKTEFAYEYVLLDFTLQASSNPEVIKINSILDIVTKVENYYLKGYIVGAIHPVIQPVGQRKHLPASYLYRVVLLRLKLSPKNSAAPSGQRRPRLVIEECPLTSEAQTNDAAKELIEKINVAAKRGMKFVGFISQHYSPSKFCNGTNHDGDIESMLHVRHGSDENCRSWNEGTLSGQSSESGIEEELHHESGQYQMEQNGSPTSSKSRKGEASDNKLYTVFNAFDDDSTSWAYQEGILSMKVTRKGSVISTLDADWLELTTFYYKQGLSLIDSFVFWETSKGEHLPKSLEGFFIYEEEGSGVPGSSRKGNDAIVVEQWTVIEGCEIKTDYGPLLHTLAEFGWLLTSVLPTPVLRHDSEGNLATKQIVFLQRPVMWNSAAQTPDKKASRHIKGEDKNKATSRSIGLDTTSSQPAESRHLPEECRLSPSRECWTKEGRLAQHNSFSGFSSSDNVLRELDDGQFDQEDGVTQVTCM

SEQ ID NO: 239242 - DNA, 1506 bp, Artificial Sequence
  derived and/or modified sequence
atgggctgcggcctgagaaagctggaggaccccgacgacagcagccccggcaagatcttcagcaccctgaagagaccccaggtggagaccaagaccgagttcgcctacgagtacgtgctgctggacttcaccctgcaggccagcagcaaccccgaggtgatcaagatcaacagcatcctggacatcgtgaccaaggtggagaactactacctgaagggctacatcgtgggcgccatccaccccgtgatccagcccgtgggccagagaaagcacctgcccgccagctacctgtacagagtggtgctgctgagactgaagctgagccccaagaacagcgccgcccccagcggccagagaagacccagactggtgatcgaggagtgccccctgaccagcgaggcccagaccaacgacgccgccaaggagctgatcgagaagatcaacgtggccgccaagagaggcatgaagttcgtgggcttcatcagccagcactacagccccagcaagttctgcaacggcaccaaccacgacggcgacatcgagagcatgctgcacgtgagacacggcagcgacgagaactgcagaagctggaacgagggcaccctgagcggccagagcagcgagagcggcatcgaggaggagctgcaccacgagagcggccagtaccagatggagcagaacggcagccccaccagcagcaagagcagaaagggcgaggccagcgacaacaagctgtacaccgtgttcaacgccttcgacgacgacagcaccagctgggcctaccaggagggcatcctgagcatgaaggtgaccagaaagggcagcgtgatcagcaccctggacgccgactggctggagctgaccaccttctactacaagcagggcctgagcctgatcgacagcttcgtgttctgggagaccagcaagggcgagcacctgcccaagagcctggagggcttcttcatctacgaggaggagggcagcggcgtgcccggcagcagcagaaagggcaacgacgccatcgtggtggagcagtggaccgtgatcgagggctgcgagatcaagaccgactacggccccctgctgcacaccctggccgagttcggctggctgctgaccagcgtgctgcccacccccgtgctgagacacgacagcgagggcaacctggccaccaagcagatcgtgttcctgcagagacccgtgatgtggaacagcgccgcccagacccccgacaagaaggccagcagacacatcaagggcgaggacaagaacaaggccaccagcagaagcatcggcctggacaccaccagcagccagcccgccgagagcagacacctgcccgaggagtgcagactgagccccagcagagagtgctggaccaaggagggcagactggcccagcacaacagcttcagcggcttcagcagcagcgacaacgtgctgagagagctggacgacggccagttcgaccaggaggacggcgtgacccaggtgacctgcatgtag

SEQ ID NO: 239243 - DNA, 1506 bp, Artificial Sequence
  derived and/or modified sequence
atgggctgtgggttgcgaaaactggaggatcctgacgactcatcaccaggcaagatcttcagcacgttgaagagacctcaggtggaaaccaagaccgagttcgcctatgagtacgtattgctcgatttcacccttcaagcttcatccaatccagaagtgatcaagatcaattccattctcgatatcgtgacaaaagttgaaaactattacctgaaggggtatatcgtgggggcaattcatccagttatacagcctgtggggcagcgaaagcacctgcctgccagctacctgtatcgggtggtgttgctgaggctcaagttgagccccaaaaactccgcagctcccagtggccagcgccgtcctcgactggttattgaggaatgccccttgactagtgaggcccagacaaacgatgcggcgaaggaactcattgagaaaatcaatgtggcggcaaagcgggggatgaagttcgtcggattcatttcccagcactatagcccgtccaaattttgtaacggcacaaatcacgacggcgacatcgagtccatgctgcacgtgagacatggttctgacgagaactgccggagctggaatgaaggaaccctttcaggccaatcaagcgaatcgggcatcgaagaagagctgcatcatgagagtggtcagtatcagatggaacagaatggttcccctacgtcgagcaaatcccgaaagggggaggcatctgacaataagctttatactgtcttcaacgcctttgacgatgactccacttcgtgggcctaccaagaggggattctgagcatgaaggtgactagaaaaggaagcgttatatctacgctcgacgctgactggctcgaactgacaaccttctattacaaacagggcctctccctgatcgactcgtttgtcttctgggagaccagcaagggagagcatctgccaaaatcactagaaggcttcttcatctatgaggaggagggctcaggagtgccaggatcctcacgcaaaggtaacgatgccatcgtggtcgaacagtggacagtgattgagggctgcgaaattaaaaccgactatggccccctcctgcatactctagctgagttcggttggctgctgacctcagttcttcccacacctgtactaagacacgactccgaggggaatctggccaccaaacaaatagtgtttctgcagagacccgtgatgtggaattcagccgctcagacccctgacaaaaaggcctcccgacacatcaaaggcgaggacaagaataaagccaccagtaggtccatcgggctggatacaactagctctcaacctgctgagtctcgccacctgcctgaagagtgccgcctctccccatctagggagtgttggacaaaagaaggcagacttgcccagcataactccttttcaggattcagctctagcgataatgtcttacgagaattggatgacggtcagttcgaccaagaagatggagttacgcaggtgacatgcatgtag

SEQ ID NO: 239244 - DNA, 1506 bp, Artificial Sequence
  derived and/or modified sequence
atgggctgcggcctgaggaagctggaggaccctgatgacagcagccctgggaagatcttcagcaccctgaagaggccccaggtggagaccaagacagaatttgcctatgaatatgtgctgctggacttcaccctgcaggccagcagcaaccctgaggtgatcaagatcaacagcatcctggacatcgtgaccaaggtggagaactactacctgaagggctacatcgtgggcgccatccaccctgtgatccagcctgtgggccagaggaagcacctgcctgccagctacctgtacagagtggtgctgctgcggctgaagctgagccccaagaacagcgctgcccccagcggccagaggcggccccggctggtgattgaagaatgtcccctgaccagcgaggcccagaccaatgatgctgccaaggagctgattgagaagatcaacgtggccgccaagaggggcatgaagtttgtgggcttcatcagccagcactacagccccagcaagttctgcaatggcaccaaccatgatggagacatcgagagcatgctgcacgtgcgccacggcagtgatgagaactgccgctcctggaatgaaggcaccctgagcggccagagcagcgagagcggcatcgaggaggagctgcaccatgaaagtggccagtaccagatggagcagaatggcagccccaccagcagcaagagcaggaaaggagaggccagtgacaacaagctgtacacagtgttcaatgcctttgatgatgacagcacctcctgggcctaccaggagggcatcctgtccatgaaggtgaccaggaaaggatctgtcatcagcaccctggatgctgactggctggagctgaccaccttctactacaagcagggcctgagcctgattgacagctttgtgttctgggagaccagcaaaggagagcacctgcccaagagcctggagggcttcttcatctatgaggaggagggcagcggcgtgcccggcagcagcaggaaaggaaatgatgccatcgtggtggagcagtggacagtgattgagggctgtgagatcaagacagattatggccccctgctgcacaccctggccgagtttggctggctgctgacctctgtgctgcccacccctgtgctgcggcatgattctgagggcaacctggccaccaagcagatcgtgttcctgcagaggcctgtgatgtggaacagcgctgcccagaccccagacaagaaggccagccgccacatcaagggggaggacaagaacaaggccaccagccgcagcatcggcctggacaccaccagcagccagcctgctgagagccgccacctgcctgaagaatgtcggctgagccccagccgggagtgctggaccaaggagggccgcctggcccagcacaacagcttcagcggcttcagcagcagtgacaacgtgctgcgggagctggatgatggccagtttgaccaggaggatggagtgacccaggtgacctgcatgtag

SEQ ID NO: 239245 - DNA, 1506 bp, Artificial Sequence
  derived and/or modified sequence
atgggctgcggcctgcggaagctggaggaccccgacgacagcagcccaggtaagatcttcagcaccttaaaacgcccccaggttgagaccaagactgagttcgcttacgaatacgttctgctggactttaccctgcaggcatcttctaatccagaggtgataaaaattaacagtatcctcgatatcgtgaccaaggtggaaaactactatttgaaaggttatattgtgggggcaatacaccctgtaatccaacccgtagggcagcgcaagcacctcccagctagttatctgtaccgcgtggttctgttacggctcaagctttccccaaaaaactcagcggctccttcaggccagaggcgacctcgactggttatcgaggagtgtcctctcacctctgaggcccagacaaacgatgctgcgaaagaactgattgaaaagatcaacgtggccgccaaaagaggtatgaaattcgtgggattcatctctcagcattattctccatctaagttttgcaacggaacaaatcatgatggggatatcgaaagcatgcttcacgtgagacacgggtccgacgagaattgtcggagctggaatgaaggcaccctcagcggacagtctagcgaatcgggaattgaggaggagctgcatcacgaaagcggacagtaccaaatggagcagaatggctccccaacttcctctaagtcacgcaaaggcgaggcgagtgataacaagctgtacactgtctttaatgccttcgatgacgatagcacctcctgggcgtaccaagagggaatactttcaatgaaagtgactcgaaaaggcagcgtgatctccacgctcgacgcagattggcttgaactcactaccttttattacaaacaagggctgtcgctaatcgattcttttgtcttctgggaaacttcaaaaggggagcacctacccaagtctttggagggtttcttcatctacgaagaagaaggatctggagtacctggcagcagtcgcaaggggaatgacgccatcgtggtggaacagtggactgtaatcgaaggatgcgagataaaaaccgattacggcccattgcttcacacactggctgagttcgggtggttgttgacttccgtgctccccaccccagtgctccggcatgattcggaaggcaatttggctacaaaacagatcgtgttccttcagcggccagtgatgtggaattctgcagcacaaacgcccgataagaaagctagtcgccacatcaagggagaagacaaaaacaaggccacatcccgtagcattgggttagacactacctcaagccagcctgcagagtctcggcacctaccagaggaatgtcggctttctccttccagagaatgctggacaaaagagggacggttggctcaacataattcattctctggtttcagctcttcagataacgtcctgcgcgagctcgatgacggccagttcgaccaggaagatggtgtgacacaggtgacttgcatgtag

SEQ ID NO: 239246 - DNA, 1506 bp, Artificial Sequence
  derived and/or modified sequence
atgggatgtggcttaagaaaactcgaagaccctgatgattccagtccaggaaaaattttcagcacgctgaaaaggccacaagtggagaccaagactgagtttgcatatgaatatgtattgctggactttacactgcaagcaagcagcaatcctgaggtgataaaaattaacagcattctcgatatagtgaccaaagttgaaaattattacttaaaaggctacatcgtgggagcaatccacccagttattcagcccgtgggtcagaggaaacacttgcccgcatcctatctgtatcgcgttgtgctgctccggctgaaactctcacctaaaaatagtgccgcacccagcgggcagagaagaccgcgattagtgattgaggagtgtccactaaccagtgaagcgcagacgaacgacgccgcaaaagagctcatagaaaagattaatgtagctgcaaagaggggtatgaagttcgttgggttcatctcacagcactattccccttccaagttctgtaatggaaccaatcatgacggggatatcgagagcatgctgcacgtgcggcatggatccgacgagaattgccgttcatggaacgaaggaactttatccgggcagtccagcgaatccgggattgaggaggagctccaccatgaaagcggacagtaccagatggaacagaatgggtctcctacctcttccaaatcacgtaagggggaagccagcgacaataagctgtataccgtgttcaacgcctttgacgatgattccacgagctgggcctaccaggagggaatcctgtctatgaaggtaaccaggaagggatctgtgatatcgactctcgatgctgattggttggagctcactactttctattataagcagggattgagcctgattgattctttcgtgttctgggagacgagtaagggtgaacatctgcctaagagcctggaagggttctttatctacgaagaggaaggttctggagtcccagggtcttccagaaagggcaacgacgcaatcgttgttgagcagtggactgtcatagaaggatgcgagataaaaacggactatggacctctccttcacacgcttgctgaatttggatggctactgacttcggttctcccgacacctgtacttcgccacgattctgagggcaacctggcaacaaagcaaatcgtttttctgcagcgacccgttatgtggaatagcgctgcccagacgcctgataagaaggcgtcaaggcatattaaaggcgaggacaaaaacaaggcaacctccagatccatcggtctggataccacaagctctcaacccgctgagtctcggcatctgcctgaagagtgtagactaagtccctcgagagagtgctggaccaaagagggcaggctggcacagcataatagtttttctggcttctcatcctccgacaatgtcctgcgggagctcgatgatggccagttcgatcaggaggatggcgtgactcaagttacctgtatgtag

SEQ ID NO: 239247 - DNA, 3251 bp, Artificial Sequence
  derived and/or modified sequence
gagggaaaacagaaaaagaattgtgtgccactatgtctgaatatatcttctacttgtagataattacatccaagttgcccttttgcctttttatttccgtttttggacacctctttttatcatccagccaactggaatagacaaagcaccgctggtgccctgagcgacagaactctggtagggggctggctgtaaattgacgtggcatggaaattctccgctaagttgtagcagcttgcatgtttctctaagatcaagcccagcctcctggagctgtagcttaatcatgggttcaatgactttacagaaaaatggatagaaaaattcttcaactcctttctttggacccagatggttttttttgggttttttttttttttttggtttttgcttttttttttttttttggttatctatagtttagctgaaaacaaaatcaaagcagttaagtctgtaactttctttttgcagcttaaacaacagaatttgctgctctccctcccctttcctgcaatttaattccttacagattttgccatggggtgcggacttagaaagctagaagaccctgatgatagcagccctggaaaaatattttctaccctgaagagaccgcaagtggaaacaaagacagaatttgcttacgaatatgtattgctggattttactctacaagcttcatcaaacccagaagtcatcaagataaattcaattctggatatagtaacaaaagtggaaaactattatcttaaaggatatattgtcggggctattcatcctgttatacaacctgtggggcagcgaaaacacctacctgcaagttacctatacagagtggtgctattgcgcttgaaattaagcccaaagaattcggcagcacccagtggacaaagacgcccaaggctcgtgattgaggaatgtcccctaacttctgaggcacaaacaaatgacgcagcaaaagaactgatagaaaagattaatgtcgctgctaaaagaggaatgaaatttgttggattcatatcacagcattattctccatctaaattctgcaatggaaccaaccatgatggagatatagaatcgatgctacatgtgagacacggttcagatgaaaactgtagaagttggaatgaagggacgttaagtgggcagtcatctgaaagcggaattgaggaagaacttcatcatgaaagtggacagtatcaaatggaacaaaatggcagccctacttcctctaaatcaagaaagggagaagcctcagataacaaattgtatacagtcttcaatgcttttgatgatgattcaacctcctgggcctatcaggaaggcatcctgtcaatgaaagtaacaagaaaaggatcagtcattagtacacttgatgctgattggctggagttaactaccttttattataaacaaggcttgtctttaattgattcttttgtattctgggaaacatctaaaggggaacatttgcctaaatctttggaaggattttttatctatgaagaagaaggttctggagttccaggttctagtaggaaaggaaatgatgccatcgtagtagaacaatggactgttattgagggatgtgaaatcaaaacagattatggccctctgctgcacactctggctgaattcggatggcttctgacaagcgtgttgcccacacctgtattgagacatgacagtgaagggaatttggctacaaagcagatcgtattccttcagaggccagttatgtggaattcagctgctcaaacaccagataagaaagccagccgccacataaaaggtgaagacaagaataaagccactagtagaagcatcggattagacacaacctcgtcacaacctgcagagagcagacacctgcctgaggagtgccgcctttctccctcccgggaatgctggacaaaggagggaaggctggcacagcacaacagcttctctgggttcagcagcagtgacaacgtcctccgggaattagacgacggacagtttgatcaggaagatggagtgactcaggtcacttgtatgtgagccatgaggtgaagcaaaggaaggccctgtaaataattgttaaaatcattgccaactgaccttattgtattactttctctgcatttatgtaatatttttgaatttttccagacccagcctttcctctaatctatgtaaactttggcacaacctcccagacaaggaagaataaccaacatatttatacatttagaatcatgtttacacttctctcaactaaaacatctggttaaacagatgttccattcggttattacacaataatctatttcagcttctcatgaatgtacaaagtagactttcttacaattcctggtaaggagactgaatatctcaatcagtattttacccaattagagagagttctcaggaagttacagtcttatttaagctgaaaaataacctctctctctctttttttttctctctctctcatacacacacacagctaattagtgcaaataaatatctatttcccaaatataataattaatccacattttgtctttaactatagcatgtatatacaaagcaagcccctatgtgttaaaatattttttgaaaaaaatcttttttatgtatctttgcttttaaagggtcatgtcaccaaccctgtactgattcattgtacataaatgttgttgctcctaaaagcctaaaaatgcagacagcaaagcagcatctcttaaaattcaatatgaaaagaacccataatctcaatacataaataccttagtagagagtaagatttaatttttttttattttaaagtccaaatactatgaagaggaaaaatatcaacttcaatttgaaactgaagtcttttacatctgtctagatttgaattctgcttttattttgacttgttaaatcctgaagaatgttgaaacctagaattttcaatctggcaggagtagaaagatgctcatagcacacgcgatatgtatgataacatattttgtttcatcttgcttttctttccccttctaatagaggtggctttgccttgacccagcctttaacaatctttaaaattctacaaaataaaggattttcatttatctatgaaaggcttactttgaaagatggaacctccaagtgaattacaacttattctatcattgatgaattcagcctattatatatttttattaacattgatgttgacattgtaagatcattttaataataaaacatcatttttattg

SEQ ID NO: 239248 - protein, 541 aa, Artificial Sequence
  derived and/or modified sequence
MPRRKQSHPQPVKCEGVKVDTEDSLDEGPGALVLESDLLLGQDLEFEEEEEEEEGDGNSDQLMGFERDSEGDSLGARPGLPYGLSDDESGGGRALSAESEVEEPARGPGEARGERPGPACQLCGGPTGEGPCCGAGGPGGGPLLPPRLLYSCRLCTFVSHYSSHLKRHMQTHSGEKPFRCGRCPYASAQLVNLTRHTRTHTGEKPYRCPHCPFACSSLGNLRRHQRTHAGPPTPPCPTCGFRCCTPRPARPPSPTEQEGAVPRRPEDALLLPDLSLHVPPGGASFLPDCGQLRGEGEGLCGTGSEPLPELLFPWTCRGCGQELEEGEGSRLGAAMCGRCMRGEAGGGASGGPQGPSDKGFACSLCPFATHYPNHLARHMKTHSGEKPFRCARCPYASAHLDNLKRHQRVHTGEKPYKCPLCPYACGNLANLKRHGRIHSGDKPFRCSLCNYSCNQSMNLKRHMLRHTGEKPFRCATCAYTTGHWDNYKRHQKVHGHGGAGGPGLSASEGWAPPHSPPSVLSSRGPPALGTAGSRAVHTDSS

SEQ ID NO: 239249 - protein, 479 aa, Artificial Sequence
  derived and/or modified sequence
MGFERDSEGDSLGARPGLPYGLSDDESGGGRALSAESEVEEPARGPGEARGERPGPACQLCGGPTGEGPCCGAGGPGGGPLLPPRLLYSCRLCTFVSHYSSHLKRHMQTHSGEKPFRCGRCPYASAQLVNLTRHTRTHTGEKPYRCPHCPFACSSLGNLRRHQRTHAGPPTPPCPTCGFRCCTPRPARPPSPTEQEGAVPRRPEDALLLPDLSLHVPPGGASFLPDCGQLRGEGEGLCGTGSEPLPELLFPWTCRGCGQELEEGEGSRLGAAMCGRCMRGEAGGGASGGPQGPSDKGFACSLCPFATHYPNHLARHMKTHSGEKPFRCARCPYASAHLDNLKRHQRVHTGEKPYKCPLCPYACGNLANLKRHGRIHSGDKPFRCSLCNYSCNQSMNLKRHMLRHTGEKPFRCATCAYTTGHWDNYKRHQKVHGHGGAGGPGLSASEGWAPPHSPPSVLSSRGPPALGTAGSRAVHTDSS

SEQ ID NO: 239250 - DNA, 2148 bp, Artificial Sequence
  derived and/or modified sequence
ccatgaatggaagcggcggcggcggcgggagcggcctgagctgggcgccggggccagggccgggggctgcccagggcccgcgccgctgcatgggggcggcccgcgggccctgagaggaagggcagacaggcgggccgagataggaggggcggggtcgggcggccgcaggccggaggcgcgtcgggctggagccggtcacgatgccccgaaggaagcaaagccacccgcagcccgtgaaatgcgagggggtcaaagtggatactgaagactccctcgacgaaggacccggggccctggtattggagagtgatttgctactaggccaggatctggagtttgaggaggaagaggaagaggaggaaggcgacggcaacagtgaccagctcatgggcttcgagagagactcggaaggagactctctgggggccaggcctgggcttccctatgggctgagcgacgatgagtctgggggcggccgggcactaagtgcggagagtgaagttgaggagccagccaggggtccaggggaggccaggggtgagaggccaggcccagcctgccagctgtgtggggggccgacaggtgaggggccgtgttgtggggcaggagggccgggtggggggcccctgctgcccccacggctactgtactcatgccgcctctgcaccttcgtgtcccactactcgagccacctgaagcggcacatgcagacacacagcggagagaagccgttccgctgtggccgctgcccctacgcctcagcccagctcgtcaacctgacacgacatacccgcacccacactggcgagaagccctaccgctgtccccactgcccctttgcctgcagcagcctgggcaacctgaggcggcatcagcgtacccacgcagggccccccactcctccctgcccgacctgtggcttccgctgctgtactccacgaccagcccggcctcccagtcccacagagcaggagggggcggtgccccggcgacctgaagatgctctgctccttccagatttgagcctccatgtgccaccaggtggtgccagtttcctgccagactgtgggcagctgcggggtgaaggggagggcctctgcgggactggatcagaaccactgccagagctgctattcccttggacctgccggggctgtggacaagagctggaggagggtgagggtagtcggctgggagctgccatgtgtgggcgctgcatgcgaggagaggctggagggggtgccagtggggggccccagggccccagtgacaaaggctttgcctgtagcctctgcccctttgccactcactatcccaaccacctggcccggcacatgaagacacacagtggtgagaagcccttccgctgcgcccgctgtccttatgcctctgctcatctggataacctgaaacggcaccagcgcgtccatacaggagagaagccctacaagtgccccctctgcccttatgcctgtggcaatctggccaacctcaagcgtcatggtcgcatccactctggtgacaaaccttttcggtgtagcctttgcaactacagctgcaaccagagcatgaacctcaaacgtcacatgctgcggcacacaggcgagaagcccttccgctgtgccacctgcgcctataccacgggccactgggacaactacaagcgccaccagaaggtgcatggccacggtggggcaggagggcctggtctctctgcctctgagggctgggccccacctcatagcccaccctctgttttgagctctcggggcccaccagccctggggactgctggcagccgggctgtccacacagactcatcctgaactaggtccttcttccccatgttttatacagacggaccagaagccacctttttctcccccgctggccaggggctccacacagactaacgtaggcactataaggaccagcccaaccccatgggcgggggggcccatatggaccaggggaccttgccttgactgaggcacttcacgagctcagtgagaagggccctgtattcacctccactgcccccaggggctgtggacaaaccggctgggggactgcccagcctcccacctgtttatttaacttatttcagtgctttataataaaggaaacactaacaaaaaaaaaaaaaaa

SEQ ID NO: 239251 - DNA, 1626 bp, Artificial Sequence
  derived and/or modified sequence
atgcccagaagaaagcagagccacccccagcccgtgaagtgcgagggcgtgaaggtggacaccgaggacagcctggacgagggccccggcgccctggtgctggagagcgacctgctgctgggccaggacctggagttcgaggaggaggaggaggaggaggagggcgacggcaacagcgaccagctgatgggcttcgagagagacagcgagggcgacagcctgggcgccagacccggcctgccctacggcctgagcgacgacgagagcggcggcggcagagccctgagcgccgagagcgaggtggaggagcccgccagaggccccggcgaggccagaggcgagagacccggccccgcctgccagctgtgcggcggccccaccggcgagggcccctgctgcggcgccggcggccccggcggcggccccctgctgccccccagactgctgtacagctgcagactgtgcaccttcgtgagccactacagcagccacctgaagagacacatgcagacccacagcggcgagaagcccttcagatgcggcagatgcccctacgccagcgcccagctggtgaacctgaccagacacaccagaacccacaccggcgagaagccctacagatgcccccactgccccttcgcctgcagcagcctgggcaacctgagaagacaccagagaacccacgccggcccccccacccccccctgccccacctgcggcttcagatgctgcacccccagacccgccagaccccccagccccaccgagcaggagggcgccgtgcccagaagacccgaggacgccctgctgctgcccgacctgagcctgcacgtgccccccggcggcgccagcttcctgcccgactgcggccagctgagaggcgagggcgagggcctgtgcggcaccggcagcgagcccctgcccgagctgctgttcccctggacctgcagaggctgcggccaggagctggaggagggcgagggcagcagactgggcgccgccatgtgcggcagatgcatgagaggcgaggccggcggcggcgccagcggcggcccccagggccccagcgacaagggcttcgcctgcagcctgtgccccttcgccacccactaccccaaccacctggccagacacatgaagacccacagcggcgagaagcccttcagatgcgccagatgcccctacgccagcgcccacctggacaacctgaagagacaccagagagtgcacaccggcgagaagccctacaagtgccccctgtgcccctacgcctgcggcaacctggccaacctgaagagacacggcagaatccacagcggcgacaagcccttcagatgcagcctgtgcaactacagctgcaaccagagcatgaacctgaagagacacatgctgagacacaccggcgagaagcccttcagatgcgccacctgcgcctacaccaccggccactgggacaactacaagagacaccagaaggtgcacggccacggcggcgccggcggccccggcctgagcgccagcgagggctgggcccccccccacagcccccccagcgtgctgagcagcagaggcccccccgccctgggcaccgccggcagcagagccgtgcacaccgacagcagctag

SEQ ID NO: 239252 - DNA, 1626 bp, Artificial Sequence
  derived and/or modified sequence
atgcctcggagaaagcagtcacaccctcaacctgttaaatgcgagggagtcaaggtcgatacagaggacagtctggatgaagggcctggagctctggtactcgaaagtgatctgttactgggtcaagatctggaatttgaagaggaagaggaggaggaagagggggatggtaatagcgaccaattgatggggttcgagcgggactccgagggagacagtctcggggctagacccggtctgccttacggactcagtgatgacgaatccggaggcggcagggcgctgtcggctgagtccgaggtagaggagccagcccgcgggccaggagaggcacgcggagaacgccctggacccgcatgccagctgtgtggaggcccgaccggcgagggtccttgttgtggtgctggtggccctggcggcggccctttgctgcctccccgccttctctacagttgccgcctatgtaccttcgtaagccattacagtagccatttaaaaagacatatgcagacccatagtggcgaaaagccgtttaggtgcggaagatgtccgtacgctagcgctcagctggtgaacctgacccgccatacgcggacacacaccggtgagaaaccttacaggtgccctcactgtccatttgcctgctcatcactgggaaacttaaggcgccaccaacggacgcatgcgggccccccaacaccaccatgccccacttgcgggttccggtgttgcacgccacggcctgctcggcccccctctcccacagaacaggagggtgcggttcccagacgaccagaggatgctctgcttctccccgacctcagcctccacgttccccccggcggcgcgtcgtttctcccagattgcggccaactgcggggcgagggcgaaggattgtgtggtactggctctgaaccattacctgaactgctctttccttggacatgtagaggatgtggacaagagctggaggaaggagaggggagtaggctgggagcggcaatgtgcggacgctgcatgagaggcgaagctggaggcggcgcatctggcgggccccagggcccttctgacaaaggcttcgcatgttctctgtgcccatttgcgactcattatccaaatcacctagcccggcacatgaaaactcactcgggcgaaaagccgtttcgttgtgcaagatgtccgtatgcatctgctcatctggataacctgaagagacatcagcgggttcataccggggaaaagccctataagtgcccgctctgtccgtacgcttgtggcaatctggctaacctcaagcgccacggtcgaattcattctggagataaacctttccgttgctccttgtgcaactatagttgtaaccagagcatgaatctcaaacgtcatatgctgagacataccggcgagaaaccttttcgatgcgcaacatgcgcatacaccactggccattgggataactacaagaggcaccaaaaggtgcacggacacgggggagctggcggaccagggctgtccgccagtgagggctgggcccctccccacagccctccatcagttcttagtagtagggggcctcctgccctcgggactgccggcagccgtgccgttcatacagatagctcctag

SEQ ID NO: 239253 - DNA, 1626 bp, Artificial Sequence
  derived and/or modified sequence
atgcccaggaggaagcagagccacccccagcctgtgaagtgtgagggcgtgaaggtggacacagaggacagcctggatgagggccctggggccctggtgctggagagtgacctgctgctgggccaggacctggagtttgaggaggaggaggaggaggaggagggagatggcaacagcgaccagctgatgggctttgagcgggacagcgagggggacagcctgggcgcccggcccggcctgccctacggcctgagtgatgatgaaagtggcggcggccgggccctgtctgctgagagcgaggtggaggagcccgcccggggccctggagaggcccggggggagcggcccggccctgcctgccagctgtgtggcggccccactggagagggcccctgctgcggggccggcggccctgggggcggccccctgctgcccccccggctgctgtacagctgccgcctgtgcacctttgtgagccactacagcagccacctgaagaggcacatgcagacccacagcggggagaagcccttccgctgtggccgctgcccctatgccagcgcccagctggtgaacctgaccaggcacaccaggacccacactggagagaagccctaccgctgcccccactgcccctttgcctgcagcagcctgggcaacctgcggcggcaccagaggacccatgctggcccccccaccccaccctgccccacctgtggcttccgctgctgcacccccaggcctgcccggccccccagccccacagagcaggagggcgctgtgcccaggaggccagaagatgccctgctgctgcctgacctgagcctgcacgtgcccccaggaggagccagcttcctgcctgactgtggccagctgcggggggagggggagggcctgtgtggcaccggcagcgagcccctgcctgagctgctcttcccctggacctgccggggctgcggccaggagctggaggagggggagggcagccggctgggcgccgccatgtgtggccgctgcatgagaggagaggccggcggcggggccagcggcggcccccagggccccagcgacaagggctttgcctgcagcctgtgcccctttgccacccactaccccaaccacctggcccggcacatgaagacccacagcggggagaagcccttccgctgtgcccgctgcccctatgccagcgcccacctggacaacctgaagaggcaccagagggtgcacactggagagaagccctacaagtgccccctgtgcccctatgcctgtggcaacctggccaacctgaagagacatggccgcatccacagcggggacaagcccttccgctgcagcctgtgcaactacagctgcaaccagagcatgaacctgaagaggcacatgctgcggcacactggagagaagcccttccgctgtgccacctgtgcctacaccaccggccactgggacaactacaagaggcaccagaaggtgcacggccacggcggggccggcggccctggcctgagcgccagcgagggctgggccccaccccacagcccccccagcgtgctgagcagccggggccccccagccctgggcacagctggcagcagagctgtgcacacagacagcagctag

SEQ ID NO: 239254 - DNA, 1626 bp, Artificial Sequence
  derived and/or modified sequence
atgccccggcggaagcagagccacccccagcccgtgaagtgcgagggagttaaggtggacaccgaggattctctagatgagggccccggtgcgcttgttctcgagtcggatctactccttggccaggacctcgagttcgaggaggaggaggaagaagaagagggagatgggaattcggatcagctgatggggttcgagcgggactctgagggcgattccttgggggcacgacctggtctgccctatgggctgtctgatgatgaaagcggtggggggagagcccttagcgcagagagcgaggttgaggagccagcccggggccccggggaagcaaggggtgagcgcccaggccccgcatgtcagctctgtggaggccccactggcgaaggtccatgctgtggcgccggaggacccggtggcggccccctcttaccccctcgcctgttgtatagttgtcgcctttgtacattcgtctcccactatagcagccacttgaagcggcacatgcagacccattcaggcgagaagccattcagatgcggacgctgcccatacgcttcggcgcaattggtcaacctcactcgccacacgaggacccacaccggggaaaaaccctatcggtgccctcattgcccgttcgcctgctcttctctaggcaatcttaggcgccatcaacggacccacgcaggccctcctacccctccctgccccacttgcgggttccggtgttgtacaccacgtccagctaggcctccaagtcctacagaacaagagggtgccgtgcccagaagaccagaagatgcattgttgttgccggatctctcgctccacgttccccccggtggggcaagtttcctgccagattgcggacagctgcggggagagggcgaggggctctgcgggacaggctctgagccattgcctgaactgttatttccttggacatgccgcggttgtggacaggagttagaagagggcgaaggctcgcgactgggcgccgctatgtgcggcagatgtatgcggggggaggccgggggcggagccagcggcggccctcaaggcccatcggacaagggcttcgcctgtagcctgtgcccgttcgcaacccattacccgaaccatctggctagacatatgaaaacccactcaggggaaaaacctttccggtgcgccaggtgcccatacgccagcgcccacctcgataacctgaagagacatcagcgcgtacatactggtgagaagccgtacaaatgccctctttgtccctatgcgtgtggtaatctcgcaaaccttaagcgtcacgggcgcatccattcaggagacaaaccgtttcgctgctccctctgcaattacagctgcaaccagagcatgaacctcaagaggcatatgctccgacacactggggaaaaaccattcaggtgcgccacttgtgcctacaccaccggccactgggacaactacaaacgccatcagaaggttcacggacatggtggagcaggcggacccggactgtctgcgagcgagggatgggcccctccacattcccccccatcagtcctgagtagccggggtccgcccgcgctcggaacggccgggtctagggccgtgcacaccgattccagttag

SEQ ID NO: 239255 - DNA, 1626 bp, Artificial Sequence
  derived and/or modified sequence
atgcctcgtagaaaacagagtcatccccagccagttaaatgtgagggagttaaggttgacaccgaggacagtctcgatgaaggaccgggagccctggtgctggagtctgatttattactcggacaggatctggagtttgaggaggaagaggaagaagaggagggcgatggaaactcagatcaactcatgggctttgaacgggactccgagggcgatagtctgggtgctcgccctgggctcccctacggactgtctgacgacgagtccggcggaggtcgcgctctctctgctgagtctgaagtggaggaacctgctcgaggacccggagaggcacgtggtgaaagacccggacctgcatgtcagctgtgtggcggaccgacaggagaaggcccatgctgcggcgcaggaggaccaggagggggtcccctgctcccgcctcgcctgttgtatagttgccgattatgcacatttgtcagccactactccagccacctgaaacgccatatgcagacacactccggtgagaagccattcagatgcgggagatgcccttacgcctctgctcagctggttaatctcacccggcatactaggacacatacgggcgagaaaccctaccggtgcccacactgcccctttgcctgtagtagcctgggaaacctccggagacaccagaggacacacgctggtcctccaactcctccatgtcccacctgcgggttccggtgttgcacgccccgtccggctaggccaccgtcgccaaccgagcaagaaggggcagtcccgagacggccagaggacgcactgcttctccctgacctgtcattgcatgtgccaccgggtggagcatcttttctccccgattgcgggcagctgcggggagagggggagggactgtgcggcaccggctcagagccgctgccagagctcttgttcccatggacatgcaggggttgcggccaagagctcgaggagggggagggctctaggctcggggctgccatgtgcggaagatgtatgagaggcgaggctggtggaggtgcttcagggggaccgcaggggccatcagataaaggttttgcctgctcgttatgtcctttcgccacccattaccctaatcatctggcaagacatatgaaaacccattctggggaaaaaccttttaggtgtgcaagatgcccttatgcatctgcccaccttgacaacctaaaacgtcaccagagggtacatactggagagaagccgtacaagtgtcccctgtgcccctacgcctgcggaaacttggccaatctgaaaaggcatggacgaatccattccggagataaaccctttcggtgctcgctctgtaattacagctgtaaccagagtatgaacttgaagcgccacatgttacgtcacaccggcgagaagccattccggtgtgccacctgcgcctacacgactggtcactgggacaactacaaaaggcaccagaaagtgcacgggcatggcggtgctggcggacctggactgagcgcgtccgagggctgggcccctcctcactcgcccccatccgtactctcttcccgcggaccccctgctttaggaaccgcaggctcacgcgctgttcacactgactcaagttag

SEQ ID NO: 239256 - DNA, 2139 bp, Artificial Sequence
  derived and/or modified sequence
catgaatggaagcggcggcggcggcgggagcggcctgagctgggcgccggggccagggccgggggctgcccagggcccgcgccgctgcatgggggcggcccgcgggccctgagaggaagggcagacaggcgggccgagataggaggggcggggtcgggcggccgcaggccggaggcgcgtcgggctggagccggtcacgatgccccgaaggaagcaaagccacccgcagcccgtgaaatgcgagggggtcaaagtggatactgaagactccctcgacgaaggacccggggccctggtattggagagtgatttgctactaggccaggatctggagtttgaggaggaagaggaagaggaggaaggcgacggcaacagtgaccagctcatgggcttcgagagagactcggaaggagactctctgggggccaggcctgggcttccctatgggctgagcgacgatgagtctgggggcggccgggcactaagtgcggagagtgaagttgaggagccagccaggggtccaggggaggccaggggtgagaggccaggcccagcctgccagctgtgtggggggccgacaggtgaggggccgtgttgtggggcaggagggccgggtggggggcccctgctgcccccacggctactgtactcatgccgcctctgcaccttcgtgtcccactactcgagccacctgaagcggcacatgcagacacacagcggagagaagccgttccgctgtggccgctgcccctacgcctcagcccagctcgtcaacctgacacgacatacccgcacccacactggcgagaagccctaccgctgtccccactgcccctttgcctgcagcagcctgggcaacctgaggcggcatcagcgtacccacgcagggccccccactcctccctgcccgacctgtggcttccgctgctgtactccacgaccagcccggcctcccagtcccacagagcaggagggggcggtgccccggcgacctgaagatgctctgctccttccagatttgagcctccatgtgccaccaggtggtgccagtttcctgccagactgtgggcagctgcggggtgaaggggagggcctctgcgggactggatcagaaccactgccagagctgctattcccttggacctgccggggctgtggacaagagctggaggagggtgagggtagtcggctgggagctgccatgtgtgggcgctgcatgcgaggagaggctggagggggtgccagtggggggccccagggccccagtgacaaaggctttgcctgtagcctctgcccctttgccactcactatcccaaccacctggcccggcacatgaagacacacagtggtgagaagcccttccgctgcgcccgctgtccttatgcctctgctcatctggataacctgaaacggcaccagcgcgtccatacaggagagaagccctacaagtgccccctctgcccttatgcctgtggcaatctggccaacctcaagcgtcatggtcgcatccactctggtgacaaaccttttcggtgtagcctttgcaactacagctgcaaccagagcatgaacctcaaacgtcacatgctgcggcacacaggcgagaagcccttccgctgtgccacctgcgcctataccacgggccactgggacaactacaagcgccaccagaaggtgcatggccacggtggggcaggagggcctggtctctctgcctctgagggctgggccccacctcatagcccaccctctgttttgagctctcggggcccaccagccctggggactgctggcagccgggctgtccacacagactcatcctgaactaggtccttcttccccatgttttatacagacggaccagaagccacctttttctcccccgctggccaggggctccacacagactaacgtaggcactataaggaccagcccaaccccatgggcgggggggcccatatggaccaggggaccttgccttgactgaggcacttcacgagctcagtgagaagggccctgtattcacctccactgcccccaggggctgtggacaaaccggctgggggactgcccagcctcccacctgtttatttaacttatttcagtgctttataataaaggaaacactaacaaagcca

SEQ ID NO: 239257 - DNA, 2077 bp, Artificial Sequence
  derived and/or modified sequence
aggagcgggggtggggtcagtggagtgggctcaggtcagggtggagggggactcctgagggatgaagtgggcgatccagactcctagcttcccaccgaggcactaagggaatcagagtgggtcagcgagtacgggaagtgtggtccacgagggctggttcctgagggagaatccacaagccccctcccctcttcagtggatactgaagactccctcgacgaaggacccggggccctggtattggagagtgatttgctactaggccaggatctggagtttgaggaggaagaggaagaggaggaaggcgacggcaacagtgaccagctcatgggcttcgagagagactcggaaggagactctctgggggccaggcctgggcttccctatgggctgagcgacgatgagtctgggggcggccgggcactaagtgcggagagtgaagttgaggagccagccaggggtccaggggaggccaggggtgagaggccaggcccagcctgccagctgtgtggggggccgacaggtgaggggccgtgttgtggggcaggagggccgggtggggggcccctgctgcccccacggctactgtactcatgccgcctctgcaccttcgtgtcccactactcgagccacctgaagcggcacatgcagacacacagcggagagaagccgttccgctgtggccgctgcccctacgcctcagcccagctcgtcaacctgacacgacatacccgcacccacactggcgagaagccctaccgctgtccccactgcccctttgcctgcagcagcctgggcaacctgaggcggcatcagcgtacccacgcagggccccccactcctccctgcccgacctgtggcttccgctgctgtactccacgaccagcccggcctcccagtcccacagagcaggagggggcggtgccccggcgacctgaagatgctctgctccttccagatttgagcctccatgtgccaccaggtggtgccagtttcctgccagactgtgggcagctgcggggtgaaggggagggcctctgcgggactggatcagaaccactgccagagctgctattcccttggacctgccggggctgtggacaagagctggaggagggtgagggtagtcggctgggagctgccatgtgtgggcgctgcatgcgaggagaggctggagggggtgccagtggggggccccagggccccagtgacaaaggctttgcctgtagcctctgcccctttgccactcactatcccaaccacctggcccggcacatgaagacacacagtggtgagaagcccttccgctgcgcccgctgtccttatgcctctgctcatctggataacctgaaacggcaccagcgcgtccatacaggagagaagccctacaagtgccccctctgcccttatgcctgtggcaatctggccaacctcaagcgtcatggtcgcatccactctggtgacaaaccttttcggtgtagcctttgcaactacagctgcaaccagagcatgaacctcaaacgtcacatgctgcggcacacaggcgagaagcccttccgctgtgccacctgcgcctataccacgggccactgggacaactacaagcgccaccagaaggtgcatggccacggtggggcaggagggcctggtctctctgcctctgagggctgggccccacctcatagcccaccctctgttttgagctctcggggcccaccagccctggggactgctggcagccgggctgtccacacagactcatcctgaactaggtccttcttccccatgttttatacagacggaccagaagccacctttttctcccccgctggccaggggctccacacagactaacgtaggcactataaggaccagcccaaccccatgggcgggggggcccatatggaccaggggaccttgccttgactgaggcacttcacgagctcagtgagaagggccctgtattcacctccactgcccccaggggctgtggacaaaccggctgggggactgcccagcctcccacctgtttatttaacttatttcagtgctttataataaaggaaacactaacaaa

SEQ ID NO: 239258 - protein, 229 aa, Artificial Sequence
  derived and/or modified sequence
MRLNIAIFFGALFGALGVLLFLVAFGSDYWLLATEVGRCSGEKNIENVTFHHEGFFWRCWFNGIVEENDSNIWKFWYTNQPPSKNCTHAYLSPYPFMRGEHNSTSYDSAVIYRGFWAVLMLLGVVAVVIASFLIICAAPFASHFLYKAGGGSYIAAGILFSLVVMLYVIWVQAVADMESYRNMKMKDCLDFTPSVLYGWSFFLAPAGIFFSLLAGLLFLVVGWHIQIHH

SEQ ID NO: 239259 - DNA, 690 bp, Artificial Sequence
  derived and/or modified sequence
atgagactgaacatcgccatcttcttcggcgccctgttcggcgccctgggcgtgctgctgttcctggtggccttcggcagcgactactggctgctggccaccgaggtgggcagatgcagcggcgagaagaacatcgagaacgtgaccttccaccacgagggcttcttctggagatgctggttcaacggcatcgtggaggagaacgacagcaacatctggaagttctggtacaccaaccagccccccagcaagaactgcacccacgcctacctgagcccctaccccttcatgagaggcgagcacaacagcaccagctacgacagcgccgtgatctacagaggcttctgggccgtgctgatgctgctgggcgtggtggccgtggtgatcgccagcttcctgatcatctgcgccgcccccttcgccagccacttcctgtacaaggccggcggcggcagctacatcgccgccggcatcctgttcagcctggtggtgatgctgtacgtgatctgggtgcaggccgtggccgacatggagagctacagaaacatgaagatgaaggactgcctggacttcacccccagcgtgctgtacggctggagcttcttcctggcccccgccggcatcttcttcagcctgctggccggcctgctgttcctggtggtgggctggcacatccagatccaccactag

SEQ ID NO: 239260 - DNA, 690 bp, Artificial Sequence
  derived and/or modified sequence
atgagactgaatatcgctatattcttcggggccctgttcggggcactcggagtgttgctgtttcttgttgcctttggcagtgactactggctcctcgccactgaggttgggcgctgtagtggtgagaaaaacatcgagaatgtaacattccatcacgaaggattcttttggaggtgttggtttaatgggattgttgaagaaaatgattctaatatctggaaattctggtacaccaaccagccaccttccaaaaactgcacccacgcttacctctctccttatccctttatgcgcggcgagcataacagtacaagctatgacagtgcagtgatatacagaggtttctgggcagttctgatgttattaggcgtggtggcagtcgtgatcgcctccttcctgatcatctgcgccgcacctttcgcttctcactttctgtacaaagctggtggaggctcgtatatcgccgctgggatcctgttttcactggtggtcatgttatacgtgatatgggtgcaggcggtggccgatatggaatcttaccgcaatatgaagatgaaggattgtcttgattttactccttctgtcctttacggttggagctttttccttgccccagcaggaatctttttctcactgttggctggcctgttgtttctggtggtggggtggcacattcagatccaccattag

SEQ ID NO: 239261 - DNA, 690 bp, Artificial Sequence
  derived and/or modified sequence
atgaggctgaacatcgccatcttctttggagccctgtttggagccctgggcgtgctgctcttcctggtggcctttggaagtgactactggctgctggccacagaggtgggccgctgcagcggggagaagaacattgaaaatgtgaccttccaccacgagggcttcttctggcgctgctggttcaacggcatcgtggaggagaatgacagcaacatctggaagttctggtacaccaaccagccccccagcaagaactgcacccacgcctacctgagcccctaccccttcatgagaggagagcacaacagcaccagctatgacagcgctgtgatctaccggggcttctgggccgtgctgatgctgctgggcgtggtggccgtggtgattgccagcttcctgatcatctgtgccgccccctttgccagccacttcctgtacaaggccggcggcggcagctacatcgccgccggcatcctcttcagcctggtggtgatgctgtatgtgatctgggtgcaggccgtggccgacatggagagctacagaaacatgaagatgaaggactgcctggacttcacccccagcgtgctgtatggctggagcttcttcctggccccagctggcatcttcttcagcctgctggccggcctgctcttcctggtggtgggctggcacatccagatccaccactag

SEQ ID NO: 239262 - DNA, 690 bp, Artificial Sequence
  derived and/or modified sequence
atgcggctgaacatcgccatcttcttcggcgccctgttcggcgccttaggagtgttgctcttcttagtggccttcggatccgactattggctcctagccacagaggtagggcggtgctcgggcgaaaaaaatatcgagaacgtaacattccaccacgaggggtttttctggaggtgctggttcaatggaatagtcgaggaaaatgactcaaatatttggaagttttggtacacaaatcagccaccctctaaaaattgtactcacgcttacctgagtccttatcctttcatgcggggggagcataattctacttcatatgactctgccgttatttatcggggcttctgggcagtcctgatgctactaggggtggttgctgtggttatcgcctctttcttgataatttgtgccgcccccttcgccagccacttcctatacaaagcgggaggcggaagctatatcgcagccggcatcttgttttctctggttgtgatgctttacgtaatctgggttcaggctgtcgccgatatggagagctaccgtaatatgaagatgaaagactgtctggattttaccccatctgttctttatgggtggtcgtttttcctcgcgccagccggaatttttttctcgctgctggcgggcctcttgttcttagtggttggctggcacattcagatccaccattag

SEQ ID NO: 239263 - DNA, 690 bp, Artificial Sequence
  derived and/or modified sequence
atgcgcttgaacattgccatcttcttcggggcactgtttggcgcactcggcgttttgctctttctcgtcgcttttggctccgactattggttactggcgactgaggtcggccgatgcagcggagagaagaatatcgaaaacgtgacttttcatcatgagggctttttctggcggtgctggttcaatggcattgtggaggaaaacgactcaaatatctggaagttctggtatactaaccaacccccaagcaaaaattgtacccatgcatatctgagcccataccctttcatgcgcggagagcataactcaaccagctatgactcagcagtaatctacaggggattttgggcagtgctgatgctgttgggagtagtagctgtcgttatcgcctcttttcttataatatgcgcagcaccattcgcatcacattttttgtacaaagctgggggaggaagttacatagcggctgggatcctcttctcactggtggttatgctgtacgtgatctgggtacaggctgttgccgatatggagtcctaccgcaatatgaaaatgaaggattgcctggacttcacaccatctgtactgtacggctggagcttttttctcgcccctgcgggaattttcttttctcttctcgccggattgctgttcctcgttgtgggatggcatatccaaatccaccactag

SEQ ID NO: 239264 - DNA, 3593 bp, Artificial Sequence
  derived and/or modified sequence
ggcgagcaaagggaatatgaatctgccggtggggcgtgagcgagaagccaccaaaacatgagctaggacagccttctcaagaagattctgccaactcaaaaatattattcttttttttttttttttgctgttgtttctgagaaactaggtgtcttaccattttaaaatttcatattttatttaaaaggaaaccagtgaattgaaaatgagactaaatatcgctatcttctttggagctctctttggtgctttgggggtgttactctttttggtggcttttggatcggattattggcttcttgcaactgaagtggggagatgttcaggtgaaaagaatatagagaacgtcacttttcaccatgaagggttcttctggaggtgttggtttaatgggattgtggaagagaatgactccaatatttggaagttctggtacaccaatcagccaccgtccaagaactgcacacatgcttacctgtctccgtaccccttcatgagaggcgagcacaactcgacctcctatgactctgcagttatttaccgtggtttctgggcagtcctgatgctcctgggggtagttgctgtagtcatcgcaagctttttgatcatctgtgcagcccccttcgccagccattttctctacaaagctgggggaggctcatatattgctgcaggcatcctattttcattggtggtgatgctgtatgtcatctgggtccaggcagtggctgacatggaaagctaccgaaacatgaaaatgaaggactgcctggatttcaccccttctgttctgtatggctggtcatttttcctggccccagctgggatatttttttctttgctagctggattactatttctggttgttggatggcatattcagatacatcactaaatcaactgttgccacaagtattttcttgagagattttaaaacaaggaatactttttttccattttgtttcattgatcccagcataaagttagtagatataactttttagttgctattcaaattaatcattttactaaaattttcttcagtaagaaggtcctagaatctctccagacaccagcaagcctctatcttgtctaagtgctgtcaaggacctagttctttagggaataggtaaacaggtctccctttcattgaacatgttagagttcatgcaggtcgcaaaggcctgataatagcttaataccatgacatggggaaaatctcgatagatttggcttaaagtctccttggcattcacttctgctaattaaaaaaaatccttgaagaataattaagaatgggcaaggttgtcagagaatttattttgtttcttgcccacacagataatatccacatacacattcactggctcttgtgagcaaatgaatttaaaaatagacagcagttgttctaattagtgggagccatgtactcaccagttaaaatgggccacaacaaacaagactgagagcatgtacttatcttgctttttcaccaacagtggtttggttacctagttttattcacttaattgtgcatgcttacataaactttaaactacatttaaaactagcaaatctgcataccaaattatgtataacgtagattgaatttttatgaacttaaagtgagttaattgtataatgtaatattgtttaaaatatgtaaaaaccaagcatttccgcttggtccataattctatttgatattttaaaattctcatttaaaaattatattgctatcattcagcatgtgaaaatttattgataaaatgtgattttaatattttttagatataaactttcaacgtacttccatatgaggattataatagccctgctttattaaagaccataaaatattaactttccccaagatgttatgggttccagttcttctgatcatttgattcctttaattactgtccctcaatttcttcatctttacaatagatatattaacatttacagatcgactatttcctttaacctcctagaagaaagtttttgtggggaaagatgattctgtattattcagtagcatagacattttgcatatcaaagatgttcatttggcactaatgttgattgaaatcaaatccatctgagatgcctagctcgtatttgcattctggaagcctccatcgcaggggagctcggcagggtatgtgagctttgttggaggtgcggtgtttcattctgcagctgttgtgaggacagagaggcatggcccacaggcaaaaaaagtcaccacccagaagatgctctgggatagaggaactgctccttttcatcagctcttccaatgccgtgggagaggtgatcccagtcttctctgtacatcttgtgcttttccattaagacttgttccagtgggaaggagctttggaaaaattgcaaaggtctgaatcttcagggcattttcatgacaggacttgccaataataataataataataataataataataataataaagctccagaggcctaactggtttctcaagtcatttcagtgatatcattgaaacgtttttgtggtacttccctttgtctttcactgtttcatttttatattgcttcatttacttctttgcttttggctttgttattagaaaaaataattatgaggtctgttgtgcatgttgactgtgatattaagttatggcatgccattaagttttccagacgatgttggatgtatctgattagttcatgtcatctgtaaatacaattcttttttgtagtactttggaatggagcctttttctggtgtactgtatgccatttaagtttcacatacaagctgctttcggcaaaggcttgaatatttataaatttcagatggttatcctcactttatagtacacttaagtggctaccatatattttttatatgacaattggctgaatagctgatgtgtatgacacttttacacagatttgcactttggaactattttatagttgtaatgcatcaatcaaatacatttcaagcacatttcttgatcaatttaccagcaaccctctgaaggaatgaaggagagttgtgattgctatgtcaatgagtgaaatatacttaaaaatggcagagttatatagtacattattgtagcaaccttatatctgatttgagatactgtgttgccaaatgtccatgttatgtttatttctctattggttgtatttattaatttttagaagcctttaaactgtgttagaatctttttgaaaaatgttgattttgcatcataaagtttcaatttatcaaggatatcttttcagttacacttttagaaagagtgaataaaaagggcagtgagttatgctcttggacttggtgaaagctatcatctctccatattgtatttgttcagctggtttaattcactcaggtggatgattgcacatacattggaattggctggagagactacacagagaagtttaatgatcgtgtacaatttgagggttgatggtagggctttctaaaaaaagtaatatcaagtgtgttgttagtattcatttagtcatttttattactaatctataaatatatttattaaatttgaagattaaatggaattataaaggaa

SEQ ID NO: 239265 - protein, 1107 aa, Artificial Sequence
  derived and/or modified sequence
MPVMKGLLAPQNTFLDTIATRFDGTHSNFILANAQVAKGFPIVYCSDGFCELAGFARTEVMQKSCSCKFLFGVETNEQLMLQIEKSLEEKTEFKGEIMFYKKNGSPFWCLLDIVPIKNEKGDVVLFLASFKDITDTKVKITPEDKKEDKVKGRSRAGTHFDSARRRSRAVLYHISGHLQRREKNKLKINNNVFVDKPAFPEYKVSDAKKSKFILLHFSTFKAGWDWLILLATFYVAVTVPYNVCFIGNDDLSTTRSTTVSDIAVEILFIIDIILNFRTTYVSKSGQVIFEARSICIHYVTTWFIIDLIAALPFDLLYAFNVTVVSLVHLLKTVRLLRLLRLLQKLDRYSQHSTIVLTLLMSMFALLAHWMACIWYVIGKMEREDNSLLKWEVGWLHELGKRLESPYYGNNTLGGPSIRSAYIAALYFTLSSLTSVGFGNVSANTDAEKIFSICTMLIGALMHALVFGNVTAIIQRMYSRWSLYHTRTKDLKDFIRVHHLPQQLKQRMLEYFQTTWSVNNGIDSNELLKDFPDELRSDITMHLNKEILQLSLFECASRGCLRSLSLHIKTSFCAPGEYLLRQGDALQAIYFVCSGSMEVLKDSMVLAILGKGDLIGANLSIKDQVIKTNADVKALTYCDLQCIILKGLFEVLDLYPEYAHKFVEDIQHDLTYNLREGHESDVISRLSNKSMVSQSEPKGNGNINKRLPSIVEDEEEEEEGEEEEAVSLSPICTRGSSSRNKKVGSNKAYLGLSLKQLASGTVPFHSPIRVSRSNSPKTKQEIDPPNHNKRKEKNLKLQLSTLNNAGPPDLSPRIVDGIEDGNSSEESQTFDFGSERIRSEPRISPPLGDPEIGAAVLFIKAEETKQQINKLNSEVTTLTQEVSQLGKDMRNVIQLLENVLSPQQPSRFCSLHSTSVCPSRESLQTRTSWSAHQPCLHLQTGGAAYTQAQLCSSNITSDIWSVDPSSVGSSPQRTGAHEQNPADSELYHSPSLDYSPSHYQVVQEGHLQFLRCISPHSDSTLTPLQSISATLSSSVCSSSETSLHLVLPSRSEEGSFSQGTVSSFSLENLPGSWNQEGMASASTKPLENLPLEVVTSTAEVKDNKAINV

SEQ ID NO: 239266 - DNA, 3324 bp, Artificial Sequence
  derived and/or modified sequence
atgcccgtgatgaagggcctgctggccccccagaacaccttcctggacaccatcgccaccagattcgacggcacccacagcaacttcatcctggccaacgcccaggtggccaagggcttccccatcgtgtactgcagcgacggcttctgcgagctggccggcttcgccagaaccgaggtgatgcagaagagctgcagctgcaagttcctgttcggcgtggagaccaacgagcagctgatgctgcagatcgagaagagcctggaggagaagaccgagttcaagggcgagatcatgttctacaagaagaacggcagccccttctggtgcctgctggacatcgtgcccatcaagaacgagaagggcgacgtggtgctgttcctggccagcttcaaggacatcaccgacaccaaggtgaagatcacccccgaggacaagaaggaggacaaggtgaagggcagaagcagagccggcacccacttcgacagcgccagaagaagaagcagagccgtgctgtaccacatcagcggccacctgcagagaagagagaagaacaagctgaagatcaacaacaacgtgttcgtggacaagcccgccttccccgagtacaaggtgagcgacgccaagaagagcaagttcatcctgctgcacttcagcaccttcaaggccggctgggactggctgatcctgctggccaccttctacgtggccgtgaccgtgccctacaacgtgtgcttcatcggcaacgacgacctgagcaccaccagaagcaccaccgtgagcgacatcgccgtggagatcctgttcatcatcgacatcatcctgaacttcagaaccacctacgtgagcaagagcggccaggtgatcttcgaggccagaagcatctgcatccactacgtgaccacctggttcatcatcgacctgatcgccgccctgcccttcgacctgctgtacgccttcaacgtgaccgtggtgagcctggtgcacctgctgaagaccgtgagactgctgagactgctgagactgctgcagaagctggacagatacagccagcacagcaccatcgtgctgaccctgctgatgagcatgttcgccctgctggcccactggatggcctgcatctggtacgtgatcggcaagatggagagagaggacaacagcctgctgaagtgggaggtgggctggctgcacgagctgggcaagagactggagagcccctactacggcaacaacaccctgggcggccccagcatcagaagcgcctacatcgccgccctgtacttcaccctgagcagcctgaccagcgtgggcttcggcaacgtgagcgccaacaccgacgccgagaagatcttcagcatctgcaccatgctgatcggcgccctgatgcacgccctggtgttcggcaacgtgaccgccatcatccagagaatgtacagcagatggagcctgtaccacaccagaaccaaggacctgaaggacttcatcagagtgcaccacctgccccagcagctgaagcagagaatgctggagtacttccagaccacctggagcgtgaacaacggcatcgacagcaacgagctgctgaaggacttccccgacgagctgagaagcgacatcaccatgcacctgaacaaggagatcctgcagctgagcctgttcgagtgcgccagcagaggctgcctgagaagcctgagcctgcacatcaagaccagcttctgcgcccccggcgagtacctgctgagacagggcgacgccctgcaggccatctacttcgtgtgcagcggcagcatggaggtgctgaaggacagcatggtgctggccatcctgggcaagggcgacctgatcggcgccaacctgagcatcaaggaccaggtgatcaagaccaacgccgacgtgaaggccctgacctactgcgacctgcagtgcatcatcctgaagggcctgttcgaggtgctggacctgtaccccgagtacgcccacaagttcgtggaggacatccagcacgacctgacctacaacctgagagagggccacgagagcgacgtgatcagcagactgagcaacaagagcatggtgagccagagcgagcccaagggcaacggcaacatcaacaagagactgcccagcatcgtggaggacgaggaggaggaggaggagggcgaggaggaggaggccgtgagcctgagccccatctgcaccagaggcagcagcagcagaaacaagaaggtgggcagcaacaaggcctacctgggcctgagcctgaagcagctggccagcggcaccgtgcccttccacagccccatcagagtgagcagaagcaacagccccaagaccaagcaggagatcgacccccccaaccacaacaagagaaaggagaagaacctgaagctgcagctgagcaccctgaacaacgccggcccccccgacctgagccccagaatcgtggacggcatcgaggacggcaacagcagcgaggagagccagaccttcgacttcggcagcgagagaatcagaagcgagcccagaatcagcccccccctgggcgaccccgagatcggcgccgccgtgctgttcatcaaggccgaggagaccaagcagcagatcaacaagctgaacagcgaggtgaccaccctgacccaggaggtgagccagctgggcaaggacatgagaaacgtgatccagctgctggagaacgtgctgagcccccagcagcccagcagattctgcagcctgcacagcaccagcgtgtgccccagcagagagagcctgcagaccagaaccagctggagcgcccaccagccctgcctgcacctgcagaccggcggcgccgcctacacccaggcccagctgtgcagcagcaacatcaccagcgacatctggagcgtggaccccagcagcgtgggcagcagcccccagagaaccggcgcccacgagcagaaccccgccgacagcgagctgtaccacagccccagcctggactacagccccagccactaccaggtggtgcaggagggccacctgcagttcctgagatgcatcagcccccacagcgacagcaccctgacccccctgcagagcatcagcgccaccctgagcagcagcgtgtgcagcagcagcgagaccagcctgcacctggtgctgcccagcagaagcgaggagggcagcttcagccagggcaccgtgagcagcttcagcctggagaacctgcccggcagctggaaccaggagggcatggccagcgccagcaccaagcccctggagaacctgcccctggaggtggtgaccagcaccgccgaggtgaaggacaacaaggccatcaacgtgtag

SEQ ID NO: 239267 - DNA, 3324 bp, Artificial Sequence
  derived and/or modified sequence
atgcctgtgatgaaagggttgcttgcccctcagaacaccttcctcgacacaatcgctacgcgattcgacggcacccacagcaactttattctggcaaatgctcaagtcgccaagggcttccctattgtgtactgttccgatggtttctgcgagctcgcaggattcgccaggaccgaggtgatgcagaagagctgctcttgtaagtttctgttcggagtcgagacgaatgaacagttaatgctccaaatcgagaaatccctagaggaaaagaccgagtttaagggagagattatgttttacaagaagaatggctcacctttctggtgcctgttggatattgtccccattaagaacgagaaaggcgacgtggtgttgttcctcgcttcctttaaggacatcaccgacaccaaagttaaaattaccccagaggataaaaaggaagataaggtcaaggggcgctcccgggcgggaactcatttcgattcagcaagacgccgcagccgagctgtattgtaccatattagcggtcatctgcaacgtcgtgaaaaaaataagcttaaaattaataacaacgttttcgtggataagcccgcatttcccgaatacaaagtgagcgacgccaaaaagtctaagttcatcttgctccacttcagtactttcaaggcaggttgggattggctgatattgctggccacgttctatgtcgcagtgaccgttccctataacgtttgctttatcggcaatgatgacttgtcgacaaccagatccaccaccgtgtcagatattgccgtggaaatcctctttataatcgatatcattttaaactttcggactacttatgtttctaagtctggtcaggtaatctttgaagccagatccatttgcattcattacgttaccacctggtttatcatagatctgatcgctgctctgcccttcgaccttctttatgcttttaatgtcacagtcgtgagccttgttcatcttctcaaaaccgtgcgattgctgcgtcttctgcggcttctacaaaaactcgatcgatattcacagcacagcacaattgtcttgaccctcctgatgtctatgttcgccctcttggcccactggatggcatgcatttggtacgtgataggcaagatggaacgcgaagataactcattactgaagtgggaagtaggctggctgcacgaactcggaaagcgcttagagtccccgtactatgggaacaatacgctcggtggacccagtattcgaagtgcttatatagcagccctgtatttcaccctcagttcactgaccagcgtggggtttggcaatgtgtcagcaaataccgatgctgaaaagattttcagtatttgtacaatgttaattggcgctcttatgcatgccttagtcttcggtaacgtgactgccattatccaacggatgtattccaggtggagtctgtatcacacacgcacgaaggacctgaaggactttattagggtgcaccacctccctcagcagcttaagcagagaatgcttgaatatttccagacgacgtggagcgtgaataatggaattgacagcaacgaactgctgaaggacttccccgatgaactcaggtcagacatcactatgcatctgaacaaggaaatcctacagctttctttgtttgaatgtgctagccgagggtgtctgcgatcgctgtctttacacatcaaaacttcattttgtgccccaggtgaatatctcttacgccaaggcgatgctttacaggccatttacttcgtatgctcaggtagtatggaggtgctcaaagattccatggtgctggcaattcttggcaaaggcgacttaatcggtgccaacttgtctattaaagaccaggttattaaaaccaacgccgatgtaaaggcccttacttactgcgacttacaatgcattattctaaagggcttattcgaggtgctggatctgtatccagagtacgctcataagtttgttgaggacatccagcacgatctgacgtataaccttagggaaggccacgaatcagacgtgatatcaagactgtccaataagagcatggtgagccagagcgaacctaaaggaaacggcaacattaataagcgtcttccctccattgtcgaggacgaggaggaagaagaggaaggggaggaggaggaggcagtgtccttatctcccatttgcactaggggaagctccagccgaaataaaaaagttggtagtaacaaggcttatcttggcctgtctttaaagcaacttgcatctggcactgtcccatttcactcccctatccgggtgtccaggagcaactcaccaaaaaccaaacaggagattgatcctccgaaccacaataagagaaaggaaaagaacctgaaacttcaactctctacattgaataatgctggcccgcccgacctttccccccgcatcgtcgacggcattgaagatgggaatagtagcgaggaaagtcagacatttgatttcgggagcgagcgaatcagaagcgagcccagaattagcccaccactgggggatccagagatcggcgccgccgtcctctttatcaaagccgaagagaccaaacagcagatcaacaaattaaacagcgaagtgacgacccttactcaggaggtgtcccaactcggcaaggatatgcgcaacgttatacagcttctcgagaacgtactctccccacagcagccttcgcgattctgctccctgcactcaacctctgtgtgcccgtcccgggagagcctccagacaaggacttcttggtcggctcaccagccttgcctccatctgcagacaggaggggcagcatatacccaggctcaattatgctcatcaaacatcacaagcgacatatggtccgtcgatccctcttccgttgggtcctctccacagcgtaccggtgcccacgagcagaaccctgctgacagcgaattatatcacagccccagcctggattactcccctagtcactaccaggtggtacaggaggggcatttgcaatttctgcggtgcatctctccacacagcgacagcactcttactcctctgcagagcatctcggctaccctgtctagctccgtctgttcctcttcagagacaagcttgcacctggtcctgccctcgcgctccgaagaggggtctttttctcaaggtacagtttcttccttctctctagaaaacctgcctgggtcttggaaccaggaaggaatggctagtgctagtaccaagccgctggagaatctgcccctggaggttgtcacctcgacagccgaagtgaaggataataaagccataaatgtttag

SEQ ID NO: 239268 - DNA, 3324 bp, Artificial Sequence
  derived and/or modified sequence
atgcctgtgatgaagggcctgctggccccccagaacaccttcctggacaccatcgccaccaggtttgatggcacccacagcaacttcatcctggccaatgcccaggtggccaagggcttccccatcgtgtactgcagtgatggcttctgtgagctggccggctttgccaggacagaggtgatgcagaagagctgcagctgcaagttcctgtttggagtggagaccaatgagcagctgatgctgcagatcgagaagagcctggaggagaagacagagttcaagggggagatcatgttctacaagaagaatggcagccccttctggtgcctgctggacatcgtgcccatcaagaatgagaagggagatgtggtgctcttcctggccagcttcaaggacatcacagacaccaaggtgaagatcaccccagaggacaagaaggaggacaaggtgaagggccgcagccgggccggcacccactttgacagcgccaggagaagaagcagagctgtgctgtaccacatcagcggccacctgcagaggcgggagaagaacaagctgaagatcaacaacaacgtgtttgtggacaagccagccttccctgagtacaaggtgtctgatgccaagaagagcaagttcatcctgctgcacttcagcaccttcaaggccggctgggactggctgatcctgctggccaccttctacgtggccgtgacagtgccctacaacgtgtgcttcatcggaaatgatgacctgagcaccaccaggagcaccaccgtgtctgacattgctgtggagatcctcttcatcatcgacatcatcctgaacttccgcaccacctacgtgtccaagagcggccaggtgatctttgaggcccggagcatctgcatccactacgtgaccacctggttcatcatcgacctgattgctgccctgccctttgacctgctgtatgccttcaacgtgacagtggtgtccctggtgcacctgctgaagacagtgcggctgctgcggctgctgcggctgctgcagaagctggaccgctacagccagcacagcaccatcgtgctgaccctgctgatgtccatgtttgccctgctggcccactggatggcctgcatctggtacgtgattggcaagatggagcgggaggacaacagcctgctgaagtgggaggtgggctggctgcacgagctgggcaagaggctggagagcccctactacggcaacaacaccctgggcggccccagcatccgcagcgcctacatcgccgccctgtacttcaccctgagcagcctgacctctgtgggctttggaaatgtgtctgccaacacagatgctgagaagatcttcagcatctgcaccatgctgattggagccctgatgcacgccctggtgtttggaaatgtgacagccatcatccagaggatgtacagccgctggagcctgtaccacaccaggaccaaggacctgaaggacttcatccgggtgcaccacctgccccagcagctgaagcagaggatgctggagtacttccagaccacctggagcgtgaacaatggaattgacagcaatgagctgctgaaggacttcccagatgagctgcggagtgacatcaccatgcacctgaacaaggagatcctgcagctgagcctgtttgaatgtgccagccggggctgcctgcggagcctgagcctgcacatcaagaccagcttctgtgcccctggagagtacctgctgcggcagggagatgccctgcaggccatctactttgtgtgcagcggctccatggaggtgctgaaggacagcatggtgctggccatcctgggcaagggggacctgattggagccaacctgagcatcaaggaccaggtgatcaagaccaatgctgatgtgaaggccctgacctactgtgacctgcagtgcatcatcctgaagggcctgtttgaggtgctggacctgtacccagaatatgcccacaagtttgtggaggacatccagcacgacctgacctacaacctgcgggagggccatgaaagtgatgtgatcagccggctgagcaacaagtccatggtgtcccagagcgagcccaagggaaatggaaacatcaacaagaggctgcccagcatcgtggaggatgaggaggaggaggaggagggggaggaggaggaggccgtgtccctgagccccatctgcacccggggcagcagcagcaggaacaagaaggtgggcagcaacaaggcctacctgggcctgagcctgaagcagctggccagcggcaccgtgcccttccacagccccatccgggtgagccgcagcaacagccccaagaccaagcaggagattgatcctcccaaccacaacaagaggaaggagaagaacctgaagctgcagctgagcaccctgaacaatgccggccccccagacctgagccccagaattgtggatggcattgaagatggcaacagcagcgaggagagccagacctttgattttggaagtgagcgcatccgctctgagccccgcatcagcccccccctgggggaccctgagattggagctgctgtgctcttcatcaaggccgaggagaccaagcagcagatcaacaagctgaacagcgaggtgaccaccctgacccaggaggtgtcccagctgggcaaggacatgagaaatgtcatccagctgctggagaatgtgctgagcccccagcagcccagccgcttctgcagcctgcacagcacctctgtgtgccccagccgggagagcctgcagaccaggacctcctggagcgcccaccagccctgcctgcacctgcagacaggaggagctgcctacacccaggcccagctgtgcagcagcaacatcaccagtgacatctggagcgtggaccccagctctgtgggcagcagcccccagaggactggagcccacgagcagaacccagctgacagcgagctgtaccacagccccagcctggactacagccccagccactaccaggtggtgcaggagggccacctgcagttcctgcgctgcatcagcccccacagcgacagcaccctgacccccctgcagagcatcagcgccaccctgagcagctctgtgtgcagcagcagcgagaccagcctgcacctggtgctgcccagccgctctgaggagggcagcttcagccagggcaccgtgagcagcttcagcctggagaacctgcccggctcctggaaccaggagggcatggccagcgccagcaccaagcccctggagaacctgcccctggaggtggtgaccagcacagctgaggtgaaggacaacaaggccatcaacgtgtag

SEQ ID NO: 239269 - DNA, 3324 bp, Artificial Sequence
  derived and/or modified sequence
atgcccgtgatgaagggcctgctggccccccagaacaccttcctggacaccatcgctacacgttttgatggcacccatagtaattttattctggccaacgcgcaggtcgcaaagggattccctatcgtgtactgtagtgatggattctgcgagctcgcgggattcgcaaggacggaggttatgcagaagtcctgctcttgtaaatttctcttcggagtggagacaaatgaacaattgatgcttcagatcgaaaaaagtctggaagagaaaaccgaattcaaaggcgagattatgttttataaaaaaaacgggtcaccattttggtgcctcctggatattgtccctatcaaaaacgaaaagggagacgtggtattattcttagctagtttcaaagatatcactgatacaaaggtcaaaatcacccccgaggacaagaaggaggacaaggtgaaagggcgctctagggccggtacccatttcgacagtgcccgtcggaggagcagagcagtcctctaccacatcagcggccacctccagaggcgggaaaaaaacaagctcaagattaacaataacgtcttcgtagacaaacctgcttttccagaatataaggtgtcggacgcgaaaaaatcaaaattcattctgctgcacttttcaacatttaaggcggggtgggactggctgattctactagccaccttctacgtcgcagtgactgtcccatataacgtgtgtttcataggtaatgatgacttgtccactactagatccacaaccgtgagtgacatcgccgtcgagatcctgttcattatcgacatcattttgaattttaggacaacttacgtgtctaagagcggccaggtgattttcgaggctcgctctatctgcatccactatgttactacgtggtttattatcgacctgattgctgctctgcctttcgacttactgtacgctttcaacgtaaccgtggtgtcgttggtgcacctcctgaaaacagttagactccttaggttgctgcggctgcttcagaagctcgatcgctactctcagcattctaccatcgttctgacgctattgatgagtatgtttgccttattggcgcactggatggcttgcatatggtatgtcatcgggaagatggaacgtgaggacaactctcttctgaaatgggaagtaggctggctgcatgaactaggcaaacggctggagtccccatattatggcaacaatacattgggaggcccatctatacgtagtgcatatatcgccgccctgtactttacacttagctccctgaccagcgtgggctttggaaacgtctctgccaatacggacgcagaaaaaatatttagcatttgcactatgctcatcggcgccctgatgcacgcccttgtgttcgggaatgttactgctatcattcaaaggatgtattcaagatggagtctctaccatactcgcactaaagatctcaaggattttatcagagtgcaccatctcccccagcagctgaaacagcgaatgttggagtattttcaaactacttggagtgtgaacaacgggatcgactccaacgagctgctgaaggactttcctgatgagttgcggagcgatattaccatgcacctgaataaagagattctgcaattaagcttgttcgagtgtgcgagtcgggggtgcctgagatctttgtcacttcacatcaagacctctttttgtgcccccggagaatacctgctgagacagggggatgccttgcaggcaatctactttgtgtgctctggatctatggaagtgctcaaggactccatggtgttggcaatattgggaaagggagacctaattggagcaaacctctcaatcaaggatcaggtgatcaaaacaaacgccgatgtcaaggcattgacctactgcgatcttcagtgcatcatcttgaaaggcttgtttgaggtactggatctctatcccgaatatgctcacaaattcgtggaggatatccagcacgatttaacctacaatcttagggaagggcacgagtctgatgtgatatcccgattaagcaataaatccatggtgtcacaaagtgaacccaagggtaatggaaatatcaataagcgcctccctagtatcgtggaggatgaagaggaggaagaagaaggtgaggaggaggaagctgtgtccctaagccctatctgcacccgcggctcatcctctcggaacaagaaagttggatctaacaaagcgtacctgggtctaagcctcaagcagctggcaagcgggacggtaccattccattcacccatcagagttagccgttctaattctccaaaaacaaaacaggaaatcgacccacccaatcataataagagaaaggagaaaaacctgaaactccagctgagcacactgaacaacgcagggccaccagacctcagccctagaattgtggacgggatagaggatggaaactcgagcgaggagtcccagacttttgatttcggaagcgagcggataaggagcgaacctcgaatatcaccacccttaggcgaccccgagatcggagctgcggtgctctttattaaagctgaggaaacaaagcagcaaatcaacaagctgaacagtgaggtgaccacactgacccaggaagtttcccaactgggcaaggatatgcggaacgtcattcagctgctcgagaatgtactgtctccgcagcagcccagccgcttctgttccctccactctacgtcggtttgcccaagccgcgaatcactgcagacaagaactagttggtcggcccaccagccatgtctgcatctgcaaacagggggcgcagcatatacacaggcacaattatgttcatccaatatcacttccgatatttggtcagtcgatccctcgagcgtggggtcctcgccacagcggactggagctcacgagcaaaatcccgctgattctgagctctatcactcacccagcctcgattattccccatcacactaccaggtcgtgcaagagggccatctgcagttcctgaggtgcatttcccctcattcagattccactctgactcctctccagtccattagcgctacgctttctagctctgtgtgcagctcatccgagacttccttgcacctagtcttgcccagtcggagcgaagaaggcagcttcagccagggtactgtgtcgtccttcagtctcgaaaatctacctgggagctggaaccaagagggaatggcttcagcttctacgaaaccacttgaaaatctgcccctggaggttgtgaccagcacagccgaggttaaggataataaggccatcaacgtgtag

SEQ ID NO: 239270 - DNA, 5137 bp, Artificial Sequence
  derived and/or modified sequence
gggagagggagcctgcgccgggctgagcctggaggtgcggggcgggctcggggagcgctcttggggctcctcctgccacagccggggcggctggaactctctccctttctccctccatccttccacttcccctgctcggccccgccgtcaggccgggtcccccttccctgccgtcatcaggttccccttctcccttcttggcactttcctttcgaaccatccttctggacaaactttgatggagaatttcacaccacgctggaaaaatgccggttatgaaaggattactggcgccgcaaaacaccttcctggacaccatcgccacccgttttgacggaacacatagcaacttcatccttgccaatgcccaggtggctaagggtttccccatagtctactgttccgatggcttctgcgagcttgctggatttgcccgaactgaagtcatgcagaagagttgtagctgcaagttcttatttggggttgaaaccaatgagcaactgatgcttcaaatagaaaagtcactggaggagaaaacagaattcaaaggagaaattatgttctacaagaaaaacgggtctccattttggtgcctactggatattgttcccataaagaatgaaaaaggagatgtagtactttttctggcctcgttcaaagatataacagatacaaaagtgaagattactccagaagataaaaaagaagacaaagtcaaaggaagatcaagagcagggacccactttgactcagcccggagacggagtcgagcagtcctttatcacatctctgggcacctgcaaagaagagaaaagaacaaattgaaaataaataacaatgtttttgtagataaaccagcatttccggagtataaagtttctgatgcaaaaaagtccaaattcatacttctgcattttagcacttttaaagctggctgggactggcttattttgttggcaacgttttatgttgctgtgactgtaccttacaacgtttgctttattggcaatgacgacctgtccacaactcggagcacaaccgtcagtgacattgcagtggagattctttttattatagatattattttaaatttccgaacaacttatgtcagcaagtctggccaagttatctttgaagcaagatcaatttgcatccactatgtcacaacctggttcatcattgatttaatcgctgccctgccttttgatcttctgtatgctttcaacgtcacagtggtgtctctcgtgcatcttctaaagacagtgcgcctcttgcgtcttttgcgtctgctgcagaagttagaccgctattcccaacacagtactatcgtcctgactctgctcatgtccatgtttgcactccttgcacactggatggcgtgtatctggtacgtcattggaaaaatggagagggaagacaacagccttctgaagtgggaagttggttggcttcatgagttgggaaagagactggaatctccatactatggcaacaataccttggggggcccgtcgatccgaagtgcctatattgccgctctgtacttcacgctgagcagcctcaccagcgtgggttttgggaacgtctctgctaatacagatgcagaaaagatcttctccatctgcaccatgctgattggtgccttgatgcacgccttggtgtttggaaacgtgacagcaatcatacagaggatgtactccagatggtccctctatcacactagaactaaggatctgaaagatttcatccgtgtccatcacttgccccaacaactcaagcagaggatgctcgaatattttcaaacaacctggtcagtcaacaatggaatagattcaaatgagcttttgaaagactttccagatgaactgcgttctgacatcactatgcacttgaacaaggagatcttacagttgtccctttttgaatgtgccagccggggctgcctcaggtctctgtctctacacatcaaaacctctttctgtgctccgggggagtatctgctgcgtcaaggggatgctttgcaggccatctactttgtatgctcgggctccatggaagttcttaaagacagcatggtgctggctattcttgggaaaggggatttaattggagcaaatctatcaattaaggaccaagtgatcaagaccaatgcagatgtaaaggctttaacctactgtgatctccagtgtatcatcctcaaaggactctttgaagtgctagacctttacccagaatatgctcacaaattcgtggaagacattcagcatgacctcacatacaacctccgagaaggtcatgagagtgatgtgatatcaagactatcaaacaaatctatggtctcacagtcagagcccaagggaaatggcaacatcaacaagcgactcccatccattgtggaagatgaggaagaggaggaggagggggaggaagaggaggcagtctccctctctcccatctgcacaaggggatcttcttcgcgcaacaagaaggttggaagcaataaagcctacctgggcttaagcttaaagcaactggcctcgggaacggtgccctttcactcgcctatcagagtctccaggtcaaattcccccaaaaccaagcaggaaattgacccccccaaccataataaaaggaaagagaagaacttgaaattgcaactttcaactttgaataatgctggacccccagacctcagtccaaggattgttgatggaattgaagatggaaacagcagtgaagaaagtcagacttttgattttggctctgaacgaatcagatcagagcccagaatttctcctcctcttggagatccagagattggagctgctgttctcttcatcaaagcagaggagaccaagcagcagataaacaaactcaacagtgaggtaacaacattgactcaggaagtttctcagttgggtaaagacatgagaaatgtgatccagcttctggaaaacgttctgtcacctcagcagccatcacggttttgctctttgcacagcacctctgtgtgtccctccagggagagcttacagaccagaacgagctggagtgcacaccagccttgcctacacttgcaaacaggcggggctgcttatacccaagcacaactttgtagcagtaatatcacctcagacatttggagtgtggatccctcctctgtggggagcagcccccaacgaactggagctcatgagcaaaatcctgcagacagtgaactttatcattctccaagccttgattattcaccttcccactaccaggttgtccaagaaggtcatttgcaatttttaaggtgcatctctccacattcagattctacgttgacgcctctgcagtccatttcagcaactctctcatcttctgtctgctcctcttcggaaacatctttgcacctagttctcccaagcagatcagaggagggcagcttcagtcagggaactgtgagttccttcagtctggaaaacttaccaggatcttggaaccaggaaggaatggcatcagcttctacaaaacctttggagaaccttccactggaagttgtcacaagcacagcagaagtgaaagataacaaagccataaatgtatgatattagtgcccatgatgcagcagctaatttcaaacctaccactgcatgacagttttagtttgcctttttgcctctggtgggcatgaagactgagcaaagctgggaatcctgcagaaaagagtgtgaggagccagggaaaggcagaaccacctccatgctgtagcaaacaatttctagatactagaagcataatagaaacatttttctgtacaggtattaaactactggtctgtttgacagactttggtaacaatccaaagaccctgagggtctgagcagctagaagtcctagacaaagaacttgtggatgacttttgtcccatgtggcttttgtgaagtatggcaaaggtttttcatgagtgcctgattgttattcctgaacaatatccatagcactgttggcctcaggagtgcacagctcctgctgatgtatttttctttttgtgaaggcaaagggacaattatcactgcatgtcatctcctagacaatcagtcaaatagagctggtggccagtggttagctattcgcacgttatttgccatgtaaatgaaaacgtctttatttatcaaaaaaacacagaggctatttttatatccttggtatgaaatatgtatttaaactatttaaatatttataaagaaatgaatgttttcttttcattttggtaaaaaaaaagcttgctgttttaacaagaaatgcactactgttgtgtatagtagatcaaaaattatttattactaagaggatgtagtttccaaaggaatcccccattttttctgcatgcagtttgcaacaaatgtattctcatgcttctggattataaaagaaaagtgaagtcatattttgttaatgaaataaaaacatggactgagtgtcaactacatgagctttggcatggggatagagaggctccatctaggctctgccaactcatgtcaatgacatgatttaaggtcgttgtgccagcagaaatgtctctcctctaggtatcgtattttgttgctcaagaatccaaaatgggtctgtggacatagggcaatttggggctcaaagtgagggagaaaacctgggtgtgtcctttcccagtgcttttcttttacaagaggtagtagactagtggaaatccccaaatggagccaagacttctgagctataacttgtgggagtaataccagcttgcaatgggtcagcactttaccttttttctttaaggctcccaacaatgctatacagcgcagttgtttccattcctatttttaataaatctcaggggaagcctcagagattacacagttaggatgctgacacagtctagaatccataatgctccctacatctcacactaacaggcaaattcagatgctgggattggcaatgatttaagcaccttcactaaagtcttattttatgttttagaacagttacagtctaattgtcttggacattttgggaagatatattgggttcacattctggagttctctttattttccaccacaaaaaataatctgagaattgtatcattaaaagtatctaaacacaccaa

SEQ ID NO: 239271 - DNA, 1006 bp, Artificial Sequence
  derived and/or modified sequence
caagttatctttgaagcaagatcaatttgcatccactatgtcacaacctggttcatcattgatttaatcgctgccctgccttttgatcttctgtatgctttcaacgtcacagtggtgtctctcgtgcatcttctaaagacagtgcgcctcttgcgtcttttgcgtctgctgcagaagttagaccgctattcccaacacagtactatcgtcctgactctgctcatgtccatgtttgcactccttgcacactggatggcgtgtatctggtacgtcattggaaaaatggagagggaagacaacagccttctgaagtgggaagttggttggcttcatgagttgggaaagagactggaatctccatactatggcaacaataccttggggggcccgtcgatccgaagtgcctatattgccgctctgtacttcacgctgagcagcctcaccagcgtgggttttgggaacgtctctgctaatacagatgcagaaaagatcttctccatctgcaccatgctgattggtgtttcacagttccaggtgtgtccaaggccttcttggattatctgctggtttagaaaccatttcggtttcattctgctaatgactaccttgatgcacgccttggtgtttggaaacgtgacagcaatcatacagaggatgtactccagatggtccctctatcacactagaactaaggatctgaaagatttcatccgtgtccatcacttgccccaacaactcaagcagaggatgctcgaatattttcaaacaacctgcttttgaaagactttccagatgaactgcgttctgacatcactatgcacttgaacaaggagatcttacagttgtccctttttgaatgtgccagccggggctgcctcaggtctctgtctctacacatcaaaacctctttctgtgctccgggggagtatctgctgcgtcaaggggatgctttgcaggccatctactttgtatgctcgggctccatggaagttcttaaagacagcat

SEQ ID NO: 239272 - DNA, 3324 bp, Artificial Sequence
  derived and/or modified sequence
atgcccgtgatgaagggactcctggcaccacaaaacaccttcctggacacgatagccacgcggttcgatggcacacactccaatttcatcctcgcgaatgcgcaggtcgcaaaagggtttcctatagtctactgctctgacggattctgtgagttggcaggctttgcacggaccgaggtcatgcagaagtcatgctcatgcaaatttctgttcggggtggaaaccaatgaacagctgatgctgcaaattgagaagagcttggaagagaaaactgagttcaagggtgaaataatgttttacaaaaaaaacggtagcccattttggtgcttgctggatatcgtacctattaagaacgaaaaaggggacgtggtgctgtttctggcgagttttaaggatataaccgataccaaggtgaagattacacctgaagacaaaaaggaagataaggttaaggggaggagccgtgcaggcacgcacttcgattctgcccgacgccgatcccgggcagtactgtaccatatctccggccatctgcagaggagggaaaaaaacaagttgaagataaacaacaatgtgttcgtcgacaagcctgcgttccccgagtacaaggtctctgacgcaaaaaaatccaagtttattctgctgcatttttcaactttcaaggccggatgggactggttaatccttcttgccactttttacgtggccgtgacagtgccttacaacgtgtgtttcatagggaacgacgatctgtccacaaccagaagtacaacagtgtcggacattgctgtggaaatccttttcatcatagacatcatcctcaacttccgcaccacgtacgtttcaaaatccggccaggtgatctttgaggcccgttccatctgtattcattatgtcacaacatggttcattatcgacctgatagccgcactgccttttgacttactctatgcattcaatgttacagttgtgagtctggtccatcttctgaagaccgtccggctgctgcggttgctgcgcctcttgcagaaactcgataggtactctcagcattccaccattgttctgactttgctgatgagtatgtttgcccttctggcgcattggatggcttgcatatggtacgtgatcggcaagatggagcgcgaggacaattctctgctaaagtgggaagttgggtggttgcacgagctggggaagcgtttggagtcaccttactacggaaacaacaccctcggtggcccaagcatacggagcgcctacatcgccgctctctacttcacgctctcctcgctgacaagcgttgggtttggcaatgtgtctgcaaatactgatgctgagaaaattttttccatctgtaccatgttaataggggcactcatgcatgccctggtgtttgggaacgtgaccgcaataattcagcgtatgtattcccgttggtccctctaccacacacgtaccaaggatctgaaagacttcatccgagtccatcacctcccgcagcagctcaagcagaggatgctggaatacttccagactacttggagcgtcaacaacggcattgacagtaatgaactgcttaaggacttcccagacgagctgcggtccgatatcactatgcatctgaacaaagaaatactgcaactgtctcttttcgaatgtgcaagtagggggtgcctgcggagcttgagcctgcacattaagacaagtttttgcgctcccggagaatacttgctgagacagggagacgctttgcaggccatatacttcgtgtgttcgggctctatggaggtgcttaaagacagcatggtcctagcaatattgggaaagggggatctgatcggggcaaacttgagcataaaagaccaggtgatcaagaccaacgcagatgtgaaggccctcacctactgcgacctacagtgcatcatcctcaagggtctgtttgaggttctcgacctataccctgagtacgcccacaaattcgtagaggacattcaacatgacctaacatacaatttgcgagagggccacgaatcagatgtgattagccgcctgtccaacaaatctatggtttctcagtccgaacccaaggggaacggcaacatcaataagcgactcccaagcatagtggaagacgaggaggaagaagaggaaggggaggaagaggaagctgtctctttgagtccaatctgcactcggggtagctcgagccgaaataagaaggtgggcagcaataaagcttatcttggactgagtctcaagcagctggcttccgggacagtgccctttcactcacccattagggtgagcagaagtaattcaccaaaaacgaagcaagagatagacccaccgaaccataacaaaagaaaggagaagaacctgaaactgcagctttcgacactgaataatgctggacctcccgatctctccccacgcattgttgatggaattgaagacggcaacagtagtgaagagtctcagaccttcgactttgggagcgagcggattcggagtgagcctagaattagtcctccactcggcgatccggagataggcgctgcagtactgttcatcaaggccgaggaaacgaagcagcagattaataagctgaacagtgaggttacaactctcacacaagaagtctctcagctgggtaaggatatgagaaatgtgattcagctgcttgagaacgtgctttcccctcagcaacctagtcgcttttgctccctgcacagcacgagcgtgtgcccaagccgcgaaagtctacagacccggactagctggtcagcgcatcaaccctgcttgcacctgcagactggcggagccgcttatacccaggcgcagctgtgtagttcaaacatcaccagtgatatttggagtgtggatccctcttcagtgggatcttctccccaaagaacaggcgctcacgaacagaatcccgcagacagcgaattgtaccatagtccttcattggattactctccatctcattatcaggtggtgcaggagggacacctgcaattcttgcggtgcatttctcctcattctgatagcaccctgactcctctacagagcatctcagcaacgctctcatcttcagtctgtagctctagtgagacttcactgcacttggtgctgcctagtcggtcagaagagggaagctttagccaggggacagtctcatcattttccctcgaaaatctgcccggaagctggaaccaggagggcatggccagcgcgtctaccaaacctcttgaaaatctccccctggaggtggttaccagtactgcagaggttaaggacaacaaggctattaacgtctag

SEQ ID NO: 239273 - protein, 676 aa, Artificial Sequence
  derived and/or modified sequence
MSSLQALCSGLPLRPLPENRGRQAGVPHAPVRTPSLSPVEKQLALRNALRYFPPDVQELLAPEFAQELQLYGHIYMYRFCPDIEMRAYPIEQYPCQTKVAAAIMHMIMNNLDPAVAQFPQELVTYGGNGQVFSNWAQFWLTMFYLSKMTEEQTLVMYSGHPLGLFPSSRSAPRLVITNGMVIPNYSSRTEYEKLFALGVTMYGQMTAGSYCYIGPQGIVHGTVLTVLNAARRYLGIEDLAGKVFVTSGLGGMSGAQAKAAVIVGCIGVIAEVDKAALEKRHRQGWLMEVTDSLDRCIQRLREARKKKEVLSLGYHGNVVALWERLVHELDTTGECLVDLGSDQTSCHNPFNGGYYPVQLSFTEAQSLMASNPAVFKDLVQESLRRQVSAINRLAEEKFFFWDYGNAFLLEAQRAGADVEKKGAGRTEFRYPSYVQHIMGDIFSQGFGPFRWVCTSGDPQDLAVTDELATSVLEEAIADGVKVSVKLQYMDNIRWIREAARHRLVVGSQARILYSDQKGRVAIAVAINQAIACRRIKAPVVLSRDHHDVSGTDSPFRETSNIYDGSAFCADMAVQNFVGDACRGATWVALHNGGGVGWGEVINGGFGLVLDGTPEAEGRARLMLSWDVSNGVARRCWSGNQKAYEIICQTMQENSTLVVTLPHKVEDERVLQQALQL

SEQ ID NO: 239274 - DNA, 2031 bp, Artificial Sequence
  derived and/or modified sequence
atgagcagcctgcaggccctgtgcagcggcctgcccctgagacccctgcccgagaacagaggcagacaggccggcgtgccccacgcccccgtgagaacccccagcctgagccccgtggagaagcagctggccctgagaaacgccctgagatacttcccccccgacgtgcaggagctgctggcccccgagttcgcccaggagctgcagctgtacggccacatctacatgtacagattctgccccgacatcgagatgagagcctaccccatcgagcagtacccctgccagaccaaggtggccgccgccatcatgcacatgatcatgaacaacctggaccccgccgtggcccagttcccccaggagctggtgacctacggcggcaacggccaggtgttcagcaactgggcccagttctggctgaccatgttctacctgagcaagatgaccgaggagcagaccctggtgatgtacagcggccaccccctgggcctgttccccagcagcagaagcgcccccagactggtgatcaccaacggcatggtgatccccaactacagcagcagaaccgagtacgagaagctgttcgccctgggcgtgaccatgtacggccagatgaccgccggcagctactgctacatcggcccccagggcatcgtgcacggcaccgtgctgaccgtgctgaacgccgccagaagatacctgggcatcgaggacctggccggcaaggtgttcgtgaccagcggcctgggcggcatgagcggcgcccaggccaaggccgccgtgatcgtgggctgcatcggcgtgatcgccgaggtggacaaggccgccctggagaagagacacagacagggctggctgatggaggtgaccgacagcctggacagatgcatccagagactgagagaggccagaaagaagaaggaggtgctgagcctgggctaccacggcaacgtggtggccctgtgggagagactggtgcacgagctggacaccaccggcgagtgcctggtggacctgggcagcgaccagaccagctgccacaaccccttcaacggcggctactaccccgtgcagctgagcttcaccgaggcccagagcctgatggccagcaaccccgccgtgttcaaggacctggtgcaggagagcctgagaagacaggtgagcgccatcaacagactggccgaggagaagttcttcttctgggactacggcaacgccttcctgctggaggcccagagagccggcgccgacgtggagaagaagggcgccggcagaaccgagttcagataccccagctacgtgcagcacatcatgggcgacatcttcagccagggcttcggccccttcagatgggtgtgcaccagcggcgacccccaggacctggccgtgaccgacgagctggccaccagcgtgctggaggaggccatcgccgacggcgtgaaggtgagcgtgaagctgcagtacatggacaacatcagatggatcagagaggccgccagacacagactggtggtgggcagccaggccagaatcctgtacagcgaccagaagggcagagtggccatcgccgtggccatcaaccaggccatcgcctgcagaagaatcaaggcccccgtggtgctgagcagagaccaccacgacgtgagcggcaccgacagccccttcagagagaccagcaacatctacgacggcagcgccttctgcgccgacatggccgtgcagaacttcgtgggcgacgcctgcagaggcgccacctgggtggccctgcacaacggcggcggcgtgggctggggcgaggtgatcaacggcggcttcggcctggtgctggacggcacccccgaggccgagggcagagccagactgatgctgagctgggacgtgagcaacggcgtggccagaagatgctggagcggcaaccagaaggcctacgagatcatctgccagaccatgcaggagaacagcaccctggtggtgaccctgccccacaaggtggaggacgagagagtgctgcagcaggccctgcagctgtag

SEQ ID NO: 239275 - DNA, 2031 bp, Artificial Sequence
  derived and/or modified sequence
atgtctagcctgcaggccttgtgctctggacttcccctacgaccgctgccagaaaatcggggtaggcaggccggcgtcccacatgctcccgtgcgcaccccgtctcttagccctgtggagaagcaactggcgctcaggaacgctcttcggtacttccctcccgacgttcaggagctgctcgcgcccgagtttgcccaggaactccagctctatggccacatttatatgtatcgtttttgccctgatatcgaaatgcgcgcctatccaattgagcaatatccatgccagactaaagtggcagccgctattatgcacatgattatgaacaacttagatcctgctgtggctcagttccctcaagaactggtcacttacggcggcaatggccaggtgttctctaattgggcacagttttggctcacaatgttttatcttagtaaaatgaccgaagaacaaacgctggtcatgtactccgggcaccccctaggcttattcccttcctcccggtccgctccacgcctggtcatcacgaacggcatggtgattcctaattatagttcaagaacagaatacgagaagttgtttgccctaggcgtgacgatgtacggccagatgaccgctggctcttactgttacatcgggcctcagggaatcgtccatgggaccgtgttgactgtgctgaacgctgccaggaggtaccttggtatcgaggatttggccggaaaggtgtttgtaactagcggcttgggtggcatgtcaggagctcaagccaaggccgctgtcatcgtcgggtgcatcggcgtgatcgccgaagttgacaaggccgcattggaaaaacgacacaggcaaggctggctgatggaagtcaccgatagcctggacagatgcatccagagactcagggaagctcgtaaaaagaaggaggtcctttctctaggttaccatggaaatgtggtcgccctttgggagcgcttggtccacgagcttgataccacaggggagtgtctggttgacctggggtccgaccaaacctcttgccacaacccatttaacggaggttattatcccgtgcagctgtcctttaccgaggcacagagcctcatggccagtaacccagcagtatttaaagaccttgtgcaggaatcactcagacggcaagtgtccgccattaatagactcgcggaggagaaattctttttttgggattacgggaacgcgttcttactggaagcacagagagctggtgcagacgtcgagaagaagggggctggtaggaccgagttccgctacccttcatatgtgcagcacatcatgggagacatattcagccagggcttcggcccattcaggtgggtgtgtacttcaggcgaccctcaggatctcgcagttaccgacgagcttgccacctccgtgctcgaagaagcaattgctgatggagtgaaagtctccgtgaaactccaatatatggataacatcagatggattcgggaagccgcacggcaccgtcttgtggtaggatcgcaggccaggatcctgtacagcgaccaaaaggggagagtggcaattgctgtcgcgataaatcaggctatcgcctgtagaagaattaaagctcccgtcgttcttagtcgtgatcaccatgacgtgtctggcactgattcacccttcagagaaacatctaacatctacgatggcagtgccttttgcgccgacatggccgtacagaactttgttggtgacgcgtgccgaggagccacctgggtggccctacacaatggcggaggagtaggttggggcgaagtcatcaacggcggattcggtctggtactggatggaacccctgaagcggaaggtagggcgcgtttgatgctatcgtgggacgtgtctaacggcgtagcccggcggtgttggtccggtaaccagaaggcctatgagatcatatgccaaacaatgcaggagaatagtaccctggtcgtcaccctcccccacaaggttgaggacgaacgggtgcttcagcaagcactacaactgtag

SEQ ID NO: 239276 - DNA, 2031 bp, Artificial Sequence
  derived and/or modified sequence
atgagcagcctgcaggccctgtgcagcggcctgcccctgcggcccctgcctgagaacagaggccggcaggccggcgtgccccacgcccctgtgaggacccccagcctgagccctgtggagaagcagctggccctgagaaatgccctgcgctacttccccccagatgtgcaggagctgctggcccctgagtttgcccaggagctgcagctgtatggccacatctacatgtaccgcttctgcccagacatcgagatgagggcctaccccatcgagcagtacccctgccagaccaaggtggccgccgccatcatgcacatgatcatgaacaacctggaccctgctgtggcccagttcccccaggagctggtgacctatggaggaaatggccaggtgttcagcaactgggcccagttctggctgaccatgttctacctgagcaagatgacagaggagcagaccctggtgatgtacagcggccaccccctgggcctcttccccagcagccgcagcgccccccggctggtgatcaccaacggcatggtgatccccaactacagcagcaggacagaatatgagaagctgtttgccctgggcgtgaccatgtatggccagatgacagctggcagctactgctacatcggcccccagggcatcgtgcacggcaccgtgctgactgtgctgaatgctgcccggcgctacctgggcatcgaggacctggccggcaaggtgtttgtgaccagcggcctgggcggcatgtctggggcccaggccaaggccgccgtcatcgtgggctgcatcggcgtgattgctgaggtggacaaggccgccctggagaagaggcaccggcagggctggctgatggaggtgacagacagcctggaccgctgcatccagaggctgcgggaggccaggaagaagaaggaggtgctgagcctgggctaccatggaaatgtggtggccctgtgggagcggctggtgcatgagctggacaccaccggggagtgcctggtggacctgggcagtgaccagaccagctgccacaaccccttcaatggaggctactaccctgtgcagctgtccttcacagaggcccagagcctgatggccagcaacccagctgtgttcaaggacctggtgcaggagagcctgcggcggcaggtgtctgccatcaaccggctggccgaggagaagttcttcttctgggactatggaaatgccttcctgctggaggcccagagagctggagcagatgtggagaagaagggagctggccgcacagagttccgctaccccagctatgtgcagcacatcatgggagacatcttcagccagggcttcggccccttccgctgggtgtgcaccagcggggacccccaggacctggccgtgacagatgagctggccacctctgtgctggaggaggccatcgcagatggagtgaaggtgtctgtgaagctgcagtacatggacaacatccgctggatccgggaggccgcccggcaccggctggtggtgggcagccaggcccgcatcctgtacagcgaccagaagggccgggtggccatcgctgtggccatcaaccaggccatcgcctgccgccgcatcaaggcccctgtggtgctgagccgggaccaccatgatgtgtctggaacagacagccccttccgggagaccagcaacatctatgatggcagcgccttctgtgccgacatggctgtgcagaactttgtgggagatgcctgccgcggggccacctgggtggccctgcacaatggaggcggcgtgggctggggcgaggtgatcaatggaggcttcggcctggtgctggatggcaccccagaggccgagggccgggcccggctgatgctgtcctgggatgtgtccaatggagtggcccggcgctgctggagcggcaaccagaaggcctatgagatcatctgccagaccatgcaggagaacagcaccctggtggtgaccctgccccacaaggtggaggatgagcgggtgctgcagcaggccctgcagctgtag

SEQ ID NO: 239277 - DNA, 2031 bp, Artificial Sequence
  derived and/or modified sequence
atgagcagcctgcaggccctgtgcagcggcctgcccctgcggcccttaccggagaatagaggacgccaggccggcgtaccacacgctcccgtgagaacgccttctctatcacctgtcgaaaaacagctggccctgaggaatgcccttaggtacttcccccccgacgtgcaggaacttcttgccccggagttcgctcaggagcttcagctatacgggcatatttacatgtaccgcttttgtcccgatatagagatgcgcgcctatcccatcgaacagtatccttgccagacaaaggtggccgccgctattatgcacatgatcatgaataacctcgaccctgctgttgcacagtttcctcaggaactggttacctacggcggaaatgggcaggtgttctcgaactgggcgcagttttggctaactatgttttaccttagcaaaatgacagaggagcagacactggttatgtattctggacatccactaggtctgtttcccagctcccggtccgcgccacggttggtgattacaaacggtatggttatacctaactacagttctcgtaccgagtatgagaagctgttcgccctgggggtgaccatgtatggccagatgaccgccggctcctactgctatatcggccctcagggaatagttcacgggacggtgcttaccgttctgaacgccgcacgcaggtaccttggcatcgaagatctggcaggaaaagtgttcgtgaccagtggactgggagggatgtctggtgcccaagcaaaagcggctgtcatagttggctgcatcggggtgattgctgaggtggataaagccgcacttgagaaaaggcaccgccaagggtggctgatggaggttactgatagtctcgacagatgcatccagaggctcagggaggcaaggaagaagaaagaggtactgtcactggggtaccatggcaacgtcgtcgctttatgggagcggctggtacacgaactagatactactggtgagtgtctcgtagatttaggcagcgatcagacctcctgccacaacccattcaatggcggctactacccagtgcaattgagctttacggaggcgcagagcttgatggcaagcaatccagccgtcttcaaagatctggtccaagagtccctgcgcaggcaagtcagtgcaattaaccgcctcgctgaggaaaagttttttttttgggactatggcaacgcctttctattagaggcccagagggctggagcagatgtcgaaaagaaaggggccggaagaactgaatttcggtaccccagctacgtacagcacattatgggagatattttttctcagggatttggaccgtttcgatgggtgtgcaccagtggagaccctcaggaccttgcagtcacagacgagctcgcaaccagcgtgttagaagaagctattgcggacggcgtcaaggtgagcgtgaaactacagtacatggacaatatccgctggatccgggaggccgctcgccaccgcttagttgtgggctcacaagcaagaattctttattcagaccagaaaggcagggtagctatagctgtggccatcaatcaagccattgcttgtcggagaatcaaggcaccagttgttctctcccgagatcatcatgatgtttcgggcaccgactcccccttccgagagacgtccaacatttatgacggctctgcattttgtgccgacatggcagtgcagaattttgtgggagacgcatgtcggggcgccacctgggtagccctacacaacggaggtggcgtgggatggggcgaagtcattaacggaggcttcggactggttctggacggaactccagaggccgaagggagggctagactgatgcttagctgggacgtctctaacggagtggcccgccgctgttggtctgggaatcagaaggcctacgagatcatctgccagacaatgcaggaaaattctacactggtggtcaccctacctcacaaagtggaggatgagcgtgtgctccagcaggccctgcagctttag

SEQ ID NO: 239278 - DNA, 2031 bp, Artificial Sequence
  derived and/or modified sequence
atgtccagtctccaggctctatgttcgggtctgccacttcgccctcttcccgagaatagagggaggcaggctggggtaccccacgctccagtgcggacgccttctctctcccccgttgagaaacagctagccctccgcaatgcactgaggtactttcccccagacgtgcaagaattactggctcctgaattcgctcaagagctgcagttgtacggtcacatatacatgtataggttttgtccggacatagagatgcgagcatatccaatcgagcagtacccgtgccaaactaaagtcgccgcagcaatcatgcacatgattatgaataatttagaccccgcagttgcccagtttccgcaggaactcgtcacctacggcggtaacggacaggtgttttcaaattgggctcagttctggttgaccatgttttacctgagtaagatgacagaggagcaaaccctggttatgtatagcggacaccccttgggcctctttccttccagtaggagcgcacctaggcttgtgataaccaatgggatggttatccctaactactcgtcccgcacagagtacgagaagctgttcgctctgggcgtgacaatgtacggtcagatgacagcgggttcctattgctatattggacctcagggcattgtccatggcaccgttctgaccgtactgaatgcagcaaggcgctacctgggtattgaagatctggccggtaaggtgttcgtgacctccggactcggagggatgtcaggggcacaggctaaagcagcagtcattgtcgggtgcattggagttattgcagaggttgacaaagctgcactggaaaaacgacaccgacagggatggttaatggaggttaccgattctcttgatcgctgtattcagcgtcttcgggaagcacgcaaaaagaaggaggtgctgtctttaggttatcacggcaacgtggtggcattgtgggagcggctggtacacgagttagataccaccggcgaatgcctggttgacttagggagcgatcagaccagctgccacaacccttttaatggcggatattaccccgtgcagttgagctttacagaagcacagtctctgatggcctccaaccctgctgtctttaaggacctggtgcaggaaagtctgagaagacaggtgtcagcaatcaatcgccttgccgaggaaaagttctttttctgggactacggtaatgctttccttttagaggcacagcgggcaggcgcagatgtagaaaagaagggcgcagggagaactgagttccgatatccttcctacgtccagcatatcatgggtgatattttttcccaaggcttcggtccctttaggtgggtttgcacatccggagaccctcaggatctcgccgttacggatgaacttgctaccagcgtgttggaggaagctatcgccgacggagtcaaagtttccgtcaaactccagtacatggacaacatcaggtggattcgagaagccgctcgtcatagattggtggtcggttcacaagccaggatcctctattcagatcagaaggggagagtggccatcgctgttgccatcaaccaagctattgcttgtagaaggattaaggctccggtggtccttagtagggatcaccatgacgtctctggaactgatagcccttttcgggaaacctccaatatctacgatggctccgcattttgtgccgatatggccgttcagaactttgtgggtgatgcgtgtcgcggagcgacctgggtggctctgcataacggtggaggagtgggctggggcgaggttattaatggaggtttcggactggtgctcgatgggactccagaggcagagggaagagcccgtctcatgctgagctgggacgtatcaaacggtgtggcaagaaggtgttggagcggcaatcagaaggcttatgaaatcatatgtcagaccatgcaagagaatagcactctcgtggtgaccctgccccacaaagtggaggatgaacgagttctgcaacaggctttgcagctgtag

SEQ ID NO: 239279 - DNA, 3149 bp, Artificial Sequence
  derived and/or modified sequence
agtctcttcctggcctccccacagtgctggcctctgcctccatctcagtcacacatgtctagcctccaggcgctgtgctctggcctgcccctgcggcccctcccagagaaccggggacgccaggctggggtgccccatgcccctgtcaggacccccagcctcagccctgtggagaaacagctggcgctgaggaacgccctgcgctacttccccccggatgtccaggagctgctggccccagagtttgcccaggagctgcaactgtacggacacatctacatgtaccggttttgccccgacattgaaatgagggcctacccgattgagcagtacccctgccagacgaaagtggctgccgccatcatgcacatgattatgaacaacctggatcctgccgtggcccagtttccccaggagctggtgacctatggaggaaatgggcaggtgttcagcaactgggctcagttctggctgaccatgttctacttgtcgaagatgacagaggagcagactttggtcatgtacagtgggcacccacttggcctctttcccagcagccgcagtgccccacggctcgtcatcaccaatgggatggtcattcccaactactcctcccggacggagtatgagaagctctttgccttgggggttacaatgtacggccagatgacagcaggtagctactgctacatcggtccccagggaatcgttcatggcactgtgctcaccgtgttgaatgctgcacgtcggtacctgggcatcgaggacttggctgggaaggtctttgtcacctctgggctcggcggaatgagtggggctcaggccaaggccgcagtcatcgtggggtgcatcggtgtgatagcagaggtggataaagcagcccttgagaaacgccacaggcagggctggctgatggaagtgactgacagcttggaccgctgcatccagaggctcagggaagcaaggaaaaaaaaggaggtgctcagccttggttaccatggcaacgtggtggctctttgggagcgcctggtccacgaattggacacgacgggggagtgcttggtggacctggggtcagatcagacatcctgccacaacccgttcaatggcggctactaccctgtgcagctcagcttcacggaggcccagagcctcatggcctccaaccctgctgtgttcaaggacctggtccaggaaagcctgaggaggcaagtctcagccatcaacaggttggccgaggagaagttcttcttctgggactacggcaatgccttcctcttggaggcccagagagcaggagcggatgtggagaagaaaggtgctggcaggacagagttccgctacccttcctatgtgcagcacatcatgggggacatattctcccagggatttgggcctttccgctgggtgtgcacatcgggggacccccaggacctggcggtcacagacgaactggccacatctgtgctggaggaagccattgctgatggagtgaaggtgtctgtgaagctgcagtacatggacaacatccgctggatccgggaggccgccaggcaccggctggtggtgggctcccaggcaaggatcctgtactcagaccagaagggccgcgtggccatcgctgtggccattaaccaggccatcgcctgcaggaggatcaaggcgccggtggtcctgagccgagatcaccatgacgtgagcggcaccgacagcccctttagggagacctccaacatttacgacggctctgccttctgtgcagacatggctgtgcagaacttcgtgggagatgcctgtcgcggagccacctgggtcgcccttcacaacggagggggcgtgggctggggtgaggtgatcaacgggggattcggcctcgtgctggacggtaccccggaggccgaggggagagccaggctgatgctcagctgggatgtctccaatggtgtggcccggcgctgctggtcagggaaccagaaggcctatgagatcatctgccagaccatgcaggagaacagcaccttggtggtgacactgcctcacaaggtggaggacgagcgggtgctccagcaggccctgcagctctgagggagccaggagtcgcggcccctgcctcccttcctccctggcgatcctcacctgcccagccatggcacacacccttcctgcacacccgcactacctgcacttctcgcacatcctcacgtggcccttatggtgccctgtgcagggtgccaccacagcctcattttacagacagccccctgaggcccagagacatgcagctctctgtccacaaccatgccacttgcatgggagccctgaaggctgtcaaagtccatttagggccaagtcccaagcctgcccgggggccctgcggtgaacactggtcaagctctctccggctgggatgatcacaccctctgcttcctggccacctgccagcctccatgcaactctgtctgtctgctgcccatctgctgtctgtgcaagcaacttctggaccctggcaccctgggctgctggcctggaggagttcgggaaggaggatagaccaggaaataaagggtcaacagagctgtgtgctgcactgtgggctggtgggacgggcaggccgggtctgccctaaggataaatgatcacttactggggaagaaatgagagagcaggggcacccccctaggccagcacagcctgaggggtacagcaaaggggaccctttgctggcccctgaggctggagtctggcaccccttccccaatcccatagcccggtaatgactgggtccagagcctcgtgagaggtcaccgggatgggggaagtggcctctgtcagggccagggctcatgaatctcattctcttagctgggcgtgcaacagaccaacagataactcatcctaaacagagaaatgagaaagagtctgtgggtgggcctctgagggccacagaaaaccagacaccccacatgtcggtggattggagaggggcaggccactgccctctccaggaccaagccgggttcttggtccccaccctccctgcactccgcatctcctccccagcagccattctcccctttcccttgtgaacaaaagcctagttttgtgtgggcagcaatatagggtaaataaaaccacctgattctccagcc

SEQ ID NO: 239280 - protein, 459 aa, Artificial Sequence
  derived and/or modified sequence
MSAGWFRRRFLPGEPLPAPRPPGPHASPVPYRRPRFLRGSSSSPGAADASRRPDSRPVRSPARGRTLPWNAGYAEIINAEKSEFNEDQAACGKLCIRRCEFGAEEEWLTLCPEEFLTGHYWALFDGHGGPAAAILAANTLHSCLRRQLEAVVEGLVATQPPMHLNGRCICPSDPQFVEEKGIRAEDLVIGALESAFQECDEVIGRELEASGQMGGCTALVAVSLQGKLYMANAGDSRAILVRRDEIRPLSFEFTPETERQRIQQLAFVYPELLAGEFTRLEFPRRLKGDDLGQKVLFRDHHMSGWSYKRVEKSDLKYPLIHGQGRQARLLGTLAVSRGLGDHQLRVLDTNIQLKPFLLSVPQVTVLDVDQLELQEDDVVVMATDGLWDVLSNEQVAWLVRSFLPGNQEDPHRFSKLAQMLIHSTQGKEDSLTEEGQVSYDDVSVFVIPLHSQGQESSDH

SEQ ID NO: 239281 - DNA, 1380 bp, Artificial Sequence
  derived and/or modified sequence
atgtccgcaggatggttcagaagacggttcctcccaggagagccacttcctgctcctcggcccccagggccacatgcttcccccgtaccatacagacgcccgagatttctacgaggcagctcatcaagccctggtgccgctgacgcaagccgacggcccgacagcaggccagtcagaagccccgctcggggcagaactcttccctggaatgctggatacgcagagattatcaacgccgaaaaatccgagtttaatgaggaccaagctgcctgtggcaagttgtgcataaggagatgcgagttcggcgcagaggaagagtggcttaccctttgcccagaggagttcttgacaggacattattgggcactattcgacgggcacggtggccctgccgccgcaatattagcagccaacacactgcattcctgcctgaggagacagctcgaagcagttgtggagggcctggtcgctacccagccaccgatgcacctgaatggtagatgcatctgtccatctgatccccagttcgtagaggagaagggaatccgtgccgaggatctggtgattggcgcacttgagtctgcctttcaggaatgtgacgaggttatcggtcgcgagctggaggcatctggccagatgggggggtgcacagcactggtcgccgttagccttcagggcaaactctatatggccaacgccggggactcccgggcgattctcgtgagaagggacgagatccggcctctttcattcgagttcactcccgagacggaaaggcagaggatccagcagctggcatttgtctaccctgaactgttggccggagagttcacaagactggaatttccccggcggctcaagggggatgatctgggacagaaggtgttgttccgggaccatcatatgtctggttggtcctacaagagggtcgaaaagagcgatctgaagtaccctctgatccatggtcaggggaggcaggccagattgctggggaccttagccgttagcaggggattgggggaccaccaacttcgggttttggatactaacattcagttgaagccattcttactgtccgttcctcaagtcacagtcttggatgtcgaccagttggaacttcaagaggatgacgttgtggtgatggcaacggacggtctctgggacgtcctgagtaacgagcaagtggcttggttggttagatcatttctgcccgggaaccaggaggatccccatcggttctccaagttagcccagatgcttatccattccacccagggcaaggaggatagccttactgaggagggacaggtgagttacgatgacgttagcgtcttcgtgatccccctacactcccagggacaggaaagttctgaccattag

SEQ ID NO: 239282 - DNA, 1380 bp, Artificial Sequence
  derived and/or modified sequence
atgtctgctggctggttcagaagacgcttcctgcccggggagcccctgcctgcccccaggcctcctggcccccacgccagccctgtgccctaccgccggccccgcttcctgcggggcagcagcagcagccctggagctgctgatgccagcagaagaccagacagcaggcctgtgcgcagccctgcccggggccgcaccctgccctggaatgccggctacgccgagatcatcaatgctgagaagtctgagttcaatgaagaccaggccgcctgtgggaagctgtgcatcagaagatgtgaatttggagctgaggaggagtggctgaccctgtgcccagaggagttcctgaccggccactactgggccctgtttgatggccatggaggccctgctgctgccatcctggccgccaacaccctgcacagctgcctgcggcggcagctggaggccgtggtggagggcctggtggccacccagccccccatgcacctgaatggccgctgcatctgccccagcgacccccagtttgtggaggagaagggcatccgggcagaggacctggtgattggagccctggagagcgccttccaggagtgtgatgaggtgattggccgggagctggaggccagcggccagatgggcggctgcacagccctggtggccgtgtccctgcagggcaagctgtacatggccaatgctggggacagccgggccatcctggtgagaagagatgagatccggcccctgagctttgagttcaccccagagacagagcggcagaggatccagcagctggcctttgtgtacccagagctgctggccggggagttcacccggctggagttcccccggcggctgaagggagatgacctgggccagaaggtgctcttccgggaccaccacatgagcggctggagctacaagagggtggagaagagtgacctgaagtaccccctcatccacggccagggccggcaggcccggctgctgggcaccctggccgtgtcccggggcctgggggaccaccagctgcgggtgctggacaccaacatccagctgaagcccttcctgctgtctgtgccccaggtgacagtgctggatgtggaccagctggagctgcaggaggatgatgtggtggtgatggccacagatggcctgtgggatgtgctgagcaatgagcaggtggcctggctggtgcgctccttcctgcccggcaaccaggaggacccccaccgcttcagcaagctggcccagatgctgatccacagcacccagggcaaggaggacagcctgacagaggagggccaggtgtcctatgatgatgtgtctgtgtttgtgatccccctgcacagccagggccaggagagcagtgaccactag

SEQ ID NO: 239283 - DNA, 1380 bp, Artificial Sequence
  derived and/or modified sequence
atgagcgccggctggttccggcggcggttcctgcccggcgagcccttgcccgcgccacgaccaccaggccctcacgcgtcccccgtaccctacaggcgcccacggtttctccgaggaagcagtagcagcccaggcgccgccgacgcttcccgacgaccagatagcagacccgtgcgatcgcccgcgcgcgggagaaccctgccctggaacgcagggtacgccgaaatcatcaacgcagaaaagtccgaatttaatgaggatcaggcagcttgcggcaaactctgcataagacggtgcgagttcggagccgaagaagaatggctcaccctgtgtccagaggaatttctcaccggccattattgggctctgttcgatggtcacggtgggcccgccgccgcgatcctcgccgccaacaccctccatagttgtttgcgccgccagcttgaagccgtggtggaggggttagtcgctacccaaccacccatgcatctcaatggccggtgcatctgtccttcagacccccagttcgtggaagaaaaagggattcgagccgaagacttagtgataggcgcactggagtccgcttttcaggagtgtgacgaggtgattggccgcgaactggaggcgagcggacagatggggggttgtactgcgttggtggcagtaagcttgcaggggaagctatacatggccaatgctggggacagccgagccatcctggtgcggcgtgatgaaattcgaccgctgtccttcgaattcacccccgagactgagcggcaaaggatccaacaactggcctttgtgtacccggagctgctggccggggagttcacccgcctggagtttcctagaaggctgaagggtgatgacctgggtcaaaaggtcctctttagagatcaccatatgagcggctggtcatataagcgggtcgagaagtccgacttaaagtacccactcattcacgggcaaggtcgacaggcccgtctactcggcacactggccgtgagtcgcggcctgggtgaccaccaactacgagtgttggatacaaatattcaactgaagccctttttgttgtcagtccctcaggtgacagttctggacgttgatcagttagaactccaggaagatgatgtcgttgtgatggctactgatgggttatgggatgtcctgagtaacgaacaggtagcatggttagtgcggtccttcctccccggcaaccaggaggatccccatcgattctctaagctagctcaaatgttgatccattcaactcagggcaaagaggatagccttaccgaagaggggcaggtgtcttacgacgacgtcagtgtgttcgttatacccctacattcgcagggacaagaaagcagcgaccattag

SEQ ID NO: 239284 - DNA, 1380 bp, Artificial Sequence
  derived and/or modified sequence
atgtctgctggctggtttcgccgacgattcctccctggggaaccactaccagctcccaggccaccgggtccgcacgccagtcctgtgccttataggagaccgaggtttctccgagggtcatcctcgagtcccggtgcggcagatgcaagccgacggcctgactcacgaccagtccggtcacctgccaggggcaggaccctgccatggaatgcaggctacgctgaaataattaacgcagaaaaatctgagttcaacgaagatcaggctgcatgcggtaagctttgtattcgcagatgtgagtttggggcagaagaggaatggcttacactttgccccgaagagttcctgacaggacattactgggcgctgttcgatggccatggcggtccggcagctgctatcctggctgctaacacccttcactcttgtctacgaagacagttggaggccgtggtggaagggctggtggcaacccagccaccaatgcatctgaatggcagatgcatttgtccctcagacccacagttcgtggaggaaaaagggataagggctgaagacctcgtgattggggctctggagtcagcctttcaggagtgcgacgaggtcatcggccgagagctcgaagcatctggacagatgggtgggtgtacagccctggtcgcggttagtctgcaaggaaaactgtacatggctaatgcgggagactcgcgagctattctagtgcgaagagatgagattagacctctcagtttcgaatttacacccgaaaccgagcgacagcgcattcagcagctggcattcgtatacccagagctccttgccggagagtttacacgacttgagtttcctcgccgactgaaaggcgatgacctcgggcagaaggtgttattccgtgatcatcatatgtccggttggtcctacaagcgggtggaaaaaagcgaccttaaatacccactcatccacggtcaagggcgtcaagcaagactgcttggtacactggcggtgagccgaggcctgggggatcaccagcttagggtgctggataccaatatccagctgaaaccatttctactgagtgtgccgcaggttactgtgttagacgtggaccaactggaactgcaggaggacgacgtggtagtcatggcaacagacggtctgtgggacgttctctctaacgaacaagtcgcgtggctcgtgaggagtttcctgccagggaaccaagaagaccctcaccggtttagcaaactcgcccagatgctaattcattcaacccagggaaaagaagacagccttactgaggagggacaggtcagttatgacgacgtgtccgtgtttgtgatcccactacattcacaaggtcaggagtcctctgatcactag

SEQ ID NO: 239285 - DNA, 2429 bp, Artificial Sequence
  derived and/or modified sequence
cttgccctcacctccgaatcctgacaacttcccggtcatcccgacccagcgttttccttgggattccgacctccccctcagagaagacaggaggtcgggaaggacctgcagcccaggggcttccaagatgaggcccagagactcggattatcaatgcagagaaatctgaattcaatgaggatcaagccgcctgtgggaagctgtgcatccggagatgtgagtttggggctgaagaagagtggctgaccctgtgcccagaggagttcctgacaggccattactgggcactgttcgatgggcacggcggtcctgcagcagccatcttggctgccaacaccctgcactcctgcttgcgccggcagctggaggccgtggtggaaggcttggtggccactcagccccccatgcacctcaatggccgctgcatctgccccagtgaccctcagtttgtggaggaaaagggcatcagggcagaagacttggtgatcggggcattggagagtgcctttcaggaatgtgatgaggtgatcgggcgggagctggaggcctcaggccagatgggcggctgcacagccctggtggctgtgtccctgcagggaaagctgtacatggccaatgctggggatagcagggccatcttggtgcggagagatgagatacggccactgagcttcgagttcaccccagagactgagcggcagcggatccagcagctggcctttgtctatcctgagcttctggctggtgagttcacccgactggagttccctcggcggctgaagggggatgacttgggacagaaggttttgttcagggatcaccacatgagtggctggagctacaaacgtgtggagaaatcggatctcaagtacccactgatccatggacagggtaggcaggctcggttactaggaacactggctgtctcccggggcctgggagaccatcagctcagagtcctggacacaaacatccagctcaagcccttcttgctctctgtgccacaggtgactgtgctggatgtggaccagctggagctacaggaggatgatgtggttgtcatggcaactgatggactctgggatgtactgtccaacgagcaggtggcatggctggtgcggagcttcctccctgggaaccaagaggacccacacaggtactgtagctgctggggacctgcctgggcctgggttggtgccagcagcaagcccaagtagttatggctgagaagacagagcactgacaatgagctggcagctggccaggatcagggctgtctcaagcttcttggaggaggcagggagaccgtgggttccgaaaatccctggatttagactctcatggtccagcccgtggccctcccagacttgctgcttgcttggtccacagtcggactgcattgcttgggtccccatgtccagccttgtgcagtgagttctcctaaggtctggccttgcccctttgctctgcccctgaagtctatctgcaggatggtcttcacaggttctcaaagctggcccagatgctgatacacagcacacagggaaaggaagacagtctcacagaggaagggcaggtgtcctacgatgacgtctctgtgttcgtgattcccttgcacagtcagggccaagagagcagtgaccactgaggattcagacactgtatcccagaactgctctagtgcccgggtgtggtctgggcatccctccagtgtgaccaagagcaaatcctgcctgccctatccctagccaccgcccagtgctctcactatccacctcaacacacatccatctcaagaggaacatttataccaggcagtcagagctggaagtgtatggagagcccagcccaccaggtcctgccttttgcggtgataaccttctctggcagagtgactttacaacttaactaggaaacccatgtgaggctcctcagacaggatcttgaacagcccaaagtatcattctcagataggggcacccaagctaagggtattagccaaagatgccaggatgggtagctagcccatgtttagatccaggtctccaattcatggttatcagggcatgtgttcaacaacccccaaagtccacgcaggtggcttgtagaaacctttgggcagcctcatgtctgctaaaacagccatcttcaagacagcccctgaaaagagaccagttcaggtcctgccctgctgttctttgctggagatgaggaacaggtgctggggctaaagtttggggtagagcacaagggacaagaggaactcttggagttggctgggtgagagggctctccatttgctacctgtagtagcctgcctcttaactggttgcttctccctagttccagccctgccctggtctgatgccccaacactgcccttgctttgttttccctgtcacctccctattattaaatgttttctacag

SEQ ID NO: 239286 - DNA, 2041 bp, Artificial Sequence
  derived and/or modified sequence
cccgacccagcgttttccttgggattccgacctccccctcagagaagacaggaggtcgggaaggacctgcagcccaggggcttccaagatgaggcccagagactcggattatcaatgcagagaaatctgaattcaatgaggatcaagccgcctgtgggaagctgtgcatccggagatgtgagtttggggctgaagaagagtggctgaccctgtgcccagaggagttcctgacaggccattactgggcactgttcgatgggcacggcggtcctgcagcagccatcttggctgccaacaccctgcactcctgcttgcgccggcagctggaggccgtggtggaaggcttggtggccactcagccccccatgcacctcaatggccgctgcatctgccccagtgaccctcagtttgtggaggaaaagggcatcagggcagaagacttggtgatcggggcattggagagtgcctttcaggaatgtgatgaggtgatcgggcgggagctggaggcctcaggccagatgggcggctgcacagccctggtggctgtgtccctgcagggaaagctgtacatggccaatgctggggatagcagggccatcttggtgcggagagatgagatacggccactgagcttcgagttcaccccagagactgagcggcagcggatccagcagctggcctttgtctatcctgagcttctggctggtgagttcacccgactggagttccctcggcggctgaagggggatgacttgggacagaaggttttgttcagggatcaccacatgagtggctggagctacaaacgtgtggagaaatcggatctcaagtacccactgatccatggacagggtaggcaggctcggttactaggaacactggctgtctcccggggcctgggagaccatcagctcagagtcctggacacaaacatccagctcaagcccttcttgctctctgtgccacaggtgactgtgctggatgtggaccagctggagctacaggaggatgatgtggttgtcatggcaactgatggactctgggatgtactgtccaacgagcaggtggcatggctggtgcggagcttcctccctgggaaccaagaggacccacacaggttctcaaagctggcccagatgctgatacacagcacacagggaaaggaagacagtctcacagaggaagggcaggtgtcctacgatgacgtctctgtgttcgtgattcccttgcacagtcagggccaagagagcagtgaccactgaggattcagacactgtatcccagaactgctctagtgcccgggtgtggtctgggcatccctccagtgtgaccaagagcaaatcctgcctgccctatccctagccaccgcccagtgctctcactatccacctcaacacacatccatctcaagaggaacatttataccaggcagtcagagctggaagtgtatggagagcccagcccaccaggtcctgccttttgcggtgataaccttctctggcagagtgactttacaacttaactaggaaacccatgtgaggctcctcagacaggatcttgaacagcccaaagtatcattctcagataggggcacccaagctaagggtattagccaaagatgccaggatgggtagctagcccatgtttagatccaggtctccaattcatggttatcagggcatgtgttcaacaacccccaaagtccacgcaggtggcttgtagaaacctttgggcagcctcatgtctgctaaaacagccatcttcaagacagcccctgaaaagagaccagttcaggtcctgccctgctgttctttgctggagatgaggaacaggtgctggggctaaagtttggggtagagcacaagggacaagaggaactcttggagttggctgggtgagagggctctccatttgctacctgtagtagcctgcctcttaactggttgcttctccctagttccagccctgccctggtctgatgccccaacactgcccttgctttgttttccctgtcacctccctattattaaatgttttctac

SEQ ID NO: 239287 - DNA, 1380 bp, Artificial Sequence
  derived and/or modified sequence
atgtccgccggctggttccggcgccgcttcctgcctggggagccgctccccgcgccgcggccgcctgggccgcatgccagccccgtgccctaccgacggccccgcttccttcgcggctccagctccagccccggggcggccgacgcctcgcgccgcccagactcccggcccgtgcgcagccccgcacgaggacgcacgctaccctggaatgcaggctacgccgagattatcaatgcagagaaatctgaattcaatgaggatcaagccgcctgtgggaagctgtgcatccggagatgtgagtttggggctgaagaagagtggctgaccctgtgcccagaggagttcctgacaggccattactgggcactgttcgatgggcacggcggtcctgcagcagccatcttggctgccaacaccctgcactcctgcttgcgccggcagctggaggccgtggtggaaggcttggtggccactcagccccccatgcacctcaatggccgctgcatctgccccagtgaccctcagtttgtggaggaaaagggcatcagggcagaagacttggtgatcggggcattggagagtgcctttcaggaatgtgatgaggtgatcgggcgggagctggaggcctcaggccagatgggcggctgcacagccctggtggctgtgtccctgcagggaaagctgtacatggccaatgctggggatagcagggccatcttggtgcggagagatgagatacggccactgagcttcgagttcaccccagagactgagcggcagcggatccagcagctggcctttgtctatcctgagcttctggctggtgagttcacccgactggagttccctcggcggctgaagggggatgacttgggacagaaggttttgttcagggatcaccacatgagtggctggagctacaaacgtgtggagaaatcggatctcaagtacccactgatccatggacagggtaggcaggctcggttactaggaacactggctgtctcccggggcctgggagaccatcagctcagagtcctggacacaaacatccagctcaagcccttcttgctctctgtgccacaggtgactgtgctggatgtggaccagctggagctacaggaggatgatgtggttgtcatggcaactgatggactctgggatgtactgtccaacgagcaggtggcatggctggtgcggagcttcctccctgggaaccaagaggacccacacaggttctcaaagctggcccagatgctgatacacagcacacagggaaaggaagacagtctcacagaggaagggcaggtgtcctacgatgacgtctctgtgttcgtgattcccttgcacagtcagggccaagagagcagtgaccactga

SEQ ID NO: 239288 - DNA, 1380 bp, Artificial Sequence
  derived and/or modified sequence
atgagcgccggctggttcagaagaagattcctgcccggcgagcccctgcccgcccccagaccccccggcccccacgccagccccgtgccctacagaagacccagattcctgagaggcagcagcagcagccccggcgccgccgacgccagcagaagacccgacagcagacccgtgagaagccccgccagaggcagaaccctgccctggaacgccggctacgccgagatcatcaacgccgagaagagcgagttcaacgaggaccaggccgcctgcggcaagctgtgcatcagaagatgcgagttcggcgccgaggaggagtggctgaccctgtgccccgaggagttcctgaccggccactactgggccctgttcgacggccacggcggccccgccgccgccatcctggccgccaacaccctgcacagctgcctgagaagacagctggaggccgtggtggagggcctggtggccacccagccccccatgcacctgaacggcagatgcatctgccccagcgacccccagttcgtggaggagaagggcatcagagccgaggacctggtgatcggcgccctggagagcgccttccaggagtgcgacgaggtgatcggcagagagctggaggccagcggccagatgggcggctgcaccgccctggtggccgtgagcctgcagggcaagctgtacatggccaacgccggcgacagcagagccatcctggtgagaagagacgagatcagacccctgagcttcgagttcacccccgagaccgagagacagagaatccagcagctggccttcgtgtaccccgagctgctggccggcgagttcaccagactggagttccccagaagactgaagggcgacgacctgggccagaaggtgctgttcagagaccaccacatgagcggctggagctacaagagagtggagaagagcgacctgaagtaccccctgatccacggccagggcagacaggccagactgctgggcaccctggccgtgagcagaggcctgggcgaccaccagctgagagtgctggacaccaacatccagctgaagcccttcctgctgagcgtgccccaggtgaccgtgctggacgtggaccagctggagctgcaggaggacgacgtggtggtgatggccaccgacggcctgtgggacgtgctgagcaacgagcaggtggcctggctggtgagaagcttcctgcccggcaaccaggaggacccccacagattcagcaagctggcccagatgctgatccacagcacccagggcaaggaggacagcctgaccgaggagggccaggtgagctacgacgacgtgagcgtgttcgtgatccccctgcacagccagggccaggagagcagcgaccactag

SEQ ID NO: 239289 - protein, 265 aa, Artificial Sequence
  derived and/or modified sequence
MCMVIFAPLFAIFAFATCGGYSGGLRLSVDCVNKTESNLSIDIAFAYPFRLHQVTFEVPTCEGKERQKLALIGDSSSSAEFFVTVAVFAFLYSLAATVVYIFFQNKYRENNRGPLIDFIVTVVFSFLWLVGSSAWAKGLSDVKVATDPKEVLLLMSACKQPSNKCMAIHSPVMSSLNTSVVFGFLNFILWAGNIWFVFKETGWHSSGQRYLSDPMEKHSSSYNQGGYNQDSYGSSSGYSQQASLGPTSDEFGQQPTGPTSFTNQI

SEQ ID NO: 239290 - DNA, 798 bp, Artificial Sequence
  derived and/or modified sequence
atgtgcatggtgatcttcgcccccctgttcgccatcttcgccttcgccacctgcggcggctacagcggcggcctgagactgagcgtggactgcgtgaacaagaccgagagcaacctgagcatcgacatcgccttcgcctaccccttcagactgcaccaggtgaccttcgaggtgcccacctgcgagggcaaggagagacagaagctggccctgatcggcgacagcagcagcagcgccgagttcttcgtgaccgtggccgtgttcgccttcctgtacagcctggccgccaccgtggtgtacatcttcttccagaacaagtacagagagaacaacagaggccccctgatcgacttcatcgtgaccgtggtgttcagcttcctgtggctggtgggcagcagcgcctgggccaagggcctgagcgacgtgaaggtggccaccgaccccaaggaggtgctgctgctgatgagcgcctgcaagcagcccagcaacaagtgcatggccatccacagccccgtgatgagcagcctgaacaccagcgtggtgttcggcttcctgaacttcatcctgtgggccggcaacatctggttcgtgttcaaggagaccggctggcacagcagcggccagagatacctgagcgaccccatggagaagcacagcagcagctacaaccagggcggctacaaccaggacagctacggcagcagcagcggctacagccagcaggccagcctgggccccaccagcgacgagttcggccagcagcccaccggccccaccagcttcaccaaccagatctag

SEQ ID NO: 239291 - DNA, 831 bp, Artificial Sequence
  derived and/or modified sequence
atgtgcatggtgatcttcgccccccacaacgaggagtgcaagagccacttccacctgctgttcgccatcttcgccttcgccacctgcggcggctacagcggcggcctgagactgagcgtggactgcgtgaacaagaccgagagcaacctgagcatcgacatcgccttcgcctaccccttcagactgcaccaggtgaccttcgaggtgcccacctgcgagggcaaggagagacagaagctggccctgatcggcgacagcagcagcagcgccgagttcttcgtgaccgtggccgtgttcgccttcctgtacagcctggccgccaccgtggtgtacatcttcttccagaacaagtacagagagaacaacagaggccccctgatcgacttcatcgtgaccgtggtgttcagcttcctgtggctggtgggcagcagcgcctgggccaagggcctgagcgacgtgaaggtggccaccgaccccaaggaggtgctgctgctgatgagcgcctgcaagcagcccagcaacaagtgcatggccatccacagccccgtgatgagcagcctgaacaccagcgtggtgttcggcttcctgaacttcatcctgtgggccggcaacatctggttcgtgttcaaggagaccggctggcacagcagcggccagagatacctgagcgaccccatggagaagcacagcagcagctacaaccagggcggctacaaccaggacagctacggcagcagcagcggctacagccagcaggccagcctgggccccaccagcgacgagttcggccagcagcccaccggccccaccagcttcaccaaccagatctag

SEQ ID NO: 239292 - DNA, 798 bp, Artificial Sequence
  derived and/or modified sequence
atgtgcatggttatattcgctcccctgtttgcaatattcgccttcgccacatgcggcgggtattccggtggcctgcggttaagcgtcgactgcgtgaacaagacagagagtaatctgtccatcgacatcgcgttcgcatatccctttcggctgcatcaggtcaccttcgaagtgcctacttgtgaaggaaaagaaaggcagaagctggctcttattggcgattccagcagcagtgccgagttttttgttactgtggctgtcttcgcgttcctgtatagcttggcggctaccgtggtgtatattttctttcagaataaataccgggagaataacaggggcccattgatcgactttattgtgaccgtcgtgtttagtttcctgtggttggtgggatcaagcgcttgggcgaaaggccttagcgacgttaaagtggccacagatcctaaagaggtgctgcttttgatgagtgcctgcaagcaaccttcaaacaagtgcatggccattcacagtcctgtcatgagttctctcaatacctccgtcgtcttcggttttctgaactttattctctgggctgggaatatctggttcgtcttcaaagaaactgggtggcattcaagtggccagcgctatctgagcgacccaatggagaagcactccagtagctataatcagggaggatataatcaggattcctatggctcgtcgtctggttacagccagcaggcttctctgggccccacatccgatgagttcggccaacaacctaccggccctacgtcattcacaaatcagatttag

SEQ ID NO: 239293 - DNA, 831 bp, Artificial Sequence
  derived and/or modified sequence
atgtgtatggtaatcttcgctccccacaacgaagaatgtaaatcacacttccatctcctgtttgctatttttgcatttgcaacctgtggcgggtactcgggaggacttcgcctcagcgtggactgtgtaaataaaaccgagagtaacctttcgatcgatattgcattcgcttatccgtttcgcctgcaccaggtgactttcgaagttcccacttgtgagggtaaggagcgccagaagctggcgctgatcggagactcctcaagttccgccgagttttttgtcacggtcgctgtattcgccttcctgtattccttggccgccaccgtagtgtacatcttttttcagaacaaataccgagagaacaaccgcggaccactgatcgacttcatcgtgacagtggtgtttagctttctctggcttgtcggcagtagcgcctgggcaaaggggctttccgatgtcaaggtcgcaacggacccaaaggaggtccttttactcatgagcgcttgtaaacagccgagcaataagtgtatggctattcatagccccgtgatgtctagcttgaatacctcagtggtctttggcttcttgaacttcattctgtgggctggtaacatttggttcgtgtttaaggagacgggctggcacagttctggacaacggtatctgtctgacccgatggaaaaacattcaagtagttataatcaaggtgggtataatcaggactcatatggcagctcatccggctactcccagcaggcatcactgggtccaacttcagatgagttcggccagcaaccgacgggcccgacctctttcaccaatcagatctag

SEQ ID NO: 239294 - DNA, 798 bp, Artificial Sequence
  derived and/or modified sequence
atgtgcatggtgatctttgcccccctgtttgccatctttgcctttgccacctgtggcggctacagcggcggcctgcggctgtctgtggactgtgtgaacaagacagagagcaacctgagcattgatattgcctttgcctaccccttccggctgcaccaggtgacctttgaggtgcccacctgtgagggcaaggagcggcagaagctggccctgattggagacagcagcagcagcgctgagttctttgtgacagtggccgtgtttgccttcctgtacagcctggccgccaccgtggtgtacatcttcttccagaacaagtaccgggagaacaacagaggccccctgattgacttcatcgtgacagtggtgttctccttcctgtggctggtgggcagcagcgcctgggccaagggcctgagtgatgtgaaggtggccacagaccccaaggaggtgctgctgctgatgtctgcctgcaagcagcccagcaacaagtgcatggccatccacagccctgtgatgagcagcctgaacacctctgtggtgtttggcttcctgaacttcatcctgtgggccggcaacatctggtttgtgttcaaggagaccggctggcacagcagcggccagcgctacctgagtgaccccatggagaagcacagcagcagctacaaccagggcggctacaaccaggacagctatggcagcagcagcggctacagccagcaggccagcctgggccccaccagtgatgaatttggccagcagcccaccggccccaccagcttcaccaaccagatctag

SEQ ID NO: 239295 - DNA, 831 bp, Artificial Sequence
  derived and/or modified sequence
atgtgcatggtgatctttgccccccacaatgaggagtgcaagagccacttccacctgctgtttgccatctttgcctttgccacctgtggcggctacagcggcggcctgcggctgtctgtggactgtgtgaacaagacagagagcaacctgagcattgacatcgcctttgcctaccccttccggctgcaccaggtgacctttgaggtgcccacctgtgagggcaaggagcggcagaagctggccctgattggagacagcagcagcagcgctgagttctttgtgacagtggccgtgtttgccttcctgtacagcctggccgccaccgtggtgtacatcttcttccagaacaagtaccgggagaacaacagaggccccctgattgacttcatcgtgacagtggtgttctccttcctgtggctggtgggcagcagcgcctgggccaagggcctgagtgatgtgaaggtggccacagaccccaaggaggtgctgctgctgatgtctgcctgcaagcagcccagcaacaagtgcatggccatccacagccctgtgatgagcagcctgaacacctctgtggtgtttggcttcctgaacttcatcctgtgggccggcaacatctggtttgtgttcaaggagaccggctggcacagcagcggccagcgctacctgagtgaccccatggagaagcacagcagcagctacaaccagggcggctacaaccaggacagctatggcagcagcagcggctacagccagcaggccagcctgggccccaccagtgatgaatttggccagcagcccaccggccccaccagcttcaccaaccagatctag

SEQ ID NO: 239296 - DNA, 798 bp, Artificial Sequence
  derived and/or modified sequence
atgtgcatggtgatcttcgcccccctgttcgccatcttcgccttcgctacctgcggaggatattccggcgggttgaggttgtccgtggattgcgtgaacaaaacagagtcgaaccttagcatagacattgcatttgcatatcctttcaggctacaccaggtcacttttgaggtgcccacttgtgaggggaaagaacgccaaaagttggctcttatcggggactcgtcgtcatccgcagaattctttgtgacagtggcggtattcgccttcttatacagtctcgctgccacagtggtctatatattcttccagaataagtacagagaaaataatcgcggaccgttgatagacttcatcgtgaccgttgtgttctctttcctatggttggtggggtcctcagcttgggccaagggcctgagcgacgtcaaggtagccaccgatccgaaggaagtgctgctcctaatgagcgcgtgtaaacaaccatctaataaatgcatggcaatacactcacccgtgatgagtagcctcaacacctccgtggtgtttggttttctcaatttcatactgtgggcaggcaacatctggtttgtatttaaggagacaggatggcactcgtccggccaaagatacctgtctgatccgatggagaaacatagctcttcttataaccagggtgggtacaatcaggattcatatggatcaagtagcggttacagccaacaagcctcgctgggcccaactagcgacgagttcggccagcagcccaccggccccacttctttcaccaatcagatttag

SEQ ID NO: 239297 - DNA, 831 bp, Artificial Sequence
  derived and/or modified sequence
atgtgcatggtgatcttcgccccccacaacgaggagtgcaagagccacttccatcttctttttgccatcttcgccttcgccacgtgcggcggctacagcggcggcttgcgtttgtcagtagattgcgtgaataaaacggaatcgaacctgtccattgacattgcttttgcatacccatttagactccaccaagtgactttcgaagttcccacctgcgaggggaaagagcggcagaagctagcactgatcggcgattcaagcagcagtgctgagttctttgttaccgtggccgtgtttgcatttctgtactccctcgcagccaccgtcgtgtacatttttttccagaacaaataccgtgagaacaatcggggtccccttatagatttcatcgtgaccgtggtgttctcattcctctggctcgtgggcagctccgcatgggccaaaggcttgagcgacgtaaaggtcgctaccgaccctaaggaggtgttactactaatgtcagcgtgcaagcagccgagcaataaatgcatggctattcacagtccagttatgagtagtcttaacactagtgtggtcttcggatttctgaacttcatcctctgggccggtaacatatggttcgtgttcaaagagactggctggcacagttccggacagcggtacttgtcagaccctatggagaagcatagctctagttataaccagggagggtataaccaggactcttatggttcctcgtcagggtacagccagcaagcaagcctcggaccaacttccgatgagtttggacagcagcccaccggccccactagctttacaaatcagatctag

SEQ ID NO: 239298 - DNA, 798 bp, Artificial Sequence
  derived and/or modified sequence
atgtgcatggtgatctttgccccactcttcgccatcttcgccttcgctacatgcgggggttactctggaggactgcgactgtcagtggattgcgttaataagactgagagcaatctgtctatcgacatcgctttcgcctaccctttcagactgcatcaggtgaccttcgaggtccctacttgtgaggggaaggaacggcaaaaattagccttgattggcgattcctctagcagcgcagaattttttgtgaccgtggccgtctttgccttcctgtattccttagcagcaactgtggtttacatcttttttcaaaacaagtacagggaaaacaaccggggtcctctgattgacttcatcgtgaccgtggtcttctcgtttctgtggcttgtaggctcgtccgcgtgggctaaaggcctgagtgatgtcaaggtcgcaacagacccaaaggaggttttattactgatgagcgcttgcaagcaacctagcaataagtgtatggcaatccattcaccagtgatgtcctcactgaacacaagtgtcgttttcgggttcttgaatttcatactgtgggccggaaacatctggttcgtgttcaaggagactgggtggcacagcagtggacaacgttacctgagtgatcccatggaaaaacattcatctagctataaccaggggggttataaccaagattcctatggaagttctagcggctactctcagcaagccagcctgggaccgacctctgacgagttcggacagcaacccacaggcccaaccagttttaccaaccaaatttag

SEQ ID NO: 239299 - DNA, 831 bp, Artificial Sequence
  derived and/or modified sequence
atgtgtatggtaatatttgctccccataacgaagaatgtaagtcccactttcatctgctcttcgcaatatttgcattcgccacatgtgggggttactcagggggtctgaggctgtcagtggactgtgttaataaaactgagtctaacctgagtatcgacatcgcctttgcgtatccctttagactccaccaggtgacattcgaggtgcccacctgcgagggcaaagagcgccagaagttggcactcatcggtgactcctcctcaagcgccgagttcttcgtaacagtcgcagtatttgcctttttgtactctctagcagcaactgtcgtgtatattttttttcaaaataagtacagggaaaataacagaggcccattaatcgatttcatagttactgtggtgttttcatttctgtggcttgtcggttccagcgcctgggcgaaaggcctgtccgacgtcaaggtggccacggatccaaaagaggtcctgcttcttatgtccgcctgtaaacagccctcaaataaatgtatggccatccactctccagtcatgtcctccttgaatacttccgtggtgttcggattcttgaattttattttgtgggccggaaatatctggtttgtgtttaaagaaaccgggtggcacagttccgggcagcggtacctctccgatcccatggaaaagcattcctcctcttacaaccaaggcggatataaccaagacagttatggatcctcaagcggctatagtcaacaagccagccttggtccgaccagtgacgaattcggccagcaacctaccggccctacatcttttacaaaccagatttag

SEQ ID NO: 239300 - DNA, 2607 bp, Artificial Sequence
  derived and/or modified sequence
aaagcagtcctgcacttccagttgtgagccaagagccaagtgtgggagctcaccatggtggcagccacctccccaccaagcaggcagcgttcaccagaggggagtatcaggttcctgtactcagctgtgggttgtcactgtctaataatatgaccgttttgccatctctctgcaaatgaggctgaagctgctatctgattggtataacatctcactttccctctgcattgattttcttcttctcctcctttgcttcataaaaagagggacaagtggctggtgctgtggacagagaagctttatttttagtatgagacaacctctattttctttcaggagagggaagttggattatcaattcttttgtaaatgtgtatggtgatatttgctccgctttttgcaatctttgcatttgcaacatgcggtggctattctggaggcctgcggctgagtgtggactgcgtcaacaagacagaaagtaacctcagcatcgacatagcgtttgcctacccattcaggttgcaccaggtgacgtttgaggtgcccacctgcgagggaaaggaacggcagaagctggcattgattggtgactcctcgtcttcagcagagttcttcgtcactgttgctgtcttcgccttcctctactctttggctgccactgtcgtttacattttcttccagaacaaataccgggaaaacaaccggggcccactcattgacttcattgtcactgtagtcttttcgttcttgtggttggtgggttcatcagcttgggcaaaaggactgtctgacgtcaaagttgcaacggatcccaaggaagtattgctactaatgtcagcttgcaaacagccatccaacaaatgcatggctatccacagccctgttatgtcaagcttaaacacttctgtggtctttggattcttgaactttattctctgggctggaaacatatggtttgttttcaaggagaccggctggcattcttcgggacagagatatctttcagatccaatggagaagcactccagcagctataatcaaggtggttacaaccaagacagctatggatcaagcagtgggtacagtcagcaggcgagtttggggccaacctcagatgagtttggccaacagcctactggccccacttcctttaccaatcagatttaacagagtagcatttgcattcttctgcagtcgcctcaccatcttccatttcagtggcagaagaattttttaagggtttcaatcaattattaatgcagagagtattgaatgtaaatcagagctctctagtcttcattaaggcagcaagtcctgggttgtgaaaaatgatacttagagatgaggcgacatgaggagatatattattcatcatagatggctaattggagagtaccttgttatatatacagatactttcatggtcattttgtatgtatgttaaagtagtagaagtattttgtagcttaaagtctctagtatgtaatatgcataaagtaaatcaaatagcgttgagttttcttatgcattttgatgtgaaagatgttataataatttctagaagacaatttggtgtatcacaacatgcatgtcttatttttttttagttttaagtcctataggactatgagtctctaagttatttgtttcagaaaattattctttttttatgtgataaatcatatgatttaagtgcatgaataagcattttcccacacaatgaacatttgaactgtgtttatgaaaattttctggtttgcaccatgaatttgtcaaatggatatttataggaatatattcactactttgtatactttgcaaatttgtctctctggctttacccaagttctgaatgcattgtaattaaaatttaagtttttcttttcccccattagtaaacatttagtgctacatatgataactgcccaatatttattctatttacttagctaaatatttgcattcttgtaaccttctatggtgttttgtggctcttatcttgtggaccataaataacacggcccaataactctttgtgtttatggagtgttgttttcttagaataatggagatgcagatatagataccatagtcaaggtaccgccttgctgaagtatttatttataaagaatattctgtagaacctctactaccagctatatttttaaatcctgtttatttgtaaagctaatatgctcctcaatgtaattattaaaaattctcaagtcacagctaaacttactaattctgattttagtgtagcccctaaattaaaaatggcttccatatgccactctgtaccccaaagagagttctcatgaaatattctccagaatgtattcattatcaagaaaatgtcaatcgtcacttcctcgttttaactcagctgaaacaccaggacccaatagagagggcaagctgagcatctgtatttccagataaaagttgttattgatgtataaactcgttgcgtgattagtgatgttggaagcattttagcacaaaacagccttgtgtcttagatgatatctgtaaccagtttctgaatcccgttggataaaactgtattgtgatatctatttgatgttaataaagttattgcataca

SEQ ID NO: 239301 - DNA, 2383 bp, Artificial Sequence
  derived and/or modified sequence
ataaaaagagggacaagtggctggtgctgtggacagagaagctttatttttagtatgagacaacctctattttctttcaggagagggaagttggattatcaattcttttgtaaatgtgtatggtgatatttgctccgcataatgaagaatgcaagagtcatttccatttactttttgcaatctttgcatttgcaacatgcggtggctattctggaggcctgcggctgagtgtggactgcgtcaacaagacagaaagtaacctcagcatcgacatagcgtttgcctacccattcaggttgcaccaggtgacgtttgaggtgcccacctgcgagggaaaggaacggcagaagctggcattgattggtgactcctcgtcttcagcagagttcttcgtcactgttgctgtcttcgccttcctctactctttggctgccactgtcgtttacattttcttccagaacaaataccgggaaaacaaccggggcccactcattgacttcattgtcactgtagtcttttcgttcttgtggttggtgggttcatcagcttgggcaaaaggactgtctgacgtcaaagttgcaacggatcccaaggaagtattgctactaatgtcagcttgcaaacagccatccaacaaatgcatggctatccacagccctgttatgtcaagcttaaacacttctgtggtctttggattcttgaactttattctctgggctggaaacatatggtttgttttcaaggagaccggctggcattcttcgggacagagatatctttcagatccaatggagaagcactccagcagctataatcaaggtggttacaaccaagacagctatggatcaagcagtgggtacagtcagcaggcgagtttggggccaacctcagatgagtttggccaacagcctactggccccacttcctttaccaatcagatttaacagagtagcatttgcattcttctgcagtcgcctcaccatcttccatttcagtggcagaagaattttttaagggtttcaatcaattattaatgcagagagtattgaatgtaaatcagagctctctagtcttcattaaggcagcaagtcctgggttgtgaaaaatgatacttagagatgaggcgacatgaggagatatattattcatcatagatggctaattggagagtaccttgttatatatacagatactttcatggtcattttgtatgtatgttaaagtagtagaagtattttgtagcttaaagtctctagtatgtaatatgcataaagtaaatcaaatagcgttgagttttcttatgcattttgatgtgaaagatgttataataatttctagaagacaatttggtgtatcacaacatgcatgtcttatttttttttagttttaagtcctataggactatgagtctctaagttatttgtttcagaaaattattctttttttatgtgataaatcatatgatttaagtgcatgaataagcattttcccacacaatgaacatttgaactgtgtttatgaaaattttctggtttgcaccatgaatttgtcaaatggatatttataggaatatattcactactttgtatactttgcaaatttgtctctctggctttacccaagttctgaatgcattgtaattaaaatttaagtttttcttttcccccattagtaaacatttagtgctacatatgataactgcccaatatttattctatttacttagctaaatatttgcattcttgtaaccttctatggtgttttgtggctcttatcttgtggaccataaataacacggcccaataactctttgtgtttatggagtgttgttttcttagaataatggagatgcagatatagataccatagtcaaggtaccgccttgctgaagtatttatttataaagaatattctgtagaacctctactaccagctatatttttaaatcctgtttatttgtaaagctaatatgctcctcaatgtaattattaaaaattctcaagtcacagctaaacttactaattctgattttagtgtagcccctaaattaaaaatggcttccatatgccactctgtaccccaaagagagttctcatgaaatattctccagaatgtattcattatcaagaaaatgtcaatcgtcacttcctcgttttaactcagctgaaacaccaggacccaatagagagggcaagctgagcatctgtatttccagataaaagttgttattgatgtataaactcgttgcgtgattagtgatgttggaagcattttagcacaaaacagccttgtgtcttagatgatatctgtaaccagtttctgaatcccgttggataaaactgtattgtgatatctatttgatgttaataaagttattgcatac

SEQ ID NO: 239302 - protein, 688 aa, Artificial Sequence
  derived and/or modified sequence
MAAEIDFLREQNRRLNEDFRRYQMESFSKYSSVQKAVCQGEGDDTFENLVFDQSFLAPLVTEYDKHLGELNGQLKYYQKQVGEMKLQLENVIKENERLHSELKDAVEKKLEAFPLGTEVGTDIYADDETVRNLQEQLQLANQEKTQAVELWQTVSQELDRLHKLYQEHMTEAQIHVFESQKQKDQLFDFQQLTKQLHVTNENMEVTNQQFLKTVTEQSVIIEQLRKKLRQAKLELRVAVAKVEELTNVTEDLQGQMKKKEKDVVSAHGREEASDRRLQQLQSSIKQLEIRLCVTIQEANQLRTENTHLEKQTRELQAKCNELENERYEAIVRARNSMQLLEEANLQKSQALLEEKQKEEDIEKMKETVSRFVQDATIRTKKEVANTKKQCNIQISRLTEELSALQMECAEKQGQIERVIKEKKAVEEELEKIYREGRGNESDYRKLEEMHQRFLVSERSKDDLQLRLTRAENRIKQLETDSSEEISRYQEMIQKLQNVLESERENCGLVSEQRLKLQQENKQLRKETESLRKIALEAQKKAKVKISTMEHEFSIKERGFEVQLREMEDSNRNSIVELRHLLATQQKAANRWKEETKKLTESAEIRINNLKSELSRQKLHTQELLSQLEMANEKVAENEKLILEHQEKANRLQRRLSQAEERAASASQQLSVITVQRRKAASLMNLENI

SEQ ID NO: 239303 - protein, 307 aa, Artificial Sequence
  derived and/or modified sequence
MAAEIDFLREQNRRLNEDFRRYQMESFSKYSSVQKAVCQGEGDDTFENLVFDQSFLAPLVTEYDKHLGELNGQLKYYQKQVGEMKLQLENVIKENERLHSELKDAVEKKLEAFPLGTEVGTDIYADDETVRNLQEQLQLANQEKTQAVELWQTVSQELDRLHKLYQEHMTEAQIHVFESQKQKDQLFDFQQLTKQLHVTNENMEVTNQQFLKTVTEQSVIIEQLRKKLRSELSRQKLHTQELLSQLEMANEKVAENEKLILEHQEKANRLQRRLSQAEERAASASQQLSVITVQRRKAASLMNLENI

SEQ ID NO: 239304 - protein, 175 aa, Artificial Sequence
  derived and/or modified sequence
MAAEIDFLREQNRRLNEDFRRYQMESFSKYSSVQKAVCQGEGDDTFENLVFDQSFLAPLVTEYDKHLGELNGQLKYYQKQVGEMKLQLENVIKENERSELSRQKLHTQELLSQLEMANEKVAENEKLILEHQEKANRLQRRLSQAEERAASASQQLSVITVQRRKAASLMNLENI

SEQ ID NO: 239305 - DNA, 2067 bp, Artificial Sequence
  derived and/or modified sequence
atggccgccgagatcgacttcctgagagagcagaacagaagactgaacgaggacttcagaagataccagatggagagcttcagcaagtacagcagcgtgcagaaggccgtgtgccagggcgagggcgacgacaccttcgagaacctggtgttcgaccagagcttcctggcccccctggtgaccgagtacgacaagcacctgggcgagctgaacggccagctgaagtactaccagaagcaggtgggcgagatgaagctgcagctggagaacgtgatcaaggagaacgagagactgcacagcgagctgaaggacgccgtggagaagaagctggaggccttccccctgggcaccgaggtgggcaccgacatctacgccgacgacgagaccgtgagaaacctgcaggagcagctgcagctggccaaccaggagaagacccaggccgtggagctgtggcagaccgtgagccaggagctggacagactgcacaagctgtaccaggagcacatgaccgaggcccagatccacgtgttcgagagccagaagcagaaggaccagctgttcgacttccagcagctgaccaagcagctgcacgtgaccaacgagaacatggaggtgaccaaccagcagttcctgaagaccgtgaccgagcagagcgtgatcatcgagcagctgagaaagaagctgagacaggccaagctggagctgagagtggccgtggccaaggtggaggagctgaccaacgtgaccgaggacctgcagggccagatgaagaagaaggagaaggacgtggtgagcgcccacggcagagaggaggccagcgacagaagactgcagcagctgcagagcagcatcaagcagctggagatcagactgtgcgtgaccatccaggaggccaaccagctgagaaccgagaacacccacctggagaagcagaccagagagctgcaggccaagtgcaacgagctggagaacgagagatacgaggccatcgtgagagccagaaacagcatgcagctgctggaggaggccaacctgcagaagagccaggccctgctggaggagaagcagaaggaggaggacatcgagaagatgaaggagaccgtgagcagattcgtgcaggacgccaccatcagaaccaagaaggaggtggccaacaccaagaagcagtgcaacatccagatcagcagactgaccgaggagctgagcgccctgcagatggagtgcgccgagaagcagggccagatcgagagagtgatcaaggagaagaaggccgtggaggaggagctggagaagatctacagagagggcagaggcaacgagagcgactacagaaagctggaggagatgcaccagagattcctggtgagcgagagaagcaaggacgacctgcagctgagactgaccagagccgagaacagaatcaagcagctggagaccgacagcagcgaggagatcagcagataccaggagatgatccagaagctgcagaacgtgctggagagcgagagagagaactgcggcctggtgagcgagcagagactgaagctgcagcaggagaacaagcagctgagaaaggagaccgagagcctgagaaagatcgccctggaggcccagaagaaggccaaggtgaagatcagcaccatggagcacgagttcagcatcaaggagagaggcttcgaggtgcagctgagagagatggaggacagcaacagaaacagcatcgtggagctgagacacctgctggccacccagcagaaggccgccaacagatggaaggaggagaccaagaagctgaccgagagcgccgagatcagaatcaacaacctgaagagcgagctgagcagacagaagctgcacacccaggagctgctgagccagctggagatggccaacgagaaggtggccgagaacgagaagctgatcctggagcaccaggagaaggccaacagactgcagagaagactgagccaggccgaggagagagccgccagcgccagccagcagctgagcgtgatcaccgtgcagagaagaaaggccgccagcctgatgaacctggagaacatctag

SEQ ID NO: 239306 - DNA, 2067 bp, Artificial Sequence
  derived and/or modified sequence
atggcagctgagatagattttctgagagagcaaaatcgccggctgaacgaggactttagaagatatcaaatggagagcttctcaaagtattcttccgttcagaaggcggtgtgccagggcgagggggatgacaccttcgagaatctcgtgtttgatcagagtttcctggctccactggtaactgagtatgacaagcatttaggtgaactcaatgggcagttaaaatactaccagaaacaagttggtgaaatgaagctacagctggagaacgtcataaaagagaacgagaggcttcacagcgagcttaaggatgcagtcgaaaaaaaattggaagcattccctctgggaaccgaggtcggaactgacatctacgctgacgacgaaaccgtgcgcaacctccaggaacagttgcagctagccaatcaggagaaaacccaggcagtggagctgtggcaaaccgtgagtcaggagttggaccgattgcataagttgtaccaggagcacatgaccgaagcccaaatccacgttttcgaatcccagaagcagaaagaccagctgttcgactttcagcaactgaccaagcagcttcatgtcacgaacgagaacatggaagttactaaccagcagttcctcaaaacagtgactgagcaaagcgtcataatcgagcagcttcgcaaaaaattacggcaggctaagctagagctcagggttgcagtggcgaaggttgaagaactgactaacgtaacggaggacctgcagggccagatgaaaaaaaaagagaaagatgtggtgtctgcccacgggcgggaagaggcatctgacagacgtctacaacagttacagtcaagtattaagcagctggaaatcaggctgtgtgtcactatccaggaggctaaccaactgcggaccgagaacacccatctggaaaagcaaactcgtgagcttcaggctaaatgcaatgagctcgagaacgagaggtacgaagcgattgtgagggccaggaatagcatgcagcttctcgaggaagcaaatctccaaaaatcacaggctcttttggaggagaagcaaaaagaggaagatatcgagaagatgaaggagacagtgagccgtttcgtccaagacgcgacaatccgcactaagaaggaagtggccaatacaaaaaaacagtgtaatattcaaatctcaagactcacggaggaactttccgctctgcagatggagtgcgctgagaagcagggccaaattgagcgagtgataaaggaaaaaaaagcagtggaagaagagctagaaaagatctatagagaaggcaggggaaacgagagtgactaccggaagttagaagagatgcaccagcgcttcctggtgagcgagcggtccaaggatgacctccagctgcgcctcactcgcgcagagaaccgcataaaacaactcgagaccgactcttcagaagaaatttcccgctatcaggagatgatacaaaagctccagaatgtgctggaaagtgaacgcgagaactgcgggctggtgtctgagcagaggttgaagctgcaacaagagaacaaacaattgcggaaggagacagagtcactccggaaaatagccctagaggctcaaaagaaggccaaagttaagatcagtaccatggaacatgagttttcaataaaagagaggggcttcgaagttcagcttagagagatggaggactccaaccggaactcgattgttgaacttcgtcatcttctggcaactcagcagaaagccgctaacaggtggaaagaggagacaaaaaaactaacggagagcgccgagattcgtatcaataatctcaagagtgagctgtctcggcaaaaacttcatacccaagaattattgagtcagctggagatggctaacgagaaagtggccgaaaacgagaagctgatcttagagcatcaagagaaggcaaatagactacaacggcgcctgagtcaagctgaagagagggctgcctctgcctctcaacagctctctgtgatcaccgtgcagcgccgcaaggccgctagccttatgaacctggaaaacatatag

SEQ ID NO: 239307 - DNA, 2067 bp, Artificial Sequence
  derived and/or modified sequence
atggctgctgagattgacttcctgcgggagcagaacagaaggctgaatgaagacttccgccgctaccagatggagagcttcagcaagtacagctctgtgcagaaggctgtgtgccagggcgagggagatgacacctttgagaacctggtgtttgaccagagcttcctggcccccctggtgacagaatatgacaagcacctgggggagctgaatggccagctgaagtactaccagaagcaggtgggggagatgaagctgcagctggagaatgtcatcaaggaaaatgaaaggctgcacagcgagctgaaggatgctgtggagaagaagctggaggccttccccctgggcacagaggtgggcacagacatctatgcagatgatgaaacagtgaggaacctgcaggagcagctgcagctggccaaccaggagaagacccaggccgtggagctgtggcagacagtgtcccaggagctggaccggctgcacaagctgtaccaggagcacatgacagaggcccagatccacgtgtttgagagccagaagcagaaggaccagctgtttgacttccagcagctgaccaagcagctgcacgtgaccaatgaaaacatggaggtgaccaaccagcagttcctgaagacagtgacagagcagagcgtcatcatcgagcagctgaggaagaagctgcggcaggccaagctggagctgcgggtggccgtggccaaggtggaggagctgaccaacgtgacagaggacctgcagggccagatgaagaagaaggagaaggatgtggtgtctgcccacggccgggaggaggccagtgaccggcggctgcagcagctgcagagcagcatcaagcagctggagatccggctgtgtgtgaccatccaggaggccaaccagctgaggacagagaacacccacctggagaagcagacccgggagctgcaggccaagtgcaatgagctggagaatgaaagatatgaggccatcgtgcgggccaggaacagcatgcagctgctggaggaggccaacctgcagaagagccaggccctgctggaggagaagcagaaggaggaggacatcgagaagatgaaggagaccgtgtccagatttgtgcaggatgccaccatccgcaccaagaaggaggtggccaacaccaagaagcagtgcaacatccagatcagccggctgacagaggagctgagcgccctgcagatggagtgtgccgagaagcagggccagatcgagagggtcatcaaggagaagaaggctgtggaggaggagctggagaagatctaccgggagggcagaggaaatgaaagtgactacaggaagctggaggagatgcaccagcgcttcctggtgtctgagaggagcaaggatgacctgcagctgcggctgaccagggcagaaaatcgcatcaagcagctggagacagacagcagcgaggagatcagccgctaccaggagatgatccagaagctgcagaatgtgctggagagcgagcgggagaactgtggcctggtgtctgagcagaggctgaagctgcagcaggagaacaagcagctgaggaaggagacagagagcctgaggaagatcgccctggaggcccagaagaaggccaaggtgaagatcagcaccatggagcacgagttcagcatcaaggagcggggctttgaggtgcagctgcgggagatggaggacagcaacagaaattccatcgtggagctgcggcacctgctggccacccagcagaaggccgccaaccgctggaaggaggagaccaagaagctgacagaatctgctgagatccgcatcaacaacctgaagtctgagctgagccggcagaagctgcacacccaggagctgctgagccagctggagatggccaatgagaaggtggccgagaatgagaagctgatcctggagcaccaggagaaggccaaccggctgcagaggcggctgagccaggccgaggagcgggccgccagcgccagccagcagctgagcgtcatcaccgtgcagaggaggaaggccgccagcctgatgaacctggagaacatctag

SEQ ID NO: 239308 - DNA, 2067 bp, Artificial Sequence
  derived and/or modified sequence
atggccgccgagatcgacttcctgcgggagcagaaccggcggctgaatgaagacttccgacgctatcagatggagtctttttcaaagtatagctccgtgcagaaggcagtgtgtcaaggggagggcgacgacactttcgagaaccttgtgtttgatcaatccttcctggcccccctggtgactgaatacgataagcatctcggggaactgaatgggcagctgaaatactaccagaaacaggtcggcgagatgaagttgcaacttgaaaacgtcattaaggaaaatgagagactccactctgagctgaaggacgctgttgagaagaaacttgaagccttcccactggggactgaagtcggcaccgatatctacgctgatgacgagactgtccggaaccttcaagaacagctccagttagccaatcaggagaaaacccaggcagtagagctttggcagaccgtgtcgcaggagctggatcgtctgcataagttatatcaggaacatatgaccgaggcccaaattcacgtgtttgaaagtcagaagcagaaggatcagctattcgactttcagcagttgacaaagcagctccacgtcactaacgaaaatatggaagtgacaaatcagcaattcctgaaaaccgttaccgagcagtcagtgattattgagcagttaagaaaaaagcttcgtcaggccaaactcgaactgcgcgtcgctgtcgctaaggtggaggagctgacaaatgttacagaggatctgcaaggtcagatgaagaagaaggaaaaagacgtggtgtccgcacacgggagagaggaagcaagcgaccgaaggctgcagcaactgcaatcctctatcaagcaactggaaatcaggctgtgtgtcaccatacaagaggccaatcaactacgaacagaaaatactcatctggaaaaacagacaagagagctgcaagctaaatgtaacgagctggaaaacgagaggtatgaagctatcgtcagggcccgtaacagtatgcaattattagaggaggcaaacctacagaaatcccaggccttattagaagaaaagcagaaggaagaggatattgaaaaaatgaaggagacagtctcaagattcgttcaggacgccacaatccgcacgaaaaaggaggtcgcgaacacgaagaagcaatgtaacatccaaatatcacggctgacggaagagctgtcagcgctgcagatggaatgcgctgagaagcagggccagattgagcgcgtaatcaaggagaaaaaggccgttgaagaggaactcgagaagatataccgtgaaggacgcggaaatgagtctgactataggaagctggaagagatgcaccaaaggtttttggttagcgaaaggtcaaaagatgacctgcagctcaggttaacacgggcggagaaccgaatcaagcagctagagaccgactctagcgaggagatatctcgatatcaggagatgatacagaagctccagaatgtactggagtccgagagagagaattgcgggctggtgtccgaacaacggctgaagctgcagcaggagaacaagcaactacgtaaggagaccgaaagcctgcgtaagatagccctggaagctcagaagaaggcaaaagttaagatttccaccatggagcacgaatttagcattaaggaacggggcttcgaggtccagctcagagagatggaagacagtaataggaactcgatcgtggaactgcgtcatttgctcgccactcagcagaaagccgccaaccggtggaaggaggaaacaaaaaagctgaccgaatccgccgaaattcgtattaataatctgaagagtgagttatctcggcagaaactgcacactcaggagctgttgagccagttagaaatggcgaacgaaaaggtggccgagaatgaaaagctgatccttgaacaccaggagaaggctaatcgcttgcagaggcgactgtcccaagctgaagagcgagcggccagcgccagccaacagctctcggttatcaccgttcagcggcgaaaggccgcctcgcttatgaacctcgagaacatttag

SEQ ID NO: 239309 - DNA, 2067 bp, Artificial Sequence
  derived and/or modified sequence
atggctgccgagatcgattttttgagggaacagaaccgtcgcctcaatgaagactttcgcagataccagatggagtctttctctaaatacagctcagtacagaaagcggtatgccagggagaaggagacgacacttttgagaacctggtgtttgaccagagctttttagctcccctcgtgacggagtacgacaaacacctcggggaactgaacggacagctgaaatactatcagaagcaggtcggagagatgaaactgcagcttgagaacgtaattaaagagaatgagcgtctccatagcgaattgaaagacgcggtggagaagaaactagaagcatttccactgggcactgaggtcggtaccgacatttacgctgacgacgagaccgtaagaaatctgcaggaacagctgcagctggctaaccaagaaaagacacaagccgtggaactatggcagactgtctcccaggaactggaccgccttcacaagctgtatcaggagcacatgaccgaggcccaaattcatgtatttgagtctcagaaacaaaaggaccagctgtttgacttccagcagctgaccaagcaattacacgtcaccaacgaaaacatggaagtcacgaaccagcagtttctcaagacagtgaccgagcagtccgtcatcatcgagcagctgagaaaaaagcttagacaggctaagctggagcttagagtggctgtggctaaagtcgaggagcttacaaacgtgactgaagacctgcaagggcagatgaagaagaaagaaaaggacgtggtatctgcccacggacgggaggaggcctccgacagaagactccagcagttgcagagtagcatcaaacaattagagatcagactgtgcgtcactattcaggaagctaaccagctacggaccgagaacactcacctggaaaagcaaacgcgtgagcttcaggctaagtgcaatgaactggagaacgagaggtatgaggccatcgtgagggcgagaaactcgatgcaacttctggaggaagcaaatctccagaaatcgcaggccctattagaagagaaacaaaaggaggaggacatcgagaagatgaaagagacagtctccagattcgtgcaggatgcaactatacgcacaaagaaagaggttgccaatactaagaaacaatgcaatatccagatttcgagactgacggaggaactgagcgcacttcagatggaatgcgcagagaaacagggacagatcgaacgggtcattaaagagaaaaaggcagtggaagaagagttagagaagatctatagagaaggcagaggaaacgaaagtgactacagaaaattggaggaaatgcaccagcgtttcttagttagtgagagaagtaaagacgatctgcagcttaggctgactagagcggagaaccggattaagcagcttgagacagacagctctgaagaaattagtagataccaggagatgatccagaagctgcagaatgttctggaaagcgagagggagaattgcggacttgtgagcgaacagcgtctgaagctccaacaggaaaataagcaattgaggaaagaaacagaatcactcaggaaaattgcattagaggctcaaaaaaaggctaaggtcaagatcagtactatggaacatgagttcagcattaaggaacggggattcgaggtgcagctccgggagatggaggactccaacaggaactctattgtggagctccgtcaccttttggcaacccagcagaaagcggctaaccgctggaaagaggagacaaagaagctgaccgaatcggcagagatccgcattaataacctgaagtccgaactgagtcgacagaagctccatactcaagagctactaagccaactagagatggcgaacgagaaagtcgctgaaaatgaaaagctgattctagagcaccaggaaaaggctaatagactccagaggaggctgtcccaggcagaagagagagccgcaagcgcatcccagcaactaagcgtcataaccgttcagagaaggaaggctgctagtcttatgaatctggaaaacatctag

SEQ ID NO: 239310 - DNA, 3055 bp, Artificial Sequence
  derived and/or modified sequence
aagaggcgccaccgtctccaaggagtggtccggggcaccggtttcaaagtcgcagggcgggccgagtggacttccgctgctggcctggggcttcccagccgtcttggcgttgtcctctccaacccccgccgctccgcgtagaacgccgctctcaggctgccgtcaagctcccgcggcactctcctaggtggcccgacgagacccagagtgacccgcgggacgcctgtatcgaccgcgtcctcttcccaccagcgtgggattcggttgaacgtggagtccccagcaatcttcagtctctcaccagggccagggactcgtctggggcgcgggggaaagaagcgtggcggggctgtagatgccgcgtgagtaggatgcagattgcaccgctggagcgcttgacaaccaaccgagcgttggcttagttttgttttcccgcacagcaagctctctgtctttcagaggaaggtaaaggtggtgaaagctctaaactaaaattgtatcgaaatggctgcagaaatcgactttctgagagagcaaaatcgaagactaaatgaagattttaggcggtatcaaatggaaagtttttccaaatattcatctgtacagaaagctgtctgccaaggagaaggagacgacacatttgaaaacctagtatttgaccaaagctttttagctcctcttgttactgagtatgataaacacctaggagaactaaatgggcagctgaaatattaccagaaacaggtgggtgagatgaaattacaacttgaaaatgtcatcaaggaaaatgaaaggttgcacagtgaattaaaagatgctgttgaaaaaaaattggaggcctttcccctgggcacagaggtaggaactgacatatatgcagatgatgaaacagtcagaaaccttcaagaacaattgcagctagccaatcaagaaaaaactcaggctgtggaactctggcagactgtttctcaggagttggacagactacacaagctttaccaggaacatatgactgaggcccagattcatgtatttgaaagtcaaaaacaaaaggatcagctatttgattttcaacaactgaccaaacaacttcatgttactaatgagaacatggaagtgactaaccaacagtttctgaaaacagtaactgaacaaagtgtgataatcgaacaactccgaaaaaaacttaggcaagccaaattagagctgagagttgctgtagcaaaagtggaagagttaactaatgtgactgaagatctgcagggacagatgaaaaagaaggagaaggatgtggtgtctgcccatggaagagaggaagcatcagataggcgtttacagcagttacagtctagtataaaacaattagaaataagattatgtgtgacaatccaagaagccaaccaattaagaaccgaaaatacacatctggaaaaacagaccagagagctacaagcaaagtgcaatgaattagaaaatgagagatatgaggctattgtaagagccagaaatagcatgcaactcttagaagaagctaaccttcaaaaaagtcaggctctacttgaggagaagcaaaaagaagaagacatagagaaaatgaaagagacagtttctcggtttgtacaagatgctaccataagaaccaagaaagaagttgcaaacaccaaaaaacaatgtaatatacaaatttctcgattaacagaagaactttcagcccttcaaatggagtgtgctgaaaaacaaggccaaattgaacgagtcattaaggaaaaaaaagcagtggaagaagaactagaaaagatttaccgtgaaggcagaggaaatgagagtgattacagaaaactggaagaaatgcaccaaagattcctggtttcagagcgttcaaaagatgatcttcagctaagacttacgagagcagaaaatagaataaaacaacttgaaactgactcctcagaagaaatatcacgttaccaagaaatgattcagaaacttcaaaatgtattggagtctgagagagagaactgtgggcttgtcagtgaacaaaggctaaaacttcagcaagaaaataaacagttacggaaagagactgagagtttaaggaagattgccctggaggctcaaaaaaaagccaaagtaaagatcagtacaatggaacatgaattttcaataaaggaacgtggatttgaagttcaattgagagagatggaagacagtaatagaaattccattgttgaactgaggcatctcctagcgactcaacagaaggcagccaataggtggaaagaagaaacgaagaaacttactgaaagtgcagaaattagaatcaataatctaaagagtgagctgagtcgacagaaacttcatacccaagagctgctttctcagctggaaatggcaaatgaaaaggtagctgagaatgaaaagctaattctagagcatcaagaaaaagccaacagacttcaaaggcgtctaagtcaggcagaagagagagctgcttcagcttcccagcagctcagtgtgattacagtgcagagaagaaaagcagcctccctgatgaatctggaaaatatttaaaaatattcatagttcactcacagaactttagagttgggaaagcagttggactagaagtgtattgaaatggtaaagcctgcaaagtataatagttaaggcttgtgttatttcgcgtaagcattgttgttctgttttgagggttattggaaaacagagcagtgaccacttcctgtaagtaaagaaaatataatcctatattgagcttcagtggagaataaaccagctgagaagaactcattgccttcatcaatgtgtctgttttttaattcctcctttttcccttgaaaggacataataattttcaaactatgcaaatttctctttcataagaaagagtttttaagaaaattctagaatttaatatttcagtttccaagatttgagaattttacatctaattgttacttctaactcatttttaaagttcctaagtatccattttattatgaactcataaatgtaataaattgtgcactttctaaaa

SEQ ID NO: 239311 - protein, 159 aa, Artificial Sequence
  derived and/or modified sequence
MKNHLLFWGVLAVFIKAVHVKAQEDERIVLVDNKCKCARITSRIIRSSEDPNEDIVERNIRIIVPLNNRENISDPTSPLRTRFVYHLSDLCKKCDPTEVELDNQIVTATQSNICDEDSATETCYTYDRNKCYTAVVPLVYGGETKMVETALTPDACYPD

SEQ ID NO: 239312 - protein, 70 aa, Artificial Sequence
  derived and/or modified sequence
MKNHLLFWGVLAVFIKAVHVKAQEDERIVLVDNKCKCARITSRIIRSSEDPNEDIVERNIRIIVPLNNRE

SEQ ID NO: 239313 - protein, 175 aa, Artificial Sequence
  derived and/or modified sequence
MKNHLLFWGVLAVFIKAVHVKGSRDSSASASRVAGITAQEDERIVLVDNKCKCARITSRIIRSSEDPNEDIVERNIRIIVPLNNRENISDPTSPLRTRFVYHLSDLCKKCDPTEVELDNQIVTATQSNICDEDSATETCYTYDRNKCYTAVVPLVYGGETKMVETALTPDACYPD

SEQ ID NO: 239314 - DNA, 480 bp, Artificial Sequence
  derived and/or modified sequence
atgaagaaccatctcctcttttggggagtgcttgccgtgttcataaaggctgtccatgtgaaagcccaggaggacgagcggatcgtgttagtagataacaagtgtaagtgcgccaggattacttcccggattatccgctcctccgaagatccgaatgaggacattgtcgaacggaacatacggataattgtgcctctgaataatagagagaatataagcgatcccaccagccccctgcggacccgttttgtctatcacttgagtgacctttgtaagaagtgtgatcccacagaggtggaactggacaaccagatcgtcacagcaacacagagtaacatatgcgacgaagatagtgcgaccgaaacatgctatacatatgaccgaaataaatgctacacagccgttgttcccctggtttatgggggcgagactaaaatggtggaaaccgcactgacgccagacgcttgttacccggactag

SEQ ID NO: 239315 - DNA, 213 bp, Artificial Sequence
  derived and/or modified sequence
atgaaaaatcacctcctcttctggggtgtcctggccgtcttcataaaagcggtccatgttaaagcccaggaagatgagagaatcgtactggtcgataataaatgtaagtgtgctagaattaccagccgaatcattcggtccagcgaggaccccaacgaggatatcgtagaaagaaatatccggattatcgtccccttaaataacagggaatag

SEQ ID NO: 239316 - DNA, 480 bp, Artificial Sequence
  derived and/or modified sequence
atgaagaaccacctgctattctggggcgtgcttgccgtgttcatcaaagcagtgcatgtcaaagctcaggaggatgaacggatcgtcctcgtagataataagtgtaaatgtgcccggatcacaagtcgcatcatacgcagcagcgaggatcctaatgaggacattgtggaaagaaacattcgcattattgtgcctctgaacaacagggagaatatttctgatccgacgtctcctctacgcacccggttcgtttatcacttgtctgatctgtgtaagaagtgcgatcctaccgaggttgagctggataaccagatagtgactgctactcagtcaaacatctgcgacgaggactctgccactgagacttgctacacttatgacaggaacaagtgctacacggctgtcgtgccactggtttacgggggtgaaacgaagatggttgaaacagctctgacccccgacgcttgctacccggattag

SEQ ID NO: 239317 - DNA, 528 bp, Artificial Sequence
  derived and/or modified sequence
atgaagaaccatctcctattctggggagtgctggccgtgtttatcaaagccgtccatgtaaagggttcccgggattcttctgcctcagcttcccgcgtggcagggatcacagcacaggaagatgagcggatcgtgctggtggacaacaagtgcaagtgcgccagaataaccagccggatcatccgctctagcgaagaccccaatgaagacatcgtcgagaggaacatcagaattatcgttcccctcaataaccgtgagaacatctccgaccccacttcaccactaaggacaagatttgtctaccatcttagcgacctatgtaagaagtgtgacccaacagaagtcgaactggacaatcagatagtcactgccacacagtccaacatttgtgacgaggattctgcaacggaaacctgctacacttatgacaggaacaagtgttatactgcggtggtgccactggtctatggcggcgagacaaaaatggtcgaaacagcactcacccctgatgcttgctatcctgattag

SEQ ID NO: 239318 - DNA, 1438 bp, Artificial Sequence
  derived and/or modified sequence
agcatttaaacttcagacttcaaccacagttgtgattgtttttagtttgttagctgcctggagtgttattttaagaaagcagaagcaccatcatttgcacactccttatagatcacacaccttaaccctgactttttttgctccagtttttcagaagaagtgaagtcaagatgaagaaccatttgcttttctggggagtcctggcggtttttattaaggctgttcatgtgaaagcccaagaagatgaaaggattgttcttgttgacaacaaatgtaagtgtgcccggattacttccaggatcatccgttcttccgaagatcctaatgaggacattgtggagagaaacatccgaattattgttcctctgaacaacagggagaatatctctgatcccacctcaccattgagaaccagatttgtgtaccatttgtctgacctctgtaaaaaatgtgatcctacagaagtggagctggataatcagatagttactgctacccagagcaatatctgtgatgaagacagtgctacagagacctgctacacttatgacagaaacaagtgctacacagctgtggtcccactcgtatatggtggtgagaccaaaatggtggaaacagccttaaccccagatgcctgctatcctgactaatttaagtcattgctgactgcatagctctttttcttgagaggctctccattttgattcagaaagttagcatatttattaccaatgaatttgaaaccagggcttttttttttttttgggtgatgtaaaaccaactccctgccaccaaaataattaaaatagtcacattgttatctttattaggtaatcacttcttaattatatgttcatactctaagtatcaaaatcttccaattatcatgctcacctgaaagaggtatgctctcttaggaatacagtttctagcattaaacaaataaacaaggggagaaaataaaactcaaggactgaaaatcaggaggtgtaataaaatgttcctcgcattcccccccgcttttttttttttttttgactttgccttggagagccagagcttccgcattttctttactattctttttaaaaaaagtttcactgtgtagagaacatatatgcataaacataggtcaattatatgtctccattagaaaaataataattggaaaacatgttctagaactagttacaaaaataatttaaggtgaaatctctaatatttataaaagtagcaaaataaatgcataattaaaatatatttggacataacagacttggaagcagatgatacagacttctttttttcataatcaggttagtgtaagaaattgccatttgaaacaatccattttgtaactgaaccttatgaaatatatgtatttcatggtacgtattctctagcacagtctgagcaattaaatagattcataagcata

SEQ ID NO: 239319 - DNA, 275 bp, Artificial Sequence
  derived and/or modified sequence
gacttggaagtaaaatatagagcttctactgaaatatttgtttttcagaagaagtgaagtcaagatgaagaaccatttgcttttctggggagtcctggcggtttttattaaggctgttcatgtgaaagcccaagaagatgaaaggattgttcttgttgacaacaaatgtaagtgtgcccggattacttccaggatcatccgttcttccgaagatcctaatgaggacattgtggagagaaacatccgaattattgttcctctgaacaacagggaga

SEQ ID NO: 239320 - DNA, 640 bp, Artificial Sequence
  derived and/or modified sequence
gggaccttaaaggactttcatttctctccccttccttcatctctcctccttcacttaccttcatttattattctaggcatgacaagtgtcagatgtctgatttgaagactaatatgaatatatctagtttttcagaagaagtgaagtcaagatgaagaaccatttgcttttctggggagtcctggcggtttttattaaggctgttcatgtgaaagcccaagaagatgaaaggattgttcttgttgacaacaaatgtaagtgtgcccggattacttccaggatcatccgttcttccgaagatcctaatgaggacattgtggagagaaacatccgaattattgttcctctgaacaacagggagaatatctctgatcccacctcaccattgagaaccagatttgtgtaccatttgtctgacctctgtaaaaaatgtgatcctacagaagtggagctggataatcagatagttactgctacccagagcaatatctgtgatgaagacagtgctacagagacctgctacacttatgacagaaacaagtgctacacagctgtggtcccactcgtatatggtggtgagaccaaaatggtggaaacagccttaaccccagatgcctgctatcctgactaatttaagtca

SEQ ID NO: 239321 - DNA, 528 bp, Artificial Sequence
  derived and/or modified sequence
atgaagaaccatttgcttttctggggagtcctggcggtttttattaaggctgttcatgtgaaaggttcaagagattcttctgcctcagcctcccgagtagctgggattacagcccaagaagatgaaaggattgttcttgttgacaacaaatgtaagtgtgcccggattacttccaggatcatccgttcttccgaagatcctaatgaggacattgtggagagaaacatccgaattattgttcctctgaacaacagggagaatatctctgatcccacctcaccattgagaaccagatttgtgtaccatttgtctgacctctgtaaaaaatgtgatcctacagaagtggagctggataatcagatagttactgctacccagagcaatatctgtgatgaagacagtgctacagagacctgctacacttatgacagaaacaagtgctacacagctgtggtcccactcgtatatggtggtgagaccaaaatggtggaaacagccttaaccccagatgcctgctatcctgactaa

SEQ ID NO: 239322 - DNA, 480 bp, Artificial Sequence
  derived and/or modified sequence
atgaagaaccacctgctcttctggggcgtgctggccgtgttcatcaaggctgtgcacgtgaaggcccaggaggatgagcgcatcgtgctggtggacaacaagtgcaagtgtgcccgcatcaccagccgcatcatccgcagcagcgaggaccccaatgaagatattgtggagaggaacatccgcatcatcgtgcccctgaacaaccgggagaacatcagtgaccccaccagccccctgcggaccaggtttgtgtaccacctgagtgacctgtgcaagaagtgtgaccccacagaggtggagctggacaaccagatcgtgacagccacccagagcaacatctgtgatgaggacagcgccacagagacctgctacacctatgacaggaacaagtgctacacagctgtggtgcccctggtgtatggaggagagaccaagatggtggagacagccctgaccccagatgcctgctacccagactag

SEQ ID NO: 239323 - DNA, 213 bp, Artificial Sequence
  derived and/or modified sequence
atgaagaaccacctgctcttctggggcgtgctggccgtgttcatcaaggctgtgcacgtgaaggcccaggaggatgagcgcatcgtgctggtggacaacaagtgcaagtgtgcccgcatcaccagccgcatcatccgcagcagcgaggaccccaatgaagatattgtggagaggaacatccgcatcatcgtgcccctgaacaaccgggagtag

SEQ ID NO: 239324 - DNA, 528 bp, Artificial Sequence
  derived and/or modified sequence
atgaagaaccacctgctcttctggggcgtgctggccgtgttcatcaaggctgtgcacgtgaagggcagccgggacagcagcgccagcgccagccgggtggccggcatcacagcccaggaggatgagcgcatcgtgctggtggacaacaagtgcaagtgtgcccgcatcaccagccgcatcatccgcagcagcgaggaccccaatgaagatattgtggagaggaacatccgcatcatcgtgcccctgaacaaccgggagaacatcagtgaccccaccagccccctgcggaccaggtttgtgtaccacctgagtgacctgtgcaagaagtgtgaccccacagaggtggagctggacaaccagatcgtgacagccacccagagcaacatctgtgatgaggacagcgccacagagacctgctacacctatgacaggaacaagtgctacacagctgtggtgcccctggtgtatggaggagagaccaagatggtggagacagccctgaccccagatgcctgctacccagactag

SEQ ID NO: 239325 - DNA, 480 bp, Artificial Sequence
  derived and/or modified sequence
atgaagaaccacctgctgttctggggcgtgctggccgtgttcatcaaggccgtccacgtgaaagcccaagaagacgagagaatcgtcctcgtggataataagtgtaaatgcgcccgaattacaagtcgaataattcgaagtagtgaagatcctaacgaggacatcgtcgaacgcaacattcgcattatcgtgcccttaaataatagagagaatatttctgatcctacctctcccctgcgaaccagatttgtctatcacctgtccgacctttgcaagaagtgcgatcctaccgaagtggagctggacaaccagattgtgaccgccactcagagcaatatctgcgacgaggactccgcgaccgaaacttgctacacctacgaccgaaacaaatgttatactgccgtggtgcctctggtatacggtggtgagacaaaaatggtagagaccgctcttacacccgatgcctgctaccctgactag

SEQ ID NO: 239326 - DNA, 213 bp, Artificial Sequence
  derived and/or modified sequence
atgaagaaccacctgctgttctggggcgtgctggccgtgttcatcaaggctgtccatgtgaaggcacaggaggacgagcggatagtgcttgtggacaacaagtgcaagtgtgctcggatcacctcacgaatcatacggagttccgaagaccccaacgaggacatcgtggagagaaatatccggattattgttcctttgaataatcgcgagtag

SEQ ID NO: 239327 - DNA, 480 bp, Artificial Sequence
  derived and/or modified sequence
atgaagaaccacctgctgttctggggcgtgctggccgtgttcatcaaggctgtgcacgttaaggcccaagaggatgaaaggattgtcctggtcgacaacaaatgcaagtgtgctaggatcacctcccggattatcagatcgtccgaggatccaaatgaggacattgtcgagagaaatatacgcatcattgtaccattaaataatcgcgagaacatctcggaccccacatcaccgctcagaacccgcttcgtgtaccacttatccgatctgtgtaaaaagtgtgacccaacggaagttgaactggataatcaaatcgttacagccactcagtcaaatatctgtgacgaagactccgccaccgagacttgttatacttacgataggaacaagtgctatactgctgtagtacccttagtgtatggcggcgaaaccaaaatggtcgaaaccgcgttgacacctgacgcctgttatcccgactag

SEQ ID NO: 239328 - DNA, 528 bp, Artificial Sequence
  derived and/or modified sequence
atgaagaaccacctgctgttctggggcgtgctggccgtgttcatcaaagccgtccatgtgaaaggtagccgggactcgtccgcctcggcaagccgcgtggctggaatcaccgcacaggaggacgagcggattgtgctcgtggacaataaatgtaaatgtgcacgtattacgagtcgcattataagaagtagtgaggatccaaatgaggatattgttgagcgcaatatccgcattattgtaccattgaacaatagggaaaacatttccgatcctaccagccctctgcgcacaagatttgtttaccatctgagtgacctctgtaaaaagtgtgacccaacagaagtcgagctggacaatcagattgtcactgccacccagtcaaatatctgtgacgaagatagtgcaacagaaacatgctacacgtatgacagaaataaatgctatacggcagtcgtgccgctcgtatacgggggagagacaaaaatggtcgaaacagcattaacccctgatgcctgttatcctgattag

SEQ ID NO: 239329 - DNA, 480 bp, Artificial Sequence
  derived and/or modified sequence
atgaaaaatcatcttcttttctggggcgtgttagctgtcttcataaaggctgttcacgtgaaggcgcaggaggacgaacgaattgtcctagtcgataataaatgcaagtgtgctagaattaccagtagaatcatccgaagttctgaagatcccaatgaggacattgtcgaaagaaatataaggattatcgtgccgctcaataacagggaaaatattagtgaccctacaagcccgctgaggacacggttcgtgtaccatctgagtgacctctgcaagaaatgtgacccaacagaagtggagttggacaatcaaattgttaccgccactcagtccaatatctgcgacgaagattccgctaccgagacctgctacacttatgatcgcaataaatgttacaccgccgtggttccactggtgtacgggggtgaaacaaagatggtagagactgctcttaccccagatgcgtgctaccctgactag

SEQ ID NO: 239330 - DNA, 213 bp, Artificial Sequence
  derived and/or modified sequence
atgaaaaaccacctcctcttttggggcgtcctggcagtctttattaaagccgtgcatgttaaagcacaggaggacgaacgtattgttttagttgataataaatgcaagtgtgccagaattactagcagaatcatacgttcttctgaggatccaaacgaggatatcgtggaaaggaacattcggattattgtgcctctcaacaaccgcgagtag

SEQ ID NO: 239331 - DNA, 480 bp, Artificial Sequence
  derived and/or modified sequence
atgaagaatcatttgctgttttggggcgtgctcgccgtgtttataaaagctgtccacgttaaggcccaggaggatgaaagaattgtgctggttgataataagtgcaagtgtgccagaatcacaagccgcataatccggtcatcagaggaccccaacgaagacatagttgagcgaaacattcgaattatcgttcccctgaacaacagggaaaatatttctgatcccacctcgccactgagaacacgcttcgtgtatcacttgtccgacctgtgtaagaagtgcgatcccacagaggtggaactggataaccaaattgtgacggctacacagagtaacatatgcgatgaagactcagcgactgaaacctgctatacttatgacaggaacaaatgttatactgcagtggttccacttgtatatgggggagagaccaagatggtggaaaccgcgcttaccccagacgcctgctaccccgattag

SEQ ID NO: 239332 - DNA, 528 bp, Artificial Sequence
  derived and/or modified sequence
atgaaaaaccatctgctgttctggggcgttctggctgtgtttattaaggccgtccatgtgaagggcagccgtgattcctccgcgtccgcttctcgagtggctggtataacggctcaagaggacgaacggatcgtgcttgtcgataacaagtgtaagtgtgcgaggataacatcaaggatcatccgctcttccgaggacccaaacgaagatatcgtggaacggaacatcagaatcattgttcctctcaacaaccgggagaacatctctgatccaacctcaccactgagaacccgcttcgtttaccacttgtccgatttgtgtaagaaatgcgatccgaccgaagtggagctcgataaccagatcgttactgccactcaatccaatatctgtgacgaggactccgcgacagaaacctgttacacatatgacaggaacaaatgctacacagcagtggtgccgttagtttatggtggggagactaagatggttgagaccgctctcacacccgatgcttgctaccccgactag

SEQ ID NO: 239333 - DNA, 480 bp, Artificial Sequence
  derived and/or modified sequence
atgaagaaccacctgctgttctggggcgtgctggccgtgttcatcaaggccgtgcacgtgaaggcccaggaggacgagagaatcgtgctggtggacaacaagtgcaagtgcgccagaatcaccagcagaatcatcagaagcagcgaggaccccaacgaggacatcgtggagagaaacatcagaatcatcgtgcccctgaacaacagagagaacatcagcgaccccaccagccccctgagaaccagattcgtgtaccacctgagcgacctgtgcaagaagtgcgaccccaccgaggtggagctggacaaccagatcgtgaccgccacccagagcaacatctgcgacgaggacagcgccaccgagacctgctacacctacgacagaaacaagtgctacaccgccgtggtgcccctggtgtacggcggcgagaccaagatggtggagaccgccctgacccccgacgcctgctaccccgactag

SEQ ID NO: 239334 - DNA, 213 bp, Artificial Sequence
  derived and/or modified sequence
atgaagaaccacctgctgttctggggcgtgctggccgtgttcatcaaggccgtgcacgtgaaggcccaggaggacgagagaatcgtgctggtggacaacaagtgcaagtgcgccagaatcaccagcagaatcatcagaagcagcgaggaccccaacgaggacatcgtggagagaaacatcagaatcatcgtgcccctgaacaacagagagtag

SEQ ID NO: 239335 - DNA, 528 bp, Artificial Sequence
  derived and/or modified sequence
atgaagaaccacctgctgttctggggcgtgctggccgtgttcatcaaggccgtgcacgtgaagggcagcagagacagcagcgccagcgccagcagagtggccggcatcaccgcccaggaggacgagagaatcgtgctggtggacaacaagtgcaagtgcgccagaatcaccagcagaatcatcagaagcagcgaggaccccaacgaggacatcgtggagagaaacatcagaatcatcgtgcccctgaacaacagagagaacatcagcgaccccaccagccccctgagaaccagattcgtgtaccacctgagcgacctgtgcaagaagtgcgaccccaccgaggtggagctggacaaccagatcgtgaccgccacccagagcaacatctgcgacgaggacagcgccaccgagacctgctacacctacgacagaaacaagtgctacaccgccgtggtgcccctggtgtacggcggcgagaccaagatggtggagaccgccctgacccccgacgcctgctaccccgactag

SEQ ID NO: 239336 - protein, 825 aa, Artificial Sequence
  derived and/or modified sequence
MATSERALLRTRAASLLRGLGRSRTGARSLQFRAEKERQPCWSFPMGQKTKGSSNIASSYLLQQLMHRYQELDSDGDEDQGEGEAGSEESSESEMLNLEEEFDGVLREEAVAKALHHLGRSGSGTEQVYLNLTLSGCNLIDVSILCGYVHLQKLDLSANKIEDLSCVSCMPYLLELNASQNNLTTFFNFKPPKNLKKADFSHNQISEICDLSAYHALTKLILDGNEIEEISGLEMCNNLIHLSLANNKITTINGLNKLPIKILCLSNNQIEMITGLEDLKALQNLDLSHNQISSLQGLENHDLLEVINLEDNKIAELREIEYIKNLPILRVLNLLENPIQEKSEYWFFVIFMLLRLTELDQKKIKVEEKVSAVNKYDPPPEVVAAQDHLTHVVNSVMQPQRIFDSTLPSLDAPYPMLILAGPEACGKRELAHRLCRQFSTYFRYGACHTTRPPYFGEGDRVDYHFISQDVFDEMVNMGKFILTFSYGNHKYGLNRDTVEGIARDGLASCIHMEIEGVRSLKYSYFEPRYILVVPMNKEKYEGYLRRKGLFSRAEIEFAVSRVDLYIKINQNFPGYFDEVINADDLDVAYQKLSQLIREYLGLTEEPAKSLATTADVKTSHLKPEAHPTKYISSNMGDFLHSTDRNYLIKFWAKLSAKKTPAERDSIHRQHEAARQALMGRIRPDHTLLFQRGPVPAPLTSGLHYYTTLEELWKSFDLCEDYFKPPFGPYPEKSGKDSLVSMKCSLFRFCPWSKELPFQPPEGSISSHLGSGASDSETEETRKALPIQSFSHEKESHQHRQHSVPVISRPGSNVKPTLPPIPQGRR

SEQ ID NO: 239337 - DNA, 2478 bp, Artificial Sequence
  derived and/or modified sequence
atggccaccagcgagagagccctgctgagaaccagagccgccagcctgctgagaggcctgggcagaagcagaaccggcgccagaagcctgcagttcagagccgagaaggagagacagccctgctggagcttccccatgggccagaagaccaagggcagcagcaacatcgccagcagctacctgctgcagcagctgatgcacagataccaggagctggacagcgacggcgacgaggaccagggcgagggcgaggccggcagcgaggagagcagcgagagcgagatgctgaacctggaggaggagttcgacggcgtgctgagagaggaggccgtggccaaggccctgcaccacctgggcagaagcggcagcggcaccgagcaggtgtacctgaacctgaccctgagcggctgcaacctgatcgacgtgagcatcctgtgcggctacgtgcacctgcagaagctggacctgagcgccaacaagatcgaggacctgagctgcgtgagctgcatgccctacctgctggagctgaacgccagccagaacaacctgaccaccttcttcaacttcaagccccccaagaacctgaagaaggccgacttcagccacaaccagatcagcgagatctgcgacctgagcgcctaccacgccctgaccaagctgatcctggacggcaacgagatcgaggagatcagcggcctggagatgtgcaacaacctgatccacctgagcctggccaacaacaagatcaccaccatcaacggcctgaacaagctgcccatcaagatcctgtgcctgagcaacaaccagatcgagatgatcaccggcctggaggacctgaaggccctgcagaacctggacctgagccacaaccagatcagcagcctgcagggcctggagaaccacgacctgctggaggtgatcaacctggaggacaacaagatcgccgagctgagagagatcgagtacatcaagaacctgcccatcctgagagtgctgaacctgctggagaaccccatccaggagaagagcgagtactggttcttcgtgatcttcatgctgctgagactgaccgagctggaccagaagaagatcaaggtggaggagaaggtgagcgccgtgaacaagtacgaccccccccccgaggtggtggccgcccaggaccacctgacccacgtggtgaacagcgtgatgcagccccagagaatcttcgacagcaccctgcccagcctggacgccccctaccccatgctgatcctggccggccccgaggcctgcggcaagagagagctggcccacagactgtgcagacagttcagcacctacttcagatacggcgcctgccacaccaccagacccccctacttcggcgagggcgacagagtggactaccacttcatcagccaggacgtgttcgacgagatggtgaacatgggcaagttcatcctgaccttcagctacggcaaccacaagtacggcctgaacagagacaccgtggagggcatcgccagagacggcctggccagctgcatccacatggagatcgagggcgtgagaagcctgaagtacagctacttcgagcccagatacatcctggtggtgcccatgaacaaggagaagtacgagggctacctgagaagaaagggcctgttcagcagagccgagatcgagttcgccgtgagcagagtggacctgtacatcaagatcaaccagaacttccccggctacttcgacgaggtgatcaacgccgacgacctggacgtggcctaccagaagctgagccagctgatcagagagtacctgggcctgaccgaggagcccgccaagagcctggccaccaccgccgacgtgaagaccagccacctgaagcccgaggcccaccccaccaagtacatcagcagcaacatgggcgacttcctgcacagcaccgacagaaactacctgatcaagttctgggccaagctgagcgccaagaagacccccgccgagagagacagcatccacagacagcacgaggccgccagacaggccctgatgggcagaatcagacccgaccacaccctgctgttccagagaggccccgtgcccgcccccctgaccagcggcctgcactactacaccaccctggaggagctgtggaagagcttcgacctgtgcgaggactacttcaagccccccttcggcccctaccccgagaagagcggcaaggacagcctggtgagcatgaagtgcagcctgttcagattctgcccctggagcaaggagctgcccttccagccccccgagggcagcatcagcagccacctgggcagcggcgccagcgacagcgagaccgaggagaccagaaaggccctgcccatccagagcttcagccacgagaaggagagccaccagcacagacagcacagcgtgcccgtgatcagcagacccggcagcaacgtgaagcccaccctgccccccatcccccagggcagaagatag

SEQ ID NO: 239338 - DNA, 2478 bp, Artificial Sequence
  derived and/or modified sequence
atggccacaagcgagagggcactgctgagaacacgggcagcctccttgctgagaggtctaggccgttctcgtacgggggcccggtcattacaatttagggcggaaaaggagcgccagccttgctggagctttcctatgggacaaaagaccaaaggctcctcaaatatcgccagctcttacctgctgcagcagctcatgcaccgttatcaggagctggacagcgatggcgacgaggatcagggtgagggggaggcgggatcagaggaaagctcagaatcagagatgctgaatctggaagaggagtttgatggggttctgcgcgaggaggctgtggccaaagcactacatcatctgggccggtctggctcggggacggaacaggtgtatttaaatttgactctgagtggttgcaacttgatcgatgtcagtatcctgtgtgggtatgtgcacttgcagaaacttgatctctctgccaacaaaatagaggatctttcatgtgtcagctgcatgccttacctccttgagctgaatgcgtcccaaaacaacctcactaccttcttcaacttcaaacctccaaaaaacctcaagaaagcggatttctctcataaccagatatccgaaatctgtgacctctcagcgtatcacgcactcactaagcttatccttgatgggaatgagattgaggagatctctggcctggagatgtgcaacaatctcatccacctctctctagcaaataacaagatcactacgattaacggactgaacaagctcccaattaagatactttgtctctctaataaccagattgaaatgattactggcctggaggacctgaaggcccttcaaaatctcgatttgtcccacaatcagatctcgtcattgcagggcctggagaatcatgacctactcgaggtaatcaatttagaagataataaaatcgccgaacttcgggagattgaatacatcaagaatctccctatcttgcgtgttctgaacctcttagagaacccaattcaggaaaagtccgagtattggtttttcgtcatcttcatgctactcaggctcaccgaactagatcagaagaagatcaaagtggaagagaaagtgtctgccgtaaacaaatacgaccctcccccagaagtagtggctgcccaggatcatctaacccatgtggtgaactctgtgatgcaaccccagagaatttttgattcaacactgcccagcctcgatgccccctatcccatgctgattctggctggacctgaggcctgcggcaaacgcgaacttgcccaccgcctgtgtcgccagttctcaacatattttagatacggcgcctgtcatacaactcggcctccatatttcggggaaggagacagagtagattatcatttcattagccaggacgtgtttgatgaaatggtgaatatggggaagttcattcttaccttcagctacggtaaccataagtatggcttgaaccgcgacactgtggaaggcattgccagagacggtctggcatcctgcatacatatggagatcgagggggtgcgcagcctgaagtatagctattttgagcccaggtatatactggttgtgcccatgaataaggagaagtacgaagggtacctgcggagaaaagggttgttctctcgcgctgagattgagttcgccgtgtctcgggtggacctgtacatcaaaatcaaccaaaactttccagggtattttgatgaggtgatcaatgcggacgacttagacgttgcctatcagaaactgagtcagctgatccgagagtacctcgggctcactgaggaacctgccaagtctctggctacgaccgcagacgtgaaaaccagccatctgaagcctgaggcccaccctacgaagtacataagcagcaacatgggtgattttctgcattccaccgataggaactacctgatcaaattctgggccaagctgtctgccaagaaaactcccgctgagcgagactcaatacataggcaacatgaggccgccagacaggccctgatgggccgcatacgccctgatcacacgctactcttccagagaggccctgtgccagcacctctcacatctggattgcactactacaccacgctggaggaactctggaagagcttcgatttatgtgaggactatttcaagccgcccttcgggccatatccagagaagagtggaaaggattcactcgtttccatgaaatgctccttgttccggttctgtccatggagtaaagagcttccctttcagcccccagagggcagcatttcatctcacctgggaagtggtgcctcggatagcgaaactgaggaaacacggaaggctctgcctattcagagcttctctcatgaaaaagagtcacatcagcatcgccagcactcagtgcccgtgatttctcggcctggatccaatgtcaagcccacactgcctcccatccctcagggacgtcggtag

SEQ ID NO: 239339 - DNA, 2478 bp, Artificial Sequence
  derived and/or modified sequence
atggccaccagcgagcgggccctgctgcggaccagggctgccagcctgctgcggggcctgggccgcagcaggactggagcccggagcctgcagttccgggcagagaaggagcggcagccctgctggagcttccccatgggccagaagaccaagggcagcagcaacatcgccagcagctacctgctgcagcagctgatgcaccgctaccaggagctggacagtgatggagatgaggaccagggcgagggggaggccggcagcgaggagagcagcgagagcgagatgctgaacctggaggaggagtttgatggagtgctgcgggaggaggccgtggccaaggccctgcaccacctgggccgcagcggcagcggcacagagcaggtgtacctgaacctgaccctgagcggctgcaacctgattgatgtgtccatcctgtgtggctacgtgcacctgcagaagctggacctgagcgccaacaagattgaggacctgagctgtgtgtcctgcatgccctacctgctggagctgaatgccagccagaacaacctgaccaccttcttcaacttcaagccacccaagaacctgaagaaggctgacttcagccacaaccagatcagcgagatctgtgacctgagcgcctaccacgccctgaccaagctgatcctggatggaaatgaaattgaggagatcagcggcctggagatgtgcaacaacctgatccacctgagcctggccaacaacaagatcaccaccatcaatggcctgaacaagctgcccatcaagatcctgtgcctgagcaacaaccagatcgagatgatcaccggcctggaggacctgaaggccctgcagaacctggacctgagccacaaccagatcagcagcctgcagggcctggagaaccacgacctgctggaggtgatcaacctggaggacaacaagattgctgagctgcgggagattgagtacatcaagaacctgcccatcctgcgggtgctgaacctgctggagaaccccatccaggagaagtctgagtactggttcttcgtcatcttcatgctgctgcggctgacagagctggaccagaagaagatcaaggtggaggagaaggtgtctgctgtgaacaagtatgaccccccacctgaggtggtggccgcccaggaccacctgacccacgtggtgaacagcgtgatgcagccccagaggatctttgacagcaccctgcccagcctggatgccccctaccccatgctgatcctggccggccctgaggcctgtgggaagcgggagctggcccaccggctgtgccggcagttcagcacctacttccgctacggggcctgccacaccacccggcccccctactttggagagggggacagagtggactaccacttcatcagccaggatgtgtttgatgagatggtgaacatgggcaagttcatcctgaccttctcctatggcaaccacaagtatggcctgaacagagacacagtggagggcatcgccagagatggcctggccagctgcatccacatggagattgagggcgtgcgcagcctgaagtacagctactttgagccccgctacatcctggtggtgcccatgaacaaggagaagtatgagggctacctgcggaggaagggcctcttcagcagagctgagattgaatttgctgtgtcccgggtggacctgtacatcaagatcaaccagaacttccctggctactttgatgaagtcatcaatgctgatgacctggatgtggcctaccagaagctgagccagctgatccgggagtacctgggcctgacagaggagcccgccaagagcctggccaccacagcagatgtgaagaccagccacctgaagccagaggcccaccccaccaagtacatcagcagcaacatgggagacttcctgcacagcacagacaggaactacctgatcaagttctgggccaagctgagcgccaagaagaccccagctgagcgggacagcatccaccggcagcacgaggccgcccggcaggccctgatgggccgcatccggccagaccacaccctgctcttccagaggggccctgtgcctgcccccctgaccagcggcctgcactactacaccaccctggaggagctgtggaagagctttgacctgtgtgaggactacttcaagccacccttcggcccctacccagagaagagcggcaaggacagcctggtgtccatgaagtgcagcctcttccgcttctgcccctggagcaaggagctgcccttccagcccccagagggcagcatcagcagccacctgggcagcggggccagtgacagcgagacagaggagaccaggaaggccctgcccatccagagcttcagccatgagaaggagagccaccagcaccggcagcacagcgtgcctgtgatcagcaggcctggcagcaatgtgaagcccaccctgccccccatcccccagggcagaagatag

SEQ ID NO: 239340 - DNA, 3163 bp, Artificial Sequence
  derived and/or modified sequence
acaggccccagaatcctccgcggttccccttgcctggggtcagtctcctaggcaaccccgctaaacaagatggcgacctccgagagggctctcctgaggaccagagctgcctctctcctgagaggcttgggcagatcccgaactggagcccgatcgttacagtttcgcgcagaaaaagagcgtcagccttgctggtcttttcccatggggcagaagacgaaaggcagctctaacatagcctcctcctacctgctccagcagctcatgcaccgctatcaggagctggactcggacggagatgaggaccagggcgagggcgaggcgggatccgaggagtcctcagagtccgaaatgctgaatttggaggaggaatttgatggggtcctgagagaggaggctgtggccaaagcactccatcacttggggcgctcaggctctgggactgagcaagtctacctcaatctaactttatcaggttgtaatttaattgatgttagcattctctgtggatatgttcatctacagaagttggatctttcagcgaataaaattgaagatttatcttgtgtgagttgtatgccttatctcctagaacttaatgcttctcaaaataatttgactacgttcttcaatttcaagccacccaaaaacctcaagaaggcggatttttcccacaaccaaatttctgaaatttgtgatttgtcagcgtatcatgctctcactaaactaattttggatggcaatgagatagaagaaatcagtggactagagatgtgcaacaacctaattcaccttagtttggccaacaataagatcacgacaattaatggcttaaacaagttaccaatcaaaatactttgtctgagcaataaccagattgagatgatcacaggtttggaggatctgaaagccctgcagaacctggatctgtcccacaatcagataagcagcctccaaggcttagagaatcatgacctcctggaagtgatcaacctggaggataataagattgctgagctgagagaaatagaatacattaaaaatttacccatccttcgagttctcaatcttctagaaaatccaattcaggaaaagtctgaatattggttcttcgtaatttttatgcttctgcgattaacagaattagatcagaagaagattaaagtggaagaaaaggtttcagcagtgaataaatatgatcctccccctgaagtggttgcagctcaagaccacctgacccatgttgtcaacagcgtgatgcagccgcagaggatctttgacagcactcttcccagcctggatgccccttatcccatgctgatactagctggtcctgaagcttgtgggaaacgagagcttgcccatcgcctctgcagacagtttagcacttacttcagatatggggcctgtcataccacaagaccaccttactttggagaaggggatcgagttgattatcattttatctctcaagacgtttttgatgaaatggtgaacatggggaaattcattctaacatttagttatggtaatcacaagtatggattaaatagggacaccgtagaaggtatcgcaagagatggtttggcaagctgtattcatatggaaatagaaggtgtaagaagtttgaaatattcctattttgagcctcgttatatcctggtggtgcccatgaacaaggaaaaatatgagggatatttgcggagaaaaggattattcagtcgtgcagaaattgaatttgctgtctccagagtggacctttatattaaaattaatcagaattttccgggatattttgatgaggtaatcaatgcagatgatctggatgttgcctaccaaaaactgagtcagctcattagagaataccttggattgactgaggaacctgccaagagtttggctacaactgcagatgttaagacatcccacctgaaacctgaagcgcatcctacaaagtatatttcttcgaatatgggtgatttcctgcattctacagacagaaactacctcattaaattttgggccaaactttcagccaaaaaaacaccagcggaaagagattctatacacagacagcacgaggcagcccggcaagctctaatgggaaggatacgccctgatcacacactcctatttcaaaggggtccagtaccagcacctctcaccagtggtctacactattatacaactttagaagaactctggaaaagttttgatctttgtgaagactattttaaacctccatttggaccatatcctgaaaagagtgggaaggattccttggtttccatgaaatgttcattgtttcggttctgtccgtggtcaaaagaattgcctttccagcctccggaggggagcatttcttcacacctaggatcaggagccagtgacagtgagaccgaagagacccggaaagcactacctatacaatcattttcacatgaaaaagagtctcaccaacacagacaacactcggtcccagtcatcagtcgcccaggttccaacgtcaaacccaccctccctccaatccctcagggccgcaggtagactagcacttgatgtctgatcctaacatggaaaacctgctctgctgatgtcgaattccttgccttacctggccatgggtccagctgtttctcactcaacccattacccacggaagaatgttctacctgccttaattctatcagccagtttctcttgtgattctttggctggtgtcttttagttttttaattaaaaaattgtttcttaaatgatttttaaagatgtgagtttttttaatgtgagttattcttagcttttaaaaatgtcatttcatttttttttctatagctataaataattttttccacctgctccctgctcggaaatatcagatggaaaaatctcccaagatctctgcaccgtgatatgcagagtggctttctgatatatccaactgggattgtgctcttaaaatttcaatatgtccatttacaacattcctgtatgctctagaggattgatttattttgctctgattatgaaaggattgcagagttccatttaacttgtcgccaacatgatatcgactgcatctctcaaaaggaattaatgtaattttggggggttcttgacttactttagcaacacgaaagaataaagagcaacagttgattct

SEQ ID NO: 239341 - DNA, 2478 bp, Artificial Sequence
  derived and/or modified sequence
atggccaccagcgagcgggccctgctgcggacccgggccgccagcttgctacgtggactaggtaggtcaagaactggggctaggagcctgcagtttagagctgagaaagaaaggcagccttgctggtcctttcccatgggccagaagaccaaaggcagctcgaatatagcttccagctatttactccagcaacttatgcacaggtaccaggagctggactctgacggagacgaagaccagggggagggcgaggcggggagcgaagagtccagcgaaagcgagatgctgaatctcgaggaggaattcgacggcgtccttagagaagaggcagttgccaaagcccttcaccatctgggaagatccggtagtgggaccgagcaggtatatctgaacttgactctcagcggatgcaatcttattgatgtgtccatactgtgtggctacgtgcacctgcagaaactcgatttgtcggcaaataagatcgaagatctgagttgtgtaagctgcatgccgtacttgctggagctgaatgcctcccaaaacaatcttactacctttttcaactttaagccacctaaaaatcttaagaaggctgacttctcccacaaccaaataagtgagatctgcgatcttagtgcctatcacgcgctgaccaaactgattttggatggtaatgagatagaggaaatttccggcttggagatgtgcaacaatctgatccacttgtcactggccaacaataaaattaccactattaacggtctgaacaagctgccaatcaagatcctctgtctatctaacaaccagatagagatgatcaccggtctggaggacctcaaggcgttgcagaatctggatctttcacacaaccagatttcgtcacttcagggactggagaaccatgatctgctggaagtcattaacctagaagataacaagatagcagaattgcgggaaatcgagtacatcaaaaatttgccaatattgcgcgtattaaacctgcttgaaaatccaatacaagaaaaatcagaatattggtttttcgtaattttcatgctgctgagacttacagagctggatcagaaaaaaatcaaggtcgaggaaaaagtttcagccgttaacaagtacgaccccccacctgaggtggtggccgcccaagaccatctcacacacgttgttaactctgtgatgcagcctcaacgcattttcgattctaccctgcccagcctggatgccccttaccccatgctgattctcgccggccctgaagcttgcggaaagagggagctggcgcacaggctctgccggcagttttccacttattttcgatacggtgcttgccatactactcgacctccatacttcggcgagggcgatcgggtggactaccattttatttctcaagacgtcttcgacgaaatggtgaacatggggaaattcatactgaccttcagttatggcaaccacaaatatggcctgaaccgcgataccgtcgaggggatcgcaagggacggattggccagctgtatccatatggaaattgaaggggtgcgcagtcttaaatattcctacttcgaacctcgctatatcttagttgttccaatgaacaaggaaaaatatgaaggttacctgaggcggaaaggattgtttagccgcgccgagatcgagtttgcagtgtctcgggtggatctgtatataaaaatcaaccagaactttccagggtattttgacgaggtaattaatgccgatgatctggacgtggcctatcagaagctgtctcaactgatacgcgagtatcttggcctcaccgaagagccagccaagagtctggctactaccgccgatgtcaaaacctcacatcttaagcctgaggcacacccaacaaaatatatcagtagcaacatgggcgactttctgcactccacagaccgaaattatcttatcaaattctgggccaagctgtcagccaaaaagacccctgcagaaagagactctatccatcgacagcacgaagctgccaggcaagctctgatgggccgcattcggccagaccatacactgctttttcagcgcggcccagtgcccgccccactgacctctgggctgcattattacaccaccttagaggagctgtggaagtctttcgatctctgtgaagactactttaaacccccttttggcccatatcctgagaaatcaggcaaggattctttggtttcgatgaaatgcagcctgtttaggttttgcccatggtcaaaggagcttcccttccaacctccagagggttccatcagtagtcacctgggttctggagctagcgattccgagaccgaggaaacgagaaaagcactgcctattcagtccttttcccatgaaaaagagtcccaccaacaccgacagcactcagttccagtcatttctcgccctgggtccaatgtgaaacctaccctgccccccatcccacagggccgcaggtag

SEQ ID NO: 239342 - DNA, 2478 bp, Artificial Sequence
  derived and/or modified sequence
atggcaacatctgagagggcactgcttcggaccagagccgcttcactgctccgcggtctgggcagatcccgcactggtgcacgctctcttcagttccgggcagaaaaggaaaggcaaccctgctggtctttcccaatgggccagaaaacaaagggttcttctaacatcgcctcctcatacctgctccagcagctaatgcaccggtaccaagaactcgatagtgacggggacgaagatcagggcgaaggagaggccggatcagaggagtctagcgaatcggaaatgttaaacctggaagaagagtttgacggagtgctgcgagaagaagccgttgccaaagccttgcatcacctaggcagatccggaagcggaaccgagcaggtgtacctcaatttgaccctgagcggctgtaaccttattgatgtttccattctatgtggctacgtccacctgcagaaattggatttatcagcaaataagattgaggatctctcctgtgtgtcttgtatgccgtatttactggagcttaatgcttcacaaaataacctgaccacatttttcaatttcaaacccccaaagaacctcaaaaaagccgacttctcccacaatcagatctcagagatatgtgatctaagcgcttatcacgctctaacaaagctcattctggatggcaatgaaatcgaggagatatcagggctggaaatgtgcaacaatctgatccacctcagcctcgccaataataagatcacaacaataaacggcctgaacaagctgcccattaagattctgtgcttatcaaacaaccagatagaaatgatcaccgggctggaggacctgaaagcgctccagaacctcgacttgtcacacaatcagatcagctctcttcaggggctggaaaaccacgacctgctggaggtaatcaacctggaggataataaaatcgcagagctgagagagatcgagtacattaaaaacctgccgattcttcgcgtgttgaacttgctggagaaccccatccaggaaaagtcagaatactggttctttgtcatcttcatgctgcttagactcaccgaattggaccagaagaagataaaagtggaggagaaagtttcagcggtgaataagtacgatccaccccctgaagtggtcgctgcacaggaccacctcacccacgttgtgaacagcgtcatgcagccgcagcgaatcttcgacagcactcttccctcacttgacgctccatacccaatgcttatcttagccggacctgaagcctgtggcaagcgcgaattagctcatagactgtgtcggcaattttccacatatttccgctacggagcttgccatactacaaggccgccatatttcggagagggcgatcgggtcgactaccactttatctcccaggatgtgttcgatgagatggtgaatatgggcaagtttatcttaactttctcttacggcaatcacaagtatggattgaatcgcgatactgttgaaggcattgcccgagacggtttggcttcatgtatacatatggagatcgagggggtccgctcactcaagtactcatattttgagcctcgttacatcctggtcgtgcccatgaataaggagaagtatgaaggttatttgcggaggaagggcctcttctcaagggcagagatcgagtttgccgtttcaagggtcgatctgtatatcaaaattaaccagaactttcctggctattttgatgaagtgattaacgcagacgatctcgacgtggcctaccaaaagctgagccaactgataagggaatatctgggactcaccgaggagcccgcaaaatcactggccactacagccgatgtgaagactagccacctaaagcctgaggctcaccctaccaaatacatctcgagcaacatgggcgactttctccacagtacagacaggaactacctcataaaattttgggccaagttgtcagctaagaaaacccccgctgaacgagattccattcacaggcagcatgaagccgctcgccaggccctgatgggccgtatcagaccagaccacactctgctgtttcaaaggggcccagtgcccgcacctcttacgagcggcctgcattactacacaacattagaagagctgtggaagtcctttgacctgtgtgaagattacttcaaacccccttttgggccatatccggagaagagcggtaaagactctctggtgtcaatgaagtgctccctcttccgcttctgcccctggagcaaagagctcccttttcagccacctgagggatctatatcttcacatttagggtctggagcatctgactcagagacggaagaaactcgaaaggctttaccaatacagtcgttttctcacgaaaaagagagccaccaacatagacagcacagtgtgcccgtaatctctagacctgggtccaacgtaaagcccaccctgccccctatcccgcagggtagaagatag

SEQ ID NO: 239343 - protein, 303 aa, Artificial Sequence
  derived and/or modified sequence
MAAAARARVAYLLRQLQRAACQCPTHSHTYSQAPGLSPSGKTTDYAFEMAVSNIRYGAAVTKEVGMDLKNMGAKNVCLMTDKNLSKLPPVQVAMDSLVKNGIPFTVYDNVRVEPTDSSFMEAIEFAQKGAFDAYVAVGGGSTMDTCKAANLYASSPHSDFLDYVSAPIGKGKPVSVPLKPLIAVPTTSGTGSETTGVAIFDYEHLKVKIGITSRAIKPTLGLIDPLHTLHMPARVVANSGFDVLCHALESYTTLPYHLRSPCPSNPITRPAYQGSNPISDIWAIHALRIVAKYLKRAVNSTDK

SEQ ID NO: 239344 - protein, 467 aa, Artificial Sequence
  derived and/or modified sequence
MAAAARARVAYLLRQLQRAACQCPTHSHTYSQAPGLSPSGKTTDYAFEMAVSNIRYGAAVTKEVGMDLKNMGAKNVCLMTDKNLSKLPPVQVAMDSLVKNGIPFTVYDNVRVEPTDSSFMEAIEFAQKGAFDAYVAVGGGSTMDTCKAANLYASSPHSDFLDYVSAPIGKGKPVSVPLKPLIAVPTTSGTGSETTGVAIFDYEHLKVKIGITSRAIKPTLGLIDPLHTLHMPARVVANSGFDVLCHALESYTTLPYHLRSPCPSNPITRPAYQGSNPISDIWAIHALRIVAKYLKRAVRNPDDLEARSHMHLASAFAGIGFGNAGVHLCHGMSYPISGLVKMYKAKDYNVDHPLVPHGLSVVLTSPAVFTFTAQMFPERHLEMAEILGADTRTARIQDAGLVLADTLRKFLFDLDVDDGLAAVGYSKADIPALVKGTLPQERVTKLAPCPQSEEDLAALFEASMKLY

SEQ ID NO: 239345 - DNA, 912 bp, Artificial Sequence
  derived and/or modified sequence
atggctgctgctgcacgtgcaagagtggcctacttgttacgacagttacagcgagccgcatgccaatgcccaacgcacagccacacatactcccaagccccaggcctctccccctctggaaagaccacagactacgctttcgagatggccgtgagcaatatacgctatggggcagccgtcacaaaagaagtgggaatggaccttaaaaatatgggcgctaagaatgtgtgtcttatgacggacaagaatctgagcaagttacctccggtgcaagttgccatggactcactggtgaagaatggcattcccttcacagtgtacgataatgttagggtcgagccgacagatagcagtttcatggaggcaatagaattcgctcaaaaaggcgcgttcgatgcctatgtagcggtcggtggtggatccacgatggacacttgtaaggccgccaacttgtacgctagcagtccacacagcgactttctggattatgtcagtgcccctatcgggaagggaaagcccgtgtccgttcctctgaagccactaatcgcggtgcctactacctcgggaacgggttctgagactactggcgtagcgatattcgattacgaacatttgaaggtgaagataggtattacctcaagagccattaagccaactttgggactgattgacccgttacacacccttcatatgcccgcccgagttgtcgctaactcaggttttgatgtcctgtgtcatgcactcgagagctataccacactgccttatcatctgcgcagtccttgtccatccaaccccataacgagaccagcctatcaaggttcaaatcccatttcagacatttgggcaattcatgcactcaggatcgttgcgaaatatctcaagcgcgctgtaaactccacggacaagtag

SEQ ID NO: 239346 - DNA, 1404 bp, Artificial Sequence
  derived and/or modified sequence
atggccgccgccgcgcgagcacgggtggcctacctgctgagacagctgcaacgagccgcgtgtcagtgtccgactcactcccacacttatagccaagcccccggcttaagtcctagtggaaagaccaccgactatgcatttgaaatggccgtgagtaacattcgctatggtgccgccgtgaccaaggaggtcggtatggacctgaagaatatgggcgccaaaaacgtgtgcctaatgacagacaagaacctctcgaaactgccaccggtgcaagtggctatggacagcctcgttaaaaacggcattccatttaccgtttacgataacgttcgcgtcgaacccacagattcgagctttatggaggcaattgagtttgctcagaaaggagccttcgacgcctatgtggcagtgggggggggttctacaatggatacctgtaaagccgctaacttatatgcatctagtccacacagcgactttttggactacgtctccgctcccatcggcaaagggaaacctgtttccgtgccgttgaaacctctgattgctgtacctacaacctccggcaccggatcagaaacaaccggcgttgctattttcgactacgaacacttgaaggttaagattgggataacctcccgcgcgataaaacctacgcttggactcatagatcccctccacacgctccacatgccggcccgcgtagttgcgaacagtggctttgatgtcctgtgccacgctctggaatcatataccactctcccctatcatctgagatccccttgcccaagtaacccaataacccgccccgcgtatcagggctctaacccaatttcggacatatgggctatccacgctttgcgcattgtcgcaaaatacctcaagagagctgtgcggaatcccgatgacctcgaggccaggtcgcacatgcacctagcaagtgcattcgccggcattggctttggcaatgctggtgtgcatttatgtcacggcatgtcttatcccatctccggcttggtgaagatgtacaaagcaaaggattataacgtggatcatcccctggtgcctcacggcctgagcgtcgtactcaccagcccagcggtgtttacttttaccgctcagatgtttcctgagagacacttggaaatggcggagattctaggcgcagacactaggactgctcgcatccaggacgccggcctggtgctggccgatacgctcagaaaattcctatttgacctagatgtcgacgatgggctagctgcggtcggctacagcaaggccgacattcctgccttggtgaaaggcacactcccacaggagagagttactaaactcgccccctgcccgcagagtgaagaggacctggccgccttattcgaagcttctatgaaattgtactag

SEQ ID NO: 239347 - DNA, 912 bp, Artificial Sequence
  derived and/or modified sequence
atggctgctgctgcccgggcccgggtggcctacctgctgcggcagctgcagagagctgcctgccagtgccccacccacagccacacctacagccaggcccctggcctgagccccagcggcaagaccacagattatgcctttgagatggctgtgagcaacatccgctacggggctgctgtgaccaaggaggtgggcatggacctgaagaacatgggcgccaagaatgtgtgcctgatgacagacaagaacctgagcaagctgccccctgtgcaggtggccatggacagcctggtgaagaatggcatccccttcaccgtgtatgacaacgtgcgggtggagcccacagacagcagcttcatggaggccattgaatttgcccagaagggggcctttgatgcctacgtggccgtgggcggcggcagcaccatggacacctgcaaggccgccaacctgtatgccagcagcccccacagcgacttcctggactatgtgtctgcccccatcggcaagggcaagcctgtgtctgtgcccctgaagcccctgattgctgtgcccaccaccagcggcaccggcagcgagaccactggagtggccatctttgattatgagcacctgaaggtgaagattggcatcaccagccgggccatcaagcccaccctgggcctgattgaccccctgcacaccctgcacatgcctgcccgggtggtggccaacagcggctttgatgtgctgtgccacgccctggagagctacaccaccctgccctaccacctgcggagcccctgccccagcaaccccatcaccaggcctgcctaccagggcagcaaccccatcagtgacatctgggccatccacgccctgagaattgtggccaagtacctgaagagagctgtgaacagcacagacaagtag

SEQ ID NO: 239348 - DNA, 1404 bp, Artificial Sequence
  derived and/or modified sequence
atggctgctgctgcccgggcccgggtggcctacctgctgcggcagctgcagagagctgcctgccagtgccccacccacagccacacctacagccaggcccctggcctgagccccagcggcaagaccacagattatgcctttgagatggctgtgagcaacatccgctacggggctgctgtgaccaaggaggtgggcatggacctgaagaacatgggcgccaagaatgtgtgcctgatgacagacaagaacctgagcaagctgccccctgtgcaggtggccatggacagcctggtgaagaatggcatccccttcaccgtgtatgacaacgtgcgggtggagcccacagacagcagcttcatggaggccattgaatttgcccagaagggggcctttgatgcctacgtggccgtgggcggcggcagcaccatggacacctgcaaggccgccaacctgtatgccagcagcccccacagcgacttcctggactatgtgtctgcccccatcggcaagggcaagcctgtgtctgtgcccctgaagcccctgattgctgtgcccaccaccagcggcaccggcagcgagaccactggagtggccatctttgattatgagcacctgaaggtgaagattggcatcaccagccgggccatcaagcccaccctgggcctgattgaccccctgcacaccctgcacatgcctgcccgggtggtggccaacagcggctttgatgtgctgtgccacgccctggagagctacaccaccctgccctaccacctgcggagcccctgccccagcaaccccatcaccaggcctgcctaccagggcagcaaccccatcagtgacatctgggccatccacgccctgagaattgtggccaagtacctgaagagagctgtgagaaatccagatgacctggaggcccggagccacatgcacctggccagcgcctttgctggcattggatttggaaatgctggggtgcacctgtgccacggcatgagctaccccatcagcggcctggtgaagatgtacaaggccaaggactacaacgtggaccaccccctggtgccccacggcctgtctgtggtgctgaccagccctgctgtgttcaccttcaccgcccagatgtttcctgagcggcacctggagatggccgagatcctgggcgctgacaccaggacagcccgcatccaggatgctggcctggtgctggccgacaccctgaggaagttcctgtttgacctggatgtggatgatggcctggccgctgtgggctacagcaaggctgacatcccagccctggtgaagggcaccctgccccaggagcgggtgaccaagctggccccctgcccccagagcgaggaggacctggccgccctgtttgaggcctccatgaagctgtactag

SEQ ID NO: 239349 - DNA, 946 bp, Artificial Sequence
  derived and/or modified sequence
agcgacccgaggagggaagaggactccaagcgccatggccgctgccgcccgagcccgggtcgcgtacttgctgaggcaactgcaacgcgcagcgtgccagtgcccaactcattctcatacttactcccaagcccctggactttcaccttctgggaaaacaacagattatgcctttgagatggctgtttcaaatattagatatggagcagcagttacaaaggaagtaggaatggacctaaaaaacatgggtgctaaaaatgtgtgcttgatgacagacaagaacctctccaagctccctcctgtgcaagtagctatggattccctagtgaagaatggcatcccctttacggtttatgataatgtgagagtggaaccaacggattcaagcttcatggaagctattgagtttgcccaaaagggagcttttgatgcctatgttgctgtcggtggtggctctaccatggacacctgtaaggctgctaatctgtatgcatccagccctcattctgatttcctagattatgtcagtgcccccattggcaagggaaagcctgtgtctgtgcctcttaagcctctgattgcagtgccaactacctcaggaaccgggagtgaaactactggggttgccatttttgactatgaacacttgaaagtaaaaattggcatcacttcgagagccatcaaacccacactgggactgattgatcctctgcacaccctccacatgcctgcccgagtggtcgccaacagtggctttgatgtgctttgccatgccctggagtcatacaccaccctgccctaccacctgcggagcccctgcccttcaaatcccatcacacggcctgcgtaccagggcagcaacccaatcagtgacatttgggctatccacgcgctgcggatcgtggctaagtatctgaagagggccgtcaacagcactgacaaatga

SEQ ID NO: 239350 - DNA, 1990 bp, Artificial Sequence
  derived and/or modified sequence
gacccgaggagggaagaggactccaagcgccatggccgctgccgcccgagcccgggtcgcgtacttgctgaggcaactgcaacgcgcagcgtgccagtgcccaactcattctcatacttactcccaagcccctggactttcaccttctgggaaaacaacagattatgcctttgagatggctgtttcaaatattagatatggagcagcagttacaaaggaagtaggaatggacctaaaaaacatgggtgctaaaaatgtgtgcttgatgacagacaagaacctctccaagctccctcctgtgcaagtagctatggattccctagtgaagaatggcatcccctttacggtttatgataatgtgagagtggaaccaacggattcaagcttcatggaagctattgagtttgcccaaaagggagcttttgatgcctatgttgctgtcggtggtggctctaccatggacacctgtaaggctgctaatctgtatgcatccagccctcattctgatttcctagattatgtcagtgcccccattggcaagggaaagcctgtgtctgtgcctcttaagcctctgattgcagtgccaactacctcaggaaccgggagtgaaactactggggttgccatttttgactatgaacacttgaaagtaaaaattggcatcacttcgagagccatcaaacccacactgggactgattgatcctctgcacaccctccacatgcctgcccgagtggtcgccaacagtggctttgatgtgctttgccatgccctggagtcatacaccaccctgccctaccacctgcggagcccctgcccttcaaatcccatcacacggcctgcgtaccagggcagcaacccaatcagtgacatttgggctatccacgcgctgcggatcgtggctaagtatctgaagagggctgtcagaaatcccgatgatcttgaagcaaggtctcatatgcacttggcaagtgcttttgctggcatcggctttggaaatgctggtgttcatctgtgccatggaatgtcttacccaatttcaggtttagtgaagatgtataaagcaaaggattacaatgtggatcacccactggtgccccatggcctttctgtggtgctcacgtccccagcggtgttcactttcacggcccagatgtttccagagcgacacctggagatggcagaaatactgggagccgacacccgcactgccaggatccaagatgcagggctggtgttggcagacacgctccggaaattcttattcgatctggatgttgatgatggcctagcagctgttggttactccaaagctgatatccccgcactagtgaaaggaacgctgccccaggaaagggtcaccaagcttgcaccctgtccccagtcagaagaggatctggctgctctgtttgaagcttcaatgaaactgtattaattgtcattttaactgaaagaattaccgctggccattgtagtgctgagagcaagagctgatctagctagggctttgtcttttcatctttgcgcataacttacctgttaccagtataggtgggatatacatttatcttgcaggaaattccccaaagctcagagtccagttccttccataaaacaggctggacaaatgaccactatgttagacccccaggctcgacttcaggggtcagtgttcctgtcccaaaccccacacagaatactctgcctctgtttcatgtagcaaatgagcaaaaactcagtatctatcaaaagtgtaaattatatttcctatgcctagtaattcacttcatgtctaaaaatttatctgatagaaacactagcaccagtacatacagaagcatggcaaggatgtttctggcagcacttttctaataataaaagatttgaaacaaccttaagtattcattattggtatatagatcacttatagtatactagacagtggaatactatggtactgttaataaagatgaagtaaatctcttggaaa

SEQ ID NO: 239351 - DNA, 912 bp, Artificial Sequence
  derived and/or modified sequence
atggccgccgccgcccgggcccgggtggcctacctgctgcggcagcttcaaagggctgcctgccaatgcccaacacactcccacacgtactcacaggctccaggactatctccatccggcaaaacgaccgactatgccttcgagatggcggtgagtaatatccggtatggcgctgccgtgaccaaggaggtgggaatggacctgaaaaatatgggagcgaagaacgtgtgtctaatgacagataagaacctatctaagctcccccctgtgcaggtggcaatggatagtcttgtcaagaacggaattcccttcacagtttatgacaacgtccgagtcgagccgactgactcctctttcatggaagccatcgagttcgcgcaaaaaggcgcttttgatgcttacgtggccgtcggcggaggctccacgatggatacatgcaaggcagccaatctctatgcctccagcccacacagcgattttctggactatgtgagcgcgccaattggaaagggtaagccagtttcggtgcctttgaaaccgctgatcgctgtgcctaccacttcaggtactgggtcagaaactacaggcgttgctatctttgactacgaacatctgaaagtgaaaatcggcatcacgagtagggcaattaagcctacactcgggttgatcgaccccctgcacacattgcatatgcccgctcgggtcgtcgcaaactctggatttgatgtgctgtgtcacgccctggaatcttatactaccctgccttatcacctcaggtctccatgtcctagcaatcctattacccgcccagcctatcagggctcgaatccaatcagtgatatttgggcaatacacgctctgcggattgtggccaaatacctcaagagagcagtgaattctacagataaatag

SEQ ID NO: 239352 - DNA, 1404 bp, Artificial Sequence
  derived and/or modified sequence
atggccgccgccgcccgggcccgggtggcctacctgctgcggcagttgcagagggctgcttgccagtgtcccacccactctcacacctattctcaagctcctgggctttcaccctcaggaaaaaccactgactacgcctttgagatggcggtctcaaatattagatatggcgccgcagtgactaaagaggtcggcatggatttgaaaaatatgggagccaagaatgtgtgtctgatgactgacaagaacctctctaaactcccacccgtgcaggttgccatggactcactggtaaaaaacggcattcccttcaccgtttatgacaacgtgcgtgtggaacccacagactcctccttcatggaggccattgagttcgcccaaaagggagctttcgatgcatatgtggccgtgggcggaggctcaactatggatacgtgcaaggctgccaatctgtacgcctcatctcctcactccgattttctggactatgtcagtgcccccatcgggaagggaaagcccgtcagtgttcctctgaagcccctcattgccgtgccaaccacgtctggcacaggtagcgagaccacaggggtcgcaatatttgattacgaacacctgaaggtgaaaattgggattactagcagagcgatcaaacccacactcgggctgattgatccactgcatactctccatatgcctgctcgagtcgtcgcgaatagtggattcgatgttctttgtcacgccctcgaatcctataccaccttgccataccaccttcgatctccatgtccaagcaacccaattaccagaccggcctaccagggctcgaatcccatctctgacatctgggccatccacgctctgagaatcgtggcaaaatatctgaaaagagccgtgcgcaatcccgatgacctggaggcccgctctcacatgcacctggcctcggcctttgcaggaataggattcggaaacgcaggcgttcacctgtgtcatggcatgtcctatccaatctcagggctcgtaaagatgtataaagcgaaggactacaacgtagaccaccctctcgtcccccacggcctctccgtggtgctaacctccccagcggtgtttactttcaccgctcaaatgttccccgaaagacacttggagatggccgagatcctcggcgctgacacaagaacggcccgaattcaagacgcaggattggtcctggccgatacactgcggaagttcctctttgacttggatgtggatgacggcctcgcagcggttggttattcaaaagctgacatacccgcactcgtgaaaggcacactcccacaggaacgtgtcaccaaactggcaccctgtccgcagtctgaagaggatttggcagcattatttgaggccagcatgaagttgtattag

SEQ ID NO: 239353 - DNA, 912 bp, Artificial Sequence
  derived and/or modified sequence
atggccgctgcagctagagctcgcgtggcctacttgctcaggcagctgcagcgagccgcttgccaatgtccgacgcattctcacacctacagtcaggcgcctgggctgtccccctctggtaagaccacagactacgctttcgaaatggccgtcagcaacatcaggtacggtgcggcagtcactaaggaggtaggcatggacctcaagaacatgggcgctaagaatgtgtgtcttatgaccgacaagaacctgtccaaactacctccggttcaggttgctatggactctttagtgaagaatggcattcctttcacagtctacgacaacgtgagggtggaacccactgatagcagcttcatggaagcaattgagttcgcgcagaagggagcttttgacgcctatgttgcagtggggggtgggtcaacaatggacacctgcaaggccgcaaatctgtatgcttcaagtccccacagcgacttcctggactacgtcagcgcccctatcggaaagggaaaaccagttagtgttcctctcaagcccctaattgccgtccccaccactagcggcactggaagcgagacaactggagtcgcaatattcgattatgagcatctgaaggtgaaaatcggtataactagccgcgcaatcaaacccaccctggggctgatcgaccccttacacactctccacatgccagcacgagttgtggcaaattccgggttcgatgtgctatgtcacgctctcgaatcttataccacactaccttaccatcttcggtctccttgcccctccaaccctatcacccgaccagcataccaaggcagtaacccaatcagcgatatatgggccattcacgcactcaggatagtcgccaaatacctgaagagagccgtgaacagtaccgacaaatag

SEQ ID NO: 239354 - DNA, 1404 bp, Artificial Sequence
  derived and/or modified sequence
atggcggctgcagctcgcgctcgggtagcctatctgttgcggcagctccagcgcgcagcatgtcagtgccctactcattcccatacttacagccaggcccctggcctatcaccgtccggcaaaaccactgactatgctttcgagatggcagtctctaatatccgatatggcgctgctgtcaccaaagaagttggaatggacctgaaaaatatgggagcgaagaatgtgtgcctcatgaccgataaaaatctgagcaagttgccccctgtccaagttgctatggattcattagtcaagaacggcatcccattcaccgtctacgataatgtgagggtcgagcctaccgattcaagctttatggaggcaatagaattcgcccagaagggagccttcgatgcttatgtggccgtgggcggaggcagtacaatggacacttgtaaggccgcaaatctgtatgcctcttccccccatagcgatttcctggactacgtctcagcgccaatcggcaaagggaaaccagtatctgttcctcttaaaccacttattgccgttcccacaacaagcggaactggttcagaaacgacgggtgtggctattttcgactatgagcacctgaaagtgaagatagggatcacaagcagagcaataaagcccaccctgggactgatagatcctctccacactttacatatgcctgcacgggtagttgctaacagtggatttgatgttttgtgtcacgcactggagtcttataccacactgccataccacttacgatcaccatgtcccagtaatcctataacgagacccgcttaccagggatccaaccccataagcgatatttgggccattcacgctctccgaatcgtggccaaatacctgaaacgagctgtcagaaaccccgatgacctggaggctaggtctcatatgcatctggccagtgctttcgccggaatcggtttcggaaatgcaggagtgcatttgtgccatggcatgtcatatcccatcagcggattagtgaagatgtataaagccaaggattacaacgtcgatcacccgctggtcccacacggtttatcggtggtgctcacaagcccggcagttttcacttttactgctcagatgttcccagagcgccatttagaaatggccgagatcctcggggctgacacgaggaccgccagaatccaggatgctggattggttctggcagacactctgaggaagttcctgttcgacctcgacgtggacgacggcttggctgccgtgggatacagcaaagcggatattcctgctcttgttaaagggaccttgcctcaggagagagtaacaaagctcgcaccatgcccacaatctgaggaagacctggccgcattgtttgaggcgtccatgaagctgtattag

SEQ ID NO: 239355 - DNA, 912 bp, Artificial Sequence
  derived and/or modified sequence
atggccgccgccgccagagccagagtggcctacctgctgagacagctgcagagagccgcctgccagtgccccacccacagccacacctacagccaggcccccggcctgagccccagcggcaagaccaccgactacgccttcgagatggccgtgagcaacatcagatacggcgccgccgtgaccaaggaggtgggcatggacctgaagaacatgggcgccaagaacgtgtgcctgatgaccgacaagaacctgagcaagctgccccccgtgcaggtggccatggacagcctggtgaagaacggcatccccttcaccgtgtacgacaacgtgagagtggagcccaccgacagcagcttcatggaggccatcgagttcgcccagaagggcgccttcgacgcctacgtggccgtgggcggcggcagcaccatggacacctgcaaggccgccaacctgtacgccagcagcccccacagcgacttcctggactacgtgagcgcccccatcggcaagggcaagcccgtgagcgtgcccctgaagcccctgatcgccgtgcccaccaccagcggcaccggcagcgagaccaccggcgtggccatcttcgactacgagcacctgaaggtgaagatcggcatcaccagcagagccatcaagcccaccctgggcctgatcgaccccctgcacaccctgcacatgcccgccagagtggtggccaacagcggcttcgacgtgctgtgccacgccctggagagctacaccaccctgccctaccacctgagaagcccctgccccagcaaccccatcaccagacccgcctaccagggcagcaaccccatcagcgacatctgggccatccacgccctgagaatcgtggccaagtacctgaagagagccgtgaacagcaccgacaagtag

SEQ ID NO: 239356 - DNA, 1404 bp, Artificial Sequence
  derived and/or modified sequence
atggccgccgccgccagagccagagtggcctacctgctgagacagctgcagagagccgcctgccagtgccccacccacagccacacctacagccaggcccccggcctgagccccagcggcaagaccaccgactacgccttcgagatggccgtgagcaacatcagatacggcgccgccgtgaccaaggaggtgggcatggacctgaagaacatgggcgccaagaacgtgtgcctgatgaccgacaagaacctgagcaagctgccccccgtgcaggtggccatggacagcctggtgaagaacggcatccccttcaccgtgtacgacaacgtgagagtggagcccaccgacagcagcttcatggaggccatcgagttcgcccagaagggcgccttcgacgcctacgtggccgtgggcggcggcagcaccatggacacctgcaaggccgccaacctgtacgccagcagcccccacagcgacttcctggactacgtgagcgcccccatcggcaagggcaagcccgtgagcgtgcccctgaagcccctgatcgccgtgcccaccaccagcggcaccggcagcgagaccaccggcgtggccatcttcgactacgagcacctgaaggtgaagatcggcatcaccagcagagccatcaagcccaccctgggcctgatcgaccccctgcacaccctgcacatgcccgccagagtggtggccaacagcggcttcgacgtgctgtgccacgccctggagagctacaccaccctgccctaccacctgagaagcccctgccccagcaaccccatcaccagacccgcctaccagggcagcaaccccatcagcgacatctgggccatccacgccctgagaatcgtggccaagtacctgaagagagccgtgagaaaccccgacgacctggaggccagaagccacatgcacctggccagcgccttcgccggcatcggcttcggcaacgccggcgtgcacctgtgccacggcatgagctaccccatcagcggcctggtgaagatgtacaaggccaaggactacaacgtggaccaccccctggtgccccacggcctgagcgtggtgctgaccagccccgccgtgttcaccttcaccgcccagatgttccccgagagacacctggagatggccgagatcctgggcgccgacaccagaaccgccagaatccaggacgccggcctggtgctggccgacaccctgagaaagttcctgttcgacctggacgtggacgacggcctggccgccgtgggctacagcaaggccgacatccccgccctggtgaagggcaccctgccccaggagagagtgaccaagctggccccctgcccccagagcgaggaggacctggccgccctgttcgaggccagcatgaagctgtactag

SEQ ID NO: 239357 - protein, 1463 aa, Artificial Sequence
  derived and/or modified sequence
MEPRLFCWTTLFLLAGWCLPGLPCPSRCLCFKSTVRCMHLMLDHIPQVPQQTTVLDLRFNRIREIPGSAFKKLKNLNTLLLNNNHIRKISRNAFEGLENLLYLYLYKNEIHALDKQTFKGLISLEHLYIHFNQLEMLQPETFGDLLRLERLFLHNNKLSKIPAGSFSNLDSLKRLRLDSNALVCDCDLMWLGELLQGFAQHGHTQAAATCEYPRRLHGRAVASVTVEEFNCQSPRITFEPQDVEVPSGNTVYFTCRAEGNPKPEIIWIHNNHSLDLEDDTRLNVFDDGTLMIRNTRESDQGVYQCMARNSAGEAKTQSAMLRYSSLPAKPSFVIQPQDTEVLIGTSTTLECMATGHPHPLITWTRDNGLELDGSRHVATSSGLYLQNITQRDHGRFTCHANNSHGTVQAAANIIVQAPPQFTVTPKDQVVLEEHAVEWLCEADGNPPPVIVWTKTGGQLPVEGQHTVLSSGTLRIDRAAQHDQGQYECQAVSSLGVKKVSVQLTVKPKALAVFTQLPQDTSVEVGKNINISCHAQGEPQPIITWNKEGVQITESGKFHVDDEGTLTIYDAGFPDQGRYECVARNSFGLAVTNMFLTVTAIQGRQAGDDFVESSILDAVQRVDSAINSTRRHLFSQKPHTSSDLLAQFHYPRDPLIVEMARAGEIFEHTLQLIRERVKQGLTVDLEGKEFRYNDLVSPRSLSLIANLSGCTARRPLPNCSNRCFHAKYRAHDGTCNNLQQPTWGAALTAFARLLQPAYRDGIRAPRGLGLPVGSRQPLPPPRLVATVWARAAAVTPDHSYTRMLMHWGWFLEHDLDHTVPALSTARFSDGRPCSSVCTNDPPCFPMNTRHADPRGTHAPCMLFARSSPACASGRPSATVDSVYAREQINQQTAYIDGSNVYGSSERESQALRDPSVPRGLLKTGFPWPPSGKPLLPFSTGPPTECARQEQESPCFLAGDHRANEHLALAAMHTLWFREHNRMATELSALNPHWEGNTVYQEARKIVGAELQHITYSHWLPKVLGDPGTRMLRGYRGYNPNVNAGIINSFATAAFRFGHTLINPILYRLNATLGEISEGHLPFHKALFSPSRIIKEGGIDPVLRGLFGVAAKWRAPSYLLSPELTQRLFSAAYSAAVDSAATIIQRGRDHGIPPYVDFRVFCNLTSVKNFEDLQNEIKDSEIRQKLRKLYGSPGDIDLWPALMVEDLIPGTRVGPTLMCLFVTQFQRLRDGDRFWYENPGVFTPAQLTQLKQASLSRVLCDNGDSIQQVQADVFVKAEYPQDYLNCSEIPKVDLRVWQDCCADCRSRGQFRAVTQESQKKRSAQYSYPVDKDMELSHLRSRQQDKIYVGEDARNVTVLAKTKFSQDFSTFAAEIQETITALREQINKLEARLRQAGCTDVRGVPRKAEERWMKEDCTHCICESGQVTCVVEICPPAPCPSPELVKGTCCPVCRDRGMPSDSPEKR

SEQ ID NO: 239358 - protein, 1316 aa, Artificial Sequence
  derived and/or modified sequence
MEPRLFCWTTLFLLAGWCLPGLPCPSRCLCFKSTVRCMHLMLDHIPQVPQQTTVLDLRFNRIREIPGSAFKKLKNLNTLLLNNNHIRKISRNAFEGLENLLYLYLYKNEIHALDKQTFKGLISLEHLYIHFNQLEMLQPETFGDLLRLERLFLHNNKLSKIPAGSFSNLDSLKRLRLDSNALVCDCDLMWLGELLQGFAQHGHTQAAATCEYPRRLHGRAVASVTVEEFNCQSPRITFEPQDVEVPSGNTVYFTCRAEGNPKPEIIWIHNNHSLDLEDDTRLNVFDDGTLMIRNTRESDQGVYQCMARNSAGEAKTQSAMLRYSSLPAKPSFVIQPQDTEVLIGTSTTLECMATGHPHPLITWTRDNGLELDGSRHVATSSGLYLQNITQRDHGRFTCHANNSHGTVQAAANIIVQAPPQFTVTPKDQVVLEEHAVEWLCEADGNPPPVIVWTKTGGQLPVEGQHTVLSSGTLRIDRAAQHDQGQYECQAVSSLGVKKVSVQLTVKPKALAVFTQLPQDTSVEVGKNINISCHAQGEPQPIITWNKEGVQITESGKFHVDDEGTLTIYDAGFPDQGRYECVARNSFGLAVTNMFLTVTAIQGRQAGDDFVESSILDAVQRVDSAINSTRRHLFSQKPHTSSDLLAQFHYPRDPLIVEMARAGEIFEHTLQLIRERVKQGLTVDLEGKEFRYNDLVSPRSLSLIANLSGCTARRPLPNCSNRCFHAKYRAHDGTCNNLQQPTWGAALTAFARLLQPAYRDGIRAPRGLGLPVGSRQPLPPPRLVATVWARAAAVTPDHSYTRMLMHWGWFLEHDLDHTVPALSTARFSDGRPCSSVCTNDPPCFPMNTRHADPRGTHAPCMLFARSSPACASGRPSATVDSVYAREQINQQTAYIDGSNVYGSSERESQALRDPSVPRGLLKTGFPWPPSGKPLLPFSTGPPTECARQEQESPCFLAGDHRANEHLALAAMHTLWFREHNRMATELSALNPHWEGNTVYQEARKIVGAELQHITYSHWLPKVLGDPGTRMLRGYRGYNPNVNAGIINSFATAAFRFGHTLINPILYRLNATLGEISEGHLPFHKALFSPSRIIKEGGIDPVLRGLFGVAAKWRAPSYLLSPELTQRLFSAAYSAAVDSAATIIQRGRDHGIPPYVDFRVFCNLTSVKNFEDLQNEIKDSEIRQKLRKLYGSPGDIDLWPALMVEDLIPGTRVGPTLMCLFVTQFQRLRDGDRFWYENPGVFTPAQLTQLKQASLSRVLCDNGDSIQQVQADVFVKAEYPQDYLNCSEIPKVDLRVWQDCCADKQAGGTPEAGRVYRC

SEQ ID NO: 239359 - DNA, 3951 bp, Artificial Sequence
  derived and/or modified sequence
atggagccccggctgttctgctggaccaccctgttcctgctggccgggtggtgtctgcccggccttccatgccctagcaggtgtctgtgcttcaagtctactgtgagatgcatgcaccttatgctcgaccacattccacaggtcccacagcagaccactgttctggatctgaggttcaacaggatccgagaaattcctggatccgcctttaagaaactcaaaaacctgaatactttgctcctgaataacaaccatattcgaaagatttcccgcaatgcgtttgaaggtctagagaatctcctatacttgtatctgtataagaacgagatccacgcactggacaaacagacattcaagggcctcattagtctggaacacctttacatccacttcaaccaattagaaatgcttcagcctgagactttcggggatctactgcgactagagaggcttttcctccacaacaataagctaagcaaaattccagccggatccttcagtaaccttgactccctgaagcgactccggttggactcaaacgcattagtctgtgactgcgacctgatgtggctaggggaactactgcaagggtttgctcaacatgggcatacccaggccgcagccacttgtgagtatcctaggcgactacacgggcgtgccgtggcatctgtgactgtcgaggaattcaactgtcagtcaccccgcatcacttttgagccccaggacgtggaagtgcctagcggtaatactgtttacttcacttgtcgggcggagggcaacccgaagcctgaaatcatttggattcataacaaccactcgctggatctggaggacgatactcgccttaatgtctttgacgatggcaccttgatgatccgcaatacacgggaatccgatcagggagtctaccaatgtatggcacgcaactccgccggggaggctaaaactcagtctgcgatgttgaggtactcatccttgccagctaaaccctctttcgtgatccagccccaggataccgaggtactgataggaaccagcactactcttgaatgcatggccactggtcatccccaccccctcattacctggacccgcgataatgggctggaactggacggcagtcggcacgtggcgacgagcagtggactgtatcttcagaacatcacccagagggatcacggcagatttacctgtcacgccaataatagccatgggacagtccaggctgcagcaaacattatagtccaagcgcctccccagttcactgtgaccccaaaggaccaggtcgtgttggaggaacacgccgtcgaatggttgtgcgaggctgatggcaaccctccaccagtcattgtctggaccaagacgggaggacagttgcccgtcgaagggcagcacactgtgttgtcaagcggtacgctccgcattgacagagcggcccagcacgaccagggccagtacgaatgccaggctgtgtcctccctgggagtgaaaaaggtgagtgtgcaactgaccgtcaaacccaaagcactcgccgtgttcacacaattacctcaggacacttcggtggaggtaggaaaaaatatcaatatatcttgtcacgctcaaggcgaaccgcagccaatcatcacgtggaataaagagggggtacagataacggagtcggggaaattccacgtagacgacgagggtactctcacaatttacgatgcagggtttccggatcaggggcgctatgagtgcgtcgcgcgcaatagcttcgggttggccgtcacaaatatgtttctgacggtgaccgccattcaaggacgccaggcaggcgacgactttgtggaaagtagcatactggacgctgttcagagagtggacagcgccataaattctacacgacgacacctcttcagtcagaaaccccacacgtctagtgacctcttagcccaattccattacccacgcgatcctctgatcgtggagatggcccgcgctggcgagatcttcgaacatactctgcagctgattcgagagcgagtgaaacagggcttaaccgtagatctggaaggtaaggagttcagatacaatgatttagtgtcccctcggtccctgagcctgattgcaaatttgtcaggctgtaccgcaaggagacctctacccaattgtagtaatcggtgcttccacgcgaagtacagagcccacgacggtacatgcaataacctccagcagccaacgtggggcgctgcactgaccgcctttgctcgcctgttgcaacccgcctacagagatggtattcgagccccacgtggcctcggactacccgtcggttcccgacagcccctcccgcctccacgcctcgtggcaaccgtatgggccagggcggctgctgtcacccctgatcattcgtacactagaatgctgatgcactggggatggttcttagaacatgacctggatcacacggtcccagctctgtccacggctcggttttccgacggcaggccatgctctagcgtttgtaccaatgatcccccttgctttcccatgaacaccaggcacgcggatcctagaggaacacacgctccttgtatgctgttcgcgaggtcttctccagcatgtgcttccggccggccctcagctactgtcgactctgtgtacgcccgtgagcagataaatcaacagacggcttacattgatggtagtaacgtttatgggtcgtccgagagagagagccaagctctgagagaccccagcgtcccccgggggctgcttaaaacaggatttccatggccacctagcggcaagcctctgctcccctttagcacaggaccccccaccgagtgcgctaggcaggagcaggagtcaccctgcttccttgctggcgatcacagagccaacgaacacttagcactcgcggctatgcataccctctggttccgtgagcacaaccgcatggctacagaactctctgccctgaaccctcattgggaaggcaacacggtatatcaggaggcacgaaagattgtgggcgccgaattgcaacacatcacctacagccactggttgcctaaggttttaggagatcccggcaccagaatgcttagaggctatcgaggatataatcctaatgtcaatgccgggattatcaactccttcgctacagccgcatttcgctttggtcatactttgattaatcccattttgtacaggctgaacgcgacccttggagaaatttctgagggacacctccccttccacaaagccctttttagtccttctaggatcatcaaagagggcggcatcgatcccgttcttcgtggactgtttggggtggctgctaaatggcgcgccccaagctatctgctgtctcccgagctgacacaacggctctttagcgctgcgtacagcgccgccgtagacagcgcggctacaatcattcagaggggtcgggaccacggtattcccccatacgtagacttccgggttttttgtaatttaactagcgtgaagaatttcgaggatctccagaatgagattaaggatagtgaaatccggcagaagctgaggaagctctatgggagtcccggcgacatcgacctttggcctgctttgatggtggaagatctcattcctggcacaagggttgggcccacgctaatgtgcctcttcgtgacccagttccagaggctgagagacggtgatcggttctggtacgaaaaccctggagtgttcacaccggcacagttgacacagttaaaacaggcttcacttagcagagtgctgtgcgacaatggcgattccatccagcaggttcaggccgatgtatttgttaaggcagagtacccccaggactacctgaactgcagcgagatcccgaaggtggatttaagagtgtggcaggattgctgcgccgacaagcaggctgggggcactccggaggctgggagggtttaccgctgctag

SEQ ID NO: 239360 - DNA, 4392 bp, Artificial Sequence
  derived and/or modified sequence
atggaacccagactcttctgttggactacactcttcctgctggccggatggtgtctcccaggactgccctgccctagtcgatgcttgtgctttaaatccacggttaggtgtatgcacctgatgttggaccacataccccaggtgccccagcagacgacagtgctcgatctgcgatttaataggatacgagagattcctgggtccgcttttaaaaagttgaagaacctaaatactctgctgcttaacaacaatcacatcagaaaaatcagtagaaacgcctttgaggggctggaaaatttactctacctttacctctacaagaatgagatccacgcactggacaaacagaccttcaaaggactcatctctctggaacatctgtacattcattttaaccagcttgagatgctccagcccgagacattcggcgacttgttgagactcgaacgcctgtttcttcataacaataagctgtctaaaatacctgccggtagctttagcaacctggattcactgaagaggctcaggctcgactctaacgctctcgtttgcgattgtgatctgatgtggctaggggagttgttgcaggggttcgctcaacatgggcacactcaagctgccgctacatgcgaatatcccaggaggctgcatgggagggccgtagcttctgtcactgtggaggagtttaactgccagtcccctcgtatcacgttcgagccccaggatgtagaggtaccctccggcaacaccgtctactttacgtgtcgggctgagggcaatcccaaacccgagatcatatggatccataacaatcatagtctcgacctggaagacgacaccaggctgaacgtgttcgacgatgggactctcatgattcgcaacacgagagagtcagaccagggagtctatcaatgtatggctaggaattctgcaggagaggctaaaacccagtccgcaatgttgcgctactcatcccttccagccaagccctcttttgtcattcagcctcaggacaccgaagtacttattgggacctctacaaccctcgaatgcatggccacagggcatcctcatcccttaatcacatggactcgggacaacggcctggaattggacggatccagacacgttgctacaagttccggcctgtacttacaaaacattacgcagagggaccacggcaggttcacttgccacgctaacaatagtcacggaacagttcaggcggcagctaacattattgtgcaagccccaccgcagttcaccgtgacaccaaaagaccaagttgtactcgaggaacacgccgtggagtggctttgtgaagcagatgggaatccgcctcctgttatcgtttggactaagaccggagggcagctccccgtcgagggtcagcacaccgtactctcatcaggtaccttgaggatcgatagggccgctcagcatgatcagggacaatacgagtgccaggcggtgtccagtctcggcgttaaaaaagtctccgtccagttaacggtgaaacccaaggcattggcagtgtttacccagctgcctcaagatacttctgttgaggtgggaaagaatatcaatatcagctgtcacgcccaaggggaaccgcagcctatcatcacttggaacaaggagggagtccagatcactgaaagcggcaagttccacgtcgacgatgaagggacattgaccatctatgatgccggtttccctgaccaaggccgttacgaatgcgtggctcgaaattcattcgggctggccgttacaaacatgtttctcacagtgacagccattcagggaaggcaggctggagacgactttgtggaatctagtatattagacgcggtccagcgtgtggattctgctattaactccactaggaggcatctgttctcccagaagccacacactagctcagacctgttggcccaatttcactatcctagggatcccctgatcgttgagatggccagggccggagagatatttgagcacactctgcagctgattcgcgagcgggttaagcaaggactaactgtggatctggaaggcaaagagtttcggtacaacgatttagtctccccccgaagcctcagccttatagccaatctctccggatgcaccgccagacgccctctgcccaattgttccaatcgctgcttccacgcaaagtacagagcacatgatggcacctgcaacaacttgcagcagcctacctggggggctgcgctgactgccttcgccaggctgttgcagccagcataccgggacgggatcagagccccacgcggactggggctgccagttggtagccgacagccgttaccccctcccaggctggtcgccaccgtctgggctagagcagcagcagtgacccccgatcacagctacacgaggatgttaatgcactggggatggtttttagagcatgatctggatcacactgtccccgcactatccaccgctagattctctgatggcagaccttgttcatccgtgtgcaccaacgatccaccctgctttccgatgaacacgcggcacgcggatcccagaggtacccatgcaccctgtatgcttttcgctagatcttcgccagcgtgtgccagtggtcggccatcagccactgtagactcagtctacgcccgagagcagattaatcagcagacggcttacatcgacgggtccaacgtttatggctccagcgaacgggaatcccaggcgctgcgggacccttccgttccacggggactccttaaaacagggttcccctggccaccttcggggaagcccttacttccatttagtacgggtccaccaacggagtgcgcacgacaggagcaggaatctccctgcttcctagctggtgaccacagagctaatgaacacctggcgctggctgcaatgcacaccttgtggttccgggagcacaaccggatggcaactgaattgtccgccctgaacccccattgggagggtaacaccgtttatcaggaagctcgtaaaatcgtaggtgcggaattgcagcatattacctactcacactggcttcctaaagttctcggggacccagggacgaggatgttacggggttacagggggtacaacccaaacgttaatgcaggcattataaacagctttgccaccgcagccttcaggtttggtcacaccttgatcaaccctattctatacagattgaacgcaactctgggcgaaatttctgaaggccacctgcctttccacaaggccctgttcagccctagtcgaatcatcaaggagggtggtatcgaccctgtgctgcggggtctgtttggagtggctgccaagtggcgggcaccctcttatctgctctcgcctgagctgactcagagactatttagtgcagcctactctgcagccgtcgattccgccgctactatcatccaacgtgggagggatcacggcatccccccatatgtagattttcgggtgttctgcaatttgacatctgtgaaaaactttgaggatttacagaacgagatcaaggacagtgaaatccggcagaaacttcgtaagctctacggaagccctggcgacattgatctgtggcctgccctaatggtagaggatctaatccctggtacccgggtcggtcccacgctgatgtgcctatttgttactcagtttcagagactccgggacggcgatagattctggtacgaaaacccaggagtttttacaccagcacagctgacccagctgaaacaagcttcactttcccgggtgttatgcgataacggtgatagcatacaacaggtgcaggccgatgtctttgtaaaggccgagtatcctcaagactatctgaattgctccgagattcctaaggtcgacttgcgcgtatggcaggattgttgcgcagactgcaggtcccgaggacagtttagggcggttacgcaggagtcccagaaaaaacgttctgcccagtattcttatccagtcgacaaggacatggagttatcgcacctgaggtccagacagcaggataaaatctatgtcggagaggacgcccgtaacgtgactgtcctcgcaaagaccaaattcagtcaggatttttctacgttcgcagctgagatccaggagaccattacagccctgcgtgagcagatcaataaactggaggcaaggcttagacaagccggatgcactgatgtgcgaggggtcccaagaaaagcggaggagaggtggatgaaagaagactgtacacattgtatttgcgagagtgggcaggtgacgtgtgtagttgagatctgcccacctgcaccatgcccatcccccgaactggtcaaaggcacttgctgccctgtgtgtcgcgatcgcggtatgcccagtgattctccggagaagaggtag

SEQ ID NO: 239361 - DNA, 3951 bp, Artificial Sequence
  derived and/or modified sequence
atggaacccaggttattctgttggacgacgctgttcctgcttgcaggatggtgcctgcctggcctgccctgcccttccaggtgcttatgctttaaatctactgttcgatgcatgcacttgatgcttgaccacattccccaggtgccacagcaaacaacagtgttggatctgcgtttcaatagaatccgggaaatcccaggctccgctttcaaaaagcttaagaatcttaataccctcctgttgaacaacaatcatatacgaaagattagtcgaaatgcgttcgaagggttggagaatttactgtacctgtacctgtataaaaacgaaatacacgccctggataagcagacctttaaggggctgatatccttggagcacctgtacatccattttaaccagctcgagatgctgcagcctgagaccttcggggacctgttgcgtttagagaggctgtttctgcacaataataagttatctaagatccctgcagggagtttctcaaatcttgactcactcaagcggctgagacttgatagcaatgccctcgtctgcgactgtgatttgatgtggctcggtgaactgctgcaagggtttgcccaacatggacatacccaagccgcagccacctgtgaatacccacggcgattgcatggcagagcagttgcgtccgtcactgtggaggaatttaactgccaatcccccagaattaccttcgagcctcaagacgtggaggtgccgtctggaaacactgtctattttacctgccgcgctgagggtaatcccaagccagagatcatatggatacataataaccattcattggatctggaggacgatacccgcttgaatgttttcgatgatggcacactcatgatccgcaatacacgcgaaagcgatcagggtgtgtatcagtgcatggcacgcaattccgcaggcgaggccaaaacgcaaagcgctatgctgcgctattcatctcttcccgcaaaacctagctttgtgatccagcctcaagacaccgaagttctgattggcactagcacaacactggagtgcatggctaccgggcacccacatccgttaataacctggacccgggataacgggttggagctcgatggctcacggcacgtggctacctcctccggactttatctacaaaatatcacccagcgggaccatgggaggtttacttgtcatgccaacaacagccatgggacagtccaggcagctgccaacattatagtgcaggcaccaccccagtttaccgtcactccaaaggaccaggttgtgttggaagaacatgctgttgagtggctgtgtgaggcagacggcaatcccccacctgtaatcgtctggactaagactggtggtcaattgccagtagagggacagcacacagtgttgtcctccggcaccctccgtatcgatcgcgcagctcaacacgatcaggggcaatatgagtgccaagctgtctcaagtctgggggtgaagaaagtgtctgtgcaattaacagtgaagcccaaggcccttgccgtgttcacccagttaccccaagacactagtgtggaagttggcaagaatataaatatatcctgccacgcacagggcgagccccagccaattattacctggaataaggaaggtgtgcagattaccgagagtggcaagtttcatgtggatgacgaaggcaccttgacgatatatgatgctgggttcccagaccaggggagatacgaatgtgtagctcggaatagctttgggctggcagtgacaaacatgtttttgacagttaccgccattcagggaagacaggctggggatgattttgtggagtcgagcatcctggacgccgtgcagcgggttgatagtgcaattaactcaactcgcagacatttgttctcgcagaaacctcacaccagctcagatctgctggctcaattccactaccctagagaccctctcatcgtagaaatggcccgtgcaggcgagatctttgaacacacattacaactgatcagggagcgcgttaaacagggactcacagttgatcttgaggggaaggaatttcggtacaacgacctggtgtctcccaggagtctgagtctgatcgcaaacctttccggctgtacagcacgacgccctctgcccaattgtagcaatcgatgcttccatgcaaaatatcgggcacacgatggaacatgtaacaacctgcagcagccgacttggggagcggcactgacagccttcgccaggcttctgcagcccgcataccgtgatggtatcagggctcccagggggctcggtctgcccgtgggttcccggcaacccttaccgcctcccaggttggtggccactgtatgggctagggctgcagccgtaacgcccgatcactcttacactaggatgttaatgcactgggggtggttcctagagcatgatctcgatcatacagtgcctgcattgtcaaccgccaggtttagcgatgggagaccttgtagcagtgtgtgtactaatgacccaccatgttttcctatgaacacaagacatgctgacccaagaggcacacatgctccttgtatgctgttcgcccgatcatcacctgcctgtgcaagtggaagacctagcgctaccgtggattcggtctacgctcgggagcaaattaatcagcagactgcatacatagacgggtccaatgtttacggaagcagcgaacgagagagccaggcactcagagaccccagcgtgcccagaggactgcttaagaccggattcccctggcccccatccggaaagccactgctcccttttagcaccggccctccgactgagtgtgcacgtcaggagcaggagtccccttgtttccttgccggagaccacagggccaatgagcacctagccctggccgctatgcacacgctgtggttccgagagcacaacagaatggctaccgaactgagcgccctgaaccctcactgggagggtaacacagtatatcaggaagcacgaaagatcgttggggcagaattgcagcacatcacctattcccactggctcccaaaagtcctcggagatccaggtactcgaatgctaagaggctaccgcggatataatccgaatgtgaatgcaggcattatcaactcttttgctaccgcggcattccgattcggacacaccctcattaaccctatcctatacaggttgaatgccacgttgggagagatcagcgagggtcatcttcccttccataaagccctgttttctccctcccggatcataaaggagggtggaattgatccagtgctacgtggactcttcggtgtggcagccaagtggagagctccctcatacctcctgagtcctgagctaacacaacgcttgtttagcgccgcttattctgccgctgttgatagcgctgcgaccataatacaacgtgggagggaccacggcatcccgccttacgtagactttcgggtcttctgtaacctcacctcggtgaagaactttgaagacctgcagaatgagatcaaggattccgagataaggcagaaacttaggaagttatacggctcaccaggagatatagacctttggccagcgctgatggtagaagacctgatccccggaacacgcgtcggtcctactttaatgtgcctgttcgtgacccaatttcagaggctacgcgacggagatcgcttctggtatgaaaatccaggggtgttcacaccagctcaactgacacagctgaaacaggctagcttgtctagggtgctttgcgataatggagattccattcagcaggtgcaggctgatgtctttgtcaaagctgagtacccccaggattatctgaattgcagcgagatccccaaggtagaccttcgagtgtggcaagactgctgcgccgacaagcaagcgggaggcactccagaagctggcagggtgtatcggtgctag

SEQ ID NO: 239362 - DNA, 4392 bp, Artificial Sequence
  derived and/or modified sequence
atggaacccagactgttttgttggaccaccctcttcctcctggccggatggtgtctccctgggctgccatgtccctcccggtgtctgtgctttaaaagcaccgtccgatgcatgcacctgatgctggaccatatacctcaggtcccccaacaaactacagtgctcgaccttcgattcaatagaatcagagaaatccctggctccgcctttaagaagttaaagaaccttaatacccttttgttaaacaacaatcatatccgcaaaatctctaggaacgcattcgaaggcctcgaaaatctcctgtatctatatctgtacaagaacgaaattcacgcccttgacaagcaaacctttaaaggcctaatcagtctggaacacctatacattcacttcaaccagctggaaatgctacagcccgagacctttggtgacctgctccgcctcgaacgtctcttcctccataataataagctctccaagattccagcaggctcattttctaatcttgactcactgaaacggctgcgccttgattctaatgctctggtctgtgactgcgatctgatgtggctgggagaattgctgcagggctttgcccagcacggacatactcaggccgcggctacctgtgagtatccacggcgcctgcatggacgtgcagtagcttccgtgacagtagaagagtttaactgtcaaagcccgaggattacctttgaaccacaggatgtcgaagtacccagtggaaacaccgtctacttcacctgccgggccgagggcaatcctaagcctgagatcatctggattcacaataatcattccctggatctcgaggacgacacaaggctgaacgtattcgatgatgggactttaatgatccgaaacacacgagagagtgatcagggtgtctatcaatgcatggctagaaattcagccggagaagcaaaaacccagtcagcaatgctccgctattcatcactgcccgccaaaccttcttttgttatccaaccccaggacacagaggttctgattgggacaagcactacactggaatgcatggcaactggacacccccacccattgatcacatggactagggataacggtctggagttagatgggagtcggcacgtggcaacgagttctggcctgtacctgcagaatattacacaaagggaccatggacggtttacgtgtcatgcaaacaatagtcatggcacagtacaagccgccgctaacataattgtgcaggcccccccccagtttacagtgactcccaaagaccaggtagtcctggaggagcatgcagtggagtggctgtgtgaggcagatggcaatccaccacctgtgatcgtgtggactaaaacggggggccagctgcctgttgagggacagcacaccgtgctctcctctggaaccctcaggattgatcgcgccgcacaacatgaccagggtcagtacgaatgtcaggccgtgtctagtctgggcgtgaaaaaagtgagcgtgcagctgactgtaaagccgaaggctcttgccgtctttacacaactaccgcaggacacctccgtggaggttggcaaaaacatcaacatctcatgccacgcccagggtgaaccccaaccaattatcacatggaacaaggaaggcgtgcaaattactgaatccgggaagttccatgtggatgatgaaggaactctgaccatctatgatgccgggtttccggatcaaggccgttacgagtgtgtcgcaagaaactctttcggtctcgctgtaaccaatatgtttctcactgtaactgccatccaagggcgacaggccggggacgattttgtggaaagttccatcttggacgctgtccagcgagtggactccgctatcaattcaactaggagacatctgttcagccagaaaccacatacttctagcgacctgctcgcccaatttcattacccccgagacccccttatcgtggagatggctcgggcaggcgagatcttcgaacatacgcttcagctgataagagagagggtaaagcagggcctgaccgtggacttagagggaaaggaattcaggtacaacgatctcgtctcacccagatctttatctctcatcgctaatctgtcaggttgtactgcaagacggcccctgccgaattgttctaatcggtgttttcacgccaagtaccgcgctcacgatggtacgtgtaataatttgcagcagccgacttggggcgcagccttaacagccttcgccagattactgcagccagcctaccgagacggaattagagccccccgggggcttggactccccgttggaagcagacagcctctcccgcccccccggctggtagccacagtctgggctagagcagcagcagttacccccgaccactcctacacacgaatgcttatgcactggggctggtttctggagcacgacctcgaccatacagtccccgcccttagcaccgcccgcttttcagatggaagaccgtgcagctctgtgtgtaccaatgatcccccatgcttcccaatgaatacgaggcacgccgacccccggggaacgcacgctccgtgcatgttattcgctaggtctagtcctgcctgtgcctctgggcggcccagcgcaaccgtcgactcggtctatgcaagagagcagataaaccagcaaaccgcttatattgacggctccaacgtttacggttcatccgagagggagtctcaggcactgcgagaccctagcgtccctaggggactgctgaagacaggattcccatggcctccatctggtaagcctctcttgccgttcagtacaggaccccctacagagtgcgcccgacaggaacaggagtcaccctgcttcttagccggtgaccatcgcgccaacgagcaccttgcgttggcagctatgcacacactgtggttcagagagcacaacaggatggccaccgaactatccgcccttaatccacactgggagggaaacacagtttaccaagaggcgaggaagattgtaggggccgagctgcagcacatcacatactcacactggctccccaaggtactaggcgatcccggtaccagaatgctccgggggtacagggggtataacccaaacgtgaatgctggaatcattaacagcttcgccaccgcagcctttaggtttggtcacaccctaatcaatcctatactctacaggctcaacgcaacattgggggaaatcagcgagggacaccttcctttccacaaggccttgttctccccatcgcggatcatcaaggagggcggcattgatcctgtccttaggggcctgttcggtgtggccgccaagtggcgtgctcccagctatctgctgagcccagagcttacccaaaggctattttctgccgcttactctgctgccgtcgacagcgcagcaaccataatccagaggggccgagaccacggaatccccccttatgttgacttccgcgtgttttgcaacctcacttccgtgaagaactttgaggacttacagaacgagattaaggactctgaaataagacagaaactgaggaaactatacggctctcctggagatatagatctatggcctgctttgatggtggaggacttaatccccggcactagagtaggcccaacgcttatgtgtctgtttgtcacgcagttccaaaggctcagagacggagaccggttctggtacgagaatccaggggtcttcactcccgcccaattgacgcaactcaaacaggcttcattgagtagggttttgtgtgataacggggacagtatccagcaagtccaggccgatgtgttcgtaaaggccgaatatccacaagattatttgaactgttccgagattcctaaagtggacttgcgtgtgtggcaggattgctgtgccgattgtcgcagcagggggcaattccgagctgtcacgcaagagagccaaaagaagcggagcgcccagtatagttatcccgtggacaaagatatggaattgagccacctgagatcccggcagcaggataagatttacgtgggagaagatgcaaggaacgtaaccgtgctagccaagacaaagtttagccaggacttttctacattcgcagccgaaattcaagaaacaatcaccgctctccgggaacagatcaataagttagaggctaggctacgacaagccgggtgcacagacgtccgaggagtcccccgcaaagccgaggaacgatggatgaaagaggactgtacacattgcatatgtgagtcgggccaagttacctgtgtggtcgaaatttgtccccctgcaccctgtccttctcctgaactcgtcaagggaacatgttgtcctgtttgtagagacaggggaatgccctcagactccccggagaagcgctag

SEQ ID NO: 239363 - DNA, 3951 bp, Artificial Sequence
  derived and/or modified sequence
atggaacctcgcctcttctgctggactaccctgttcttgctggccgggtggtgcctcccggggttgccatgtccatcccgctgcctgtgctttaagtcaactgtgaggtgcatgcacttgatgttggaccatataccgcaagtcccccagcagaccacagtgcttgacctgagatttaaccgcatccgcgagattccgggaagcgcattcaaaaaactcaagaacctgaatacattactgctaaacaataaccacatacggaaaatttccagaaacgcatttgaggggctcgagaatctgctgtacctgtatttgtacaagaacgagatccatgccctggacaagcagacatttaagggtctcattagtctggagcacctttacattcactttaatcaacttgaaatgctccagccagaaacgtttggagatctgctgcgactggagagactgttcctgcacaacaacaagctgagtaaaattcctgccggaagcttctcaaatttagactctcttaaacggctgcgactcgactcaaatgctctggtgtgtgattgcgatctgatgtggcttggagagctgttacagggatttgcacagcatggtcacacccaggccgcagctacttgcgagtatccacggcggctccacggcagagctgtagcttccgtgacagtcgaagagttcaattgtcagtcacctaggatcacgtttgaacctcaggatgtggaggttccatctggcaacactgtgtactttacgtgccgcgctgagggcaatcctaaaccggaaattatttggatccataacaaccatagtttagatttagaggacgatacacgactgaacgtgtttgacgatggaactctgatgatccgcaataccagggaaagcgatcagggagtttaccagtgcatggcccggaactcagccggtgaagcgaagacacaatcagcaatgttaaggtactcctcattgcctgccaaaccgtctttcgttatccaacctcaggacaccgaagtgctgataggcacaagtaccacactagaatgcatggcaacaggccacccgcatccattaatcacatggaccagagataacggcttggagctggatggatctcgccacgtcgcaacttcttcgggtctctatcttcagaacatcacacagcgagaccatggacgctttacttgccacgcaaacaactctcacggaacagttcaggctgcagcaaacatcattgtccaggcccccccgcaatttaccgttacccccaaggatcaagtcgtgctggaagaacatgctgtcgagtggctgtgcgaagcagacggaaaccctccccctgtgatagtctggaccaagacaggcggccaattaccagtggaggggcagcataccgtcctgagctccggcaccttacgcatcgatagagctgcccagcacgaccagggtcagtacgagtgccaagccgtgtcgtctctcggcgtgaaaaaagtaagtgtacagttgaccgtaaaacctaaggcactggcagttttcacccagctgccacaagatacatccgtagaagtgggaaaaaacatcaatatctcatgccatgctcaaggcgaaccacaaccaattatcacatggaacaaggaaggcgtacaaataacagagtccggcaagtttcatgtcgatgatgaaggtaccttaactatatatgatgcaggtttcccagatcagggaaggtatgagtgcgttgccagaaacagtttcggcctggcagtgacaaatatgtttttgacggtgaccgccatccagggcagacaagcaggagatgattttgtggaatcttcaatcctcgacgctgtacaacgcgttgacagcgctattaatagtaccaggcgccacctcttttcccagaagccacatacttccagcgacctgctagcccagttccattatcctcgcgaccccctgatcgtagagatggccagggccggggagatattcgaacatacgttgcaattaattagagaacgcgtgaagcaagggctgacagtggacctggagggaaaagaatttagatacaacgatctcgtctccccccgatccctatctctgattgccaacctctccggctgtacagcacggcgacctctgcctaattgctcaaatagatgcttccatgcaaagtatagagcacacgacggaacttgcaataacctgcagcagccaacctggggcgcagctctcacagcttttgcacgcctcctccagcctgcatacagggatggcatacgtgcaccccgcggactcggcttgcctgtcggctctcgacagccactccctccacccaggctggtagctacagtgtgggcccgcgcggccgctgtgacacccgaccattcgtatacgcgcatgttaatgcactggggttggtttctggagcacgatctggatcacaccgtccccgccctgtcaacggccaggttcagcgacgggcgtccatgctcttctgtgtgtacaaacgatcccccttgttttcctatgaatacacggcatgccgatccgcgtggcacacatgcaccttgtatgctgtttgcgcggagttcacctgcctgcgctagtggccgacctagcgctaccgtggattccgtctacgcacgggagcagatcaaccagcagacagcctacatcgacggctccaatgtatacgggagcagcgaaagggagtcccaagccctgcgcgacccgagtgttcctagagggttgctgaagacgggcttcccctggccaccttccggcaagccgcttctgcctttctcaaccggacccccgactgagtgtgctcgtcaggaacaagaaagcccgtgttttctcgccggggatcaccgtgccaatgaacacctcgcgctggctgccatgcacactctgtggtttcgggaacataataggatggcgacagagctctctgcattgaaccctcactgggaagggaacaccgtgtaccaggaagctaggaaaatcgttggtgcagagttgcaacacatcacatattctcattggctgcccaaagtcctgggggacccaggcacccgaatgctcagaggttaccgagggtataacccaaatgttaatgccggcataatcaactccttcgcaacagctgcattccgctttggtcatactctgattaaccccattctgtaccgtctcaacgcgaccttgggtgaaatctccgaaggccacctgcctttccataaagctttgttctcacccagtagaatcattaaagaaggagggatcgaccctgtcctgcgggggctctttggtgtggccgctaaatggagggctccttcttacttgctgtcccctgaactcacccagcggcttttttcagcagcctattctgccgcagtggactcagcggccaccataattcaacgcggcagggatcatggaattccaccctacgttgatttccgggtcttctgtaacttaaccagcgtaaaaaatttcgaggacctacagaatgaaataaaagattccgagatccgccagaaactacggaaactgtacggctccccgggcgatattgacctctggccagcgctgatggtggaagatctgatacccggtacccgcgtgggcccgacactgatgtgtttatttgtcacacagttccagaggcttcgggatggggacaggttctggtatgagaatcctggtgtttttacgccagctcagcttactcagctgaaacaagccagtttgtccagagtgctctgcgacaatggtgactcgattcagcaagtccaggcagacgtgtttgttaaagccgagtacccacaggattacctgaattgctccgagattccaaaagttgacttaagggtgtggcaagactgctgtgccgacaaacaggcagggggcacaccagaggccggccgggtctaccggtgctag

SEQ ID NO: 239364 - DNA, 4392 bp, Artificial Sequence
  derived and/or modified sequence
atggaacctagactcttctgttggaccacattatttctgcttgccggctggtgtctcccgggtctcccatgcccttcccgctgtctgtgcttcaagtcaaccgtcaggtgtatgcatctgatgttagaccacattcctcaagtgcctcagcaaaccacagtccttgaccttcgttttaatcgcattcgggaaatccctggttcagcttttaaaaagctcaaaaatttgaacaccctgttactgaataataatcatattagaaagattagtcgcaacgccttcgaaggcttagaaaatcttctgtatctgtatctatataagaacgaaatccacgctctcgacaaacagactttcaagggactgataagtctcgagcatttatacatccacttcaaccaactggagatgttgcagcccgaaactttcggagacctcctgagactcgaacgcctctttctgcacaacaataaactttccaaaatcccagcaggcagcttctccaatcttgacagcctgaagagactgcgccttgatagtaacgctctcgtttgcgactgtgatctgatgtggctgggtgagttactccaggggtttgcacaacacggccatacacaagccgccgctacttgcgagtacccacggagattgcatggcagagctgttgccagcgtgactgtcgaggagttcaattgtcaatccccgcgtatcacctttgagccacaggacgttgaggtccccagcggcaacactgtgtacttcacttgcagggcagaaggtaaccctaagccagaaataatatggatacataacaaccattccctggatctggaagatgataccagacttaacgtattcgatgatgggactctcatgattagaaatacacgcgaatccgaccagggtgtctatcaatgcatggctagaaattcagccggagaagcaaaaacccagtcagcaatgctccgctattcatcactgcccgccaaaccttcttttgttatccaaccccaggacacagaggttctgattgggacaagcactacactggaatgcatggcaactggacacccccacccattgatcacatggactagggataacggtctggagttagatgggagtcggcacgtggcaacgagttctggcctgtacctgcagaatattacacaaagggaccatggacggtttacgtgtcatgcaaacaattcgcacggaaccgtacaagcagcagcgaatattatagttcaagcacccccccagtttacagtaaccccaaaggatcaggttgtcttggaggagcatgcagtggagtggctgtgtgaggctgatggaaaccctcctcccgtcattgtctggacgaaaacaggcggtcagctccccgtcgaaggtcaacataccgttctctcgtctggcactctgcgcattgatcgagctgctcagcatgatcaggggcaatacgagtgccaagcagtgagttctctcggtgtaaaaaaagtgtctgtgcagttaacagtaaagcctaaggcactcgccgtgtttacacagctaccacaggatacctccgtagaagtcggaaagaacattaacatttcatgccatgcgcagggggagccacagccaattatcacctggaacaaggaaggcgtgcagataactgaatctggaaaattccacgtggacgacgaagggacactcacaatttacgacgccggttttccagatcagggacggtatgagtgcgtcgcacgtaatagctttggacttgctgttaccaatatgttcctcacagttaccgccattcagggtaggcaagctggggatgacttcgttgaatcctcaattctcgatgcagtccaacgagttgacagcgccattaactccacccggaggcacctcttttctcagaaaccacatacatctagtgatctgcttgcacaattccattacccccgggacccactgattgttgagatggctagagccggcgagatctttgagcacaccttacagctgattcgtgagagagtgaagcagggcctcaccgtcgacctggaaggaaaagaattcagatacaatgacctagtgtcaccgcgatcattaagtctgattgctaacctctcaggatgtacagcacggcgtccgctcccaaactgctcaaaccgctgtttccatgcaaaatacagagcacacgatggcacttgtaacaatctacaacagccaacttggggcgctgcgctcactgccttcgcacggttacttcagcctgcttaccgcgacggaattcgggctccacggggtctaggcttaccagtgggatcccgacagcctctccctcccccccgtctggtcgccaccgtatgggctagagccgcagcagtcacgcccgaccattcatataccagaatgctaatgcactggggatggtttctcgagcatgacttagaccataccgtgcctgcactctctacagcgagattttccgatggccgaccttgttccagcgtttgcacaaatgacccaccctgctttcccatgaacactcgccacgccgaccccagaggtacccacgcaccgtgcatgctgttcgccaggtcttccccggcatgcgcaagcggcaggccttcagctacagtagacagcgtctacgccagggagcaaattaaccagcagacagcatacatcgacggaagcaatgtttatgggagctcagaacgggaaagccaggctctacgtgatcctagcgtcccacgaggcctgttgaaaaccggatttccatggccgcccagcggtaaaccacttttgcctttctcaactggacccccaaccgagtgtgcccgccaggaacaggaaagcccatgctttctagcaggagatcacagagccaacgagcatctcgcactggccgctatgcacaccttatggtttagagaacataaccgtatggctacagagctcagcgccctcaaccctcactgggagggaaacactgtttatcaagaagctcggaagattgtcggcgctgaactgcagcacattacctacagtcattggctgccaaaagtactgggggacccaggtaccagaatgctccggggctaccgcggttataaccccaatgtgaacgcaggtatcataaacagtttcgcaacggctgctttcaggttcggccacacactaatcaatcccatactttatcgactaaatgcgaccctgggcgaaatctctgaaggacacctgccatttcataaagcactgttctctcccagccggattattaaggagggtggtattgaccctgtgttaagaggactgttcggcgtcgcagccaagtggagagcaccgtcctacttactatctcctgagctgacacaacggctgttctcagccgcgtatagtgctgccgtggactctgccgctaccatcattcaacgaggaagagaccacgggatcccaccctatgtggatttccgagtattttgtaacctgacctccgttaagaactttgaagacctgcagaatgaaatcaaggacagcgagataagacagaaattacggaaactgtacggtagccccggtgacattgacctctggccagcccttatggttgaagatctgattccagggacgcgggtgggccccacgctgatgtgcctctttgttacacagtttcagcggttacgcgacggcgaccgattttggtacgagaaccctggagtgtttaccccagcccaactcacccagttaaagcaagccagcctcagccgggtactatgtgacaacggagattcaattcaacaggtgcaggccgatgtctttgtcaaggctgagtacccacaggactatctcaactgtagcgaaatccccaaagttgacttacgagtttggcaagattgttgcgccgactgcagatcgcgcggccaatttagggccgtaactcaagaaagccagaagaaacggtccgcccagtacagttatcccgtcgacaaagacatggaattgagtcacttaagaagccgccagcaggacaaaatttacgtgggagaagatgctagaaatgtgaccgtgcttgccaagactaaatttagccaggacttctcaacattcgccgccgagatccaggagacaataaccgcactccgagagcagatcaacaaacttgaggccagactccgccaggcaggctgtacagacgttagaggagtgccccggaaagctgaggaacgctggatgaaggaagattgtactcactgtatctgcgagtcaggccaggtcacttgtgtcgttgaaatctgtccacctgctccctgtcccagccctgaactggtgaaaggaacatgttgccctgtttgtcgtgatcggggaatgccaagcgatagtccagaaaagcgctag

SEQ ID NO: 239365 - DNA, 3951 bp, Artificial Sequence
  derived and/or modified sequence
atggagcctcgccttttctgttggactacccttttcctcctagcaggatggtgccttcctggccttccttgcccttctcggtgtctgtgtttcaaaagtactgtccgctgtatgcatctcatgctggatcacatcccccaagtgccccagcaaactaccgtgttggatcttcgcttcaatcgcataagagaaattcccgggtctgccttcaaaaagcttaaaaaccttaataccctactccttaacaataatcacatcaggaaaattagccgtaatgcatttgaaggtttagaaaaccttttgtatttatacctttataaaaacgagatacatgctctggacaaacagactttcaagggattaatctccctcgagcatctatatatccactttaatcagctggaaatgctgcaacccgagacttttggtgacctgttgagactagaaaggctgttcttgcacaataacaagctttccaagataccagctggcagtttctcaaatcttgatagcctgaagagactgagacttgattcgaatgctttagtgtgcgattgtgatcttatgtggttgggggagcttctgcaagggttcgcgcagcacggacatactcaggcggctgcaacttgtgagtacccaagacgtctgcacggtagagccgtggcgtctgtaactgtcgaggaatttaattgccagagcccacgcataactttcgaaccgcaggatgttgaagtcccatccggaaacaccgtctactttacatgccgcgccgagggcaatcctaagcctgaaatcatttggattcataataaccactcccttgacttggaagacgataccaggctgaacgtgtttgacgatggtaccttaatgattagaaatacgagagaaagtgatcaaggcgtttaccagtgtatggcaagaaactccgcaggggaagcaaaaacccaatcagccatgctgcgttattcttctttaccggctaagccctccttcgtgatccagccccaggataccgaggtactgataggtacaagtaccacacttgaatgcatggctactggacacccgcaccctctaattacctggacaagagacaacggcctcgagttggatgggtcaagacatgtggcaacatcatccggactgtacttacagaacatcacacagcgagatcatgggcgtttcacatgtcatgccaataattcccacgggactgtccaggctgccgcaaatatcatcgtgcaggctcctccccaatttaccgtcactccgaaggatcaagtcgtgcttgaggagcacgcggttgaatggctttgtgaggccgatggaaatcccccaccagtcatcgtttggaccaaaactggaggtcagttgcctgttgaaggacagcacacggtcctgtctagtggaacgttgagaatcgacagagccgcccagcacgaccaggggcaatatgaatgccaagccgtttcttctttaggagtcaaaaaggtttccgtccagttgaccgtgaaacccaaagctctagccgtgtttacccagctcccccaagacacttcagtggaggtcggaaaaaacataaatatttcctgtcatgcacagggagaaccccaacctataataacgtggaataaggagggtgtacaaataaccgagtcaggaaagttccacgtggacgacgaaggcactctgacaatatatgacgccggttttcccgaccaaggacggtacgaatgtgttgcacgcaactcattcggactggcagttacaaacatgtttctcaccgtaacggccattcaaggccggcaagctggggacgattttgtcgagtcatccatcctcgatgccgtccaacgggtcgactccgccatcaattcaacccgccggcacttatttagtcagaaaccacatacatcttcagatctcttagcccagtttcactacccaagggatccgcttattgttgagatggcgcgagcgggtgaaatcttcgaacacacactgcagctgatacgcgagcgagtcaagcaggggctgaccgtagacttggaaggcaaagagttccgttacaatgacctggtgagcccacgctctctgtctctgattgcaaatctctctggatgcaccgcacgccgaccgctgcccaactgctcaaatagatgttttcatgccaaatatagggcccacgatggaacgtgcaacaacctgcaacagccgacatggggtgctgccctgacagccttcgctcgcctcctccagccggcataccgcgacggcattcgtgctccacgcgggctaggattacctgtggggtcccgacagccattacccccccctcgactggttgctactgtgtgggcccgtgccgccgctgtgacccctgaccacagctatactagaatgcttatgcactggggatggtttctcgagcatgacctagatcatacagtgcctgctctgtctaccgcaagattctcagacggtcgcccctgctccagtgtctgcaccaacgaccctccatgcttccccatgaacacacgccatgccgaccctaggggcacccatgccccctgtatgttgttcgcacgaagttcccctgcttgtgcatccggaagaccaagcgccaccgtcgactccgtctatgccagggaacagattaaccagcagacagcctatatcgatggctctaacgtttacgggtcgtctgagagagaaagtcaagccctccgcgaccccagtgtgccccgaggattgctcaaaactggattcccctggcccccatcaggaaaaccactgttgccatttagtacgggcccacctacagagtgtgcccgccaagaacaggagtcaccgtgcttcctggccggagatcaccgggcaaacgaacatctggccctggccgctatgcacacattgtggtttcgagaacataacaggatggccaccgaattgtctgcgctaaacccccattgggaaggaaacactgtctaccaggaggccagaaaaatcgttggagcggaactccaacacattacctatagccactggttgccgaaggtgcttggcgatcccggaacccgtatgctgcgaggctatagaggatataacccaaacgtcaacgccggtatcataaactcattcgctactgctgcattccgcttcggtcatacactcattaatcccattctgtacaggctgaacgccacacttggtgaaatcagcgaaggacacttaccatttcataaggcattattctctcccagtcgaattatcaaagaaggcggtatcgaccctgtgcttcgcggactgttcggcgtggctgccaagtggcgcgcccctagttacctgctcagccccgagctgactcaaagactctttagtgccgcctacagcgctgctgtggacagtgcagcaaccatcatccagagaggcagggatcatggtatcccaccttacgtggacttccgagtcttctgtaatctcacgtcagtaaaaaatttcgaggacttacaaaatgaaatcaaagactctgaaatcaggcagaaactgcggaaactttatggatctccaggagacatcgacttatggcctgccttgatggtggaagatttgattccaggaacaagagtcggccctaccctgatgtgtttgttcgtgacccagttccagcgtttaagagatggcgatcgcttttggtacgagaaccccggagtatttactcctgctcagttaacacagttaaagcaggccagcctgtcgagagtattgtgcgacaacggcgattcaatccaacaggtccaagcggacgtctttgtaaaggctgaatacccccaggattaccttaattgtagtgaaatcccaaaagtggatctaagagtgtggcaggattgctgcgcagacaaacaggccgggggcacaccagaagcaggcagagtttatagatgctag

SEQ ID NO: 239366 - DNA, 4554 bp, Artificial Sequence
  derived and/or modified sequence
agtccagcagccaccatcaccaccactgcggttgctgctgcagctgcagctgctgctctccctccggctgcttcttcgcgtggccagcagcgaatggagcgatggagcccagactgttctgctggaccactctctttctcctggccgggtggtgcctgccagggttgccctgccccagccggtgcctttgctttaagagcaccgtccgctgcatgcacttgatgctggaccacattcctcaggtaccacagcagaccacagttctagacttgaggtttaacagaataagagaaattccagggagcgccttcaagaaactcaagaatttgaacacacttctgctgaacaacaaccacatcagaaagatttccagaaatgcttttgaaggacttgaaaatttgctatatctgtacctgtataagaatgaaatccatgcactagataagcaaacatttaaaggactcatatctttggaacatctgtatattcatttcaaccaactagaaatgctacagccagagacctttggagaccttctgagattagagcgactatttttgcataacaacaaattatctaaaattccagctgggagcttttctaatctggattcattaaaaagattgcgtctggattccaacgccctggtttgtgactgtgatctgatgtggctgggggagcttttacaaggctttgcccaacacggccacacccaggctgcggctacctgcgaatatcccaggagactccatgggcgtgcagttgcttcagtaacagtagaggaattcaattgccagagcccccgaattacttttgagccgcaggatgtggaggtaccatcaggaaataccgtctacttcacctgccgggcggaaggaaaccccaaacctgagattatttggatacacaacaaccactcattggatttggaagatgatactcgacttaatgtgtttgatgatggcacactcatgatccgaaacaccagagagtcagaccaaggtgtctatcagtgcatggccagaaattccgctggggaagccaagacacagagtgccatgctcagatactccagtcttccagccaaaccaagctttgtaatccagcctcaggacacagaggttttaattggcaccagcacaactttggaatgtatggccacaggccacccacaccctcttatcacttggaccagggacaatggattggagctggatggatccaggcacgtggcaacgtccagtggactttacttacagaacatcacacaacgggatcatggtcgatttacctgtcatgccaacaatagccacggcactgttcaagctgcagcaaacataattgtacaagctcctccacaatttacagtaacccccaaggatcaagtggtgctggaagaacatgctgtagagtggctctgtgaagctgacggcaacccacctcctgttattgtctggacaaaaacaggagggcagctccctgtggaaggccagcatacagttctctcctctggcactttgagaattgaccgtgcagcacagcacgatcaaggccaatatgaatgtcaagcagtcagttcgttgggggtgaaaaaggtgtctgtgcagctgactgtaaaacccaaagctcttgcagtgtttactcaacttcctcaggatacaagtgtcgaggttggaaagaatataaacatttcatgtcatgctcaaggagaaccacagcccataattacttggaataaggaaggtgtgcagattactgagagtggtaaattccatgtggatgatgaaggcacgctgactatctacgacgcagggttccctgaccagggaagatatgaatgtgtggctcggaattcttttggccttgctgtgaccaacatgtttcttacagtcacggctatacagggtagacaagctggcgatgactttgttgaatcttccattcttgatgctgtacagagagttgacagtgcaattaactccacacgaagacatttgttttcacaaaaacctcacacctccagtgacctgctggctcaatttcattacccgcgtgacccactgattgtggaaatggcaagagcaggggagatttttgagcacacgctgcagctgatacgggaacgtgtgaagcaggggctcactgtggacttggaaggcaaagaattccggtacaatgacttggtgtccccgcgctccctcagcctcatcgccaatttatctggatgcacagctcgcaggcctctgccaaactgctccaaccggtgtttccatgcgaagtaccgcgcccacgacggcacgtgcaacaacctgcagcagcccacgtggggcgcggcgctgaccgccttcgcgcgcctgctgcagccagcctaccgggacggcatccgcgcgccccgcgggctcggccttcctgtgggctcccgccagcccctcccgccgccccggctggtcgccacagtgtgggcgcgcgcggcggccgtcacccccgaccacagctacacgcgcatgctcatgcactggggctggtttctagagcacgacttggaccacacagtgcctgcgctgagcacagcccgcttctcggatgggcggccgtgcagctccgtctgcaccaacgaccctccttgtttccccatgaacacccggcacgccgacccccggggcacccacgcgccctgcatgctcttcgcgcgctccagccccgcgtgtgccagcggccgtccctctgcgacggtggattcagtctatgcacgagagcagatcaaccagcaaacagcctacatcgatggctccaacgtttacgggagctcggagcgggaatcccaggctctcagagacccttcggtgcctcggggtctcctgaagacaggctttccttggcctccctccggaaagcccttattgcccttttctacaggcccacccaccgagtgcgcgcgacaggagcaggagagcccctgtttcctggccggggaccaccgggccaacgagcatctggctctggccgccatgcacaccctgtggttccgggaacacaacaggatggccacggagctgtccgccctgaacccccactgggagggaaacacggtttaccaggaagccaggaagatcgtgggcgcggagctgcagcacatcacctacagccactggctgcctaaggtcctgggggaccctggcactaggatgctgaggggttaccgaggctacaaccccaacgtgaatgcaggcatcattaactcttttgctactgcagcctttagatttggccacacattaatcaatcctattctttaccgactgaatgccaccttaggtgaaatttccgaaggccaccttccgttccataaagcgctcttttcaccgtccagaataatcaaggaaggtgggatagacccggttctccgggggctgtttggcgtggctgctaaatggcgggcaccctcctaccttctcagtcctgagctgacccagaggctcttctccgcggcttattctgcggccgtggattcggctgccaccatcattcaaaggggtagagaccacgggatcccaccatatgttgacttcagagttttctgtaatttgacttcagttaagaactttgaggatcttcaaaatgaaattaaagattcagagattagacaaaaactgagaaagttgtacggctctccaggtgacattgacctctggcccgcccttatggttgaagacctgattcctggtacaagagtgggaccaacacttatgtgcctgtttgttacccagtttcagcggctaagagatggagataggttctggtatgaaaaccctggagtatttaccccggcacaactcactcagctgaagcaggcgtccctgagccgggtgctttgtgacaatggtgacagcattcagcaagtgcaggctgatgtctttgtaaaggcagaatacccacaggattacctgaactgcagcgagatcccgaaggtggacctgcgagtgtggcaagactgctgtgcagataaacaagctggaggcacgcctgaggcaggcagggtgtacagatgttagaggggttccaaggaaggccgaggagcgctggatgaaagaagactgcactcactgcatttgtgagagtggccaggtcacctgtgtggtggagatttgtcccccggctccctgtcccagtcctgaattggtgaaaggaacctgctgtccagtttgcagagaccgaggaatgccaagtgattccccagagaagcgctaataaaagttttgtgctgttgagccccaaatgggaaatttctcaggaagagacatttaggacttcagaacttttaacttgtagtcacattgttgatatggaaaccactgacttaagcaacttagttcatctaatcttacatatacttacgatcttttattttttcattttctaacataccttgaaataattcaaaactaaaagcaataaagtgcatatgaagtgtttgatcataagaaatatttcttactgtaagctgtcagttttatatgccacacctggaaataaaaagaatatcatggaatattt

SEQ ID NO: 239367 - DNA, 4392 bp, Artificial Sequence
  derived and/or modified sequence
atggagcccagactgttctgctggaccaccctgttcctgctggccggctggtgcctgcccggcctgccctgccccagcagatgcctgtgcttcaagagcaccgtgagatgcatgcacctgatgctggaccacatcccccaggtgccccagcagaccaccgtgctggacctgagattcaacagaatcagagagatccccggcagcgccttcaagaagctgaagaacctgaacaccctgctgctgaacaacaaccacatcagaaagatcagcagaaacgccttcgagggcctggagaacctgctgtacctgtacctgtacaagaacgagatccacgccctggacaagcagaccttcaagggcctgatcagcctggagcacctgtacatccacttcaaccagctggagatgctgcagcccgagaccttcggcgacctgctgagactggagagactgttcctgcacaacaacaagctgagcaagatccccgccggcagcttcagcaacctggacagcctgaagagactgagactggacagcaacgccctggtgtgcgactgcgacctgatgtggctgggcgagctgctgcagggcttcgcccagcacggccacacccaggccgccgccacctgcgagtaccccagaagactgcacggcagagccgtggccagcgtgaccgtggaggagttcaactgccagagccccagaatcaccttcgagccccaggacgtggaggtgcccagcggcaacaccgtgtacttcacctgcagagccgagggcaaccccaagcccgagatcatctggatccacaacaaccacagcctggacctggaggacgacaccagactgaacgtgttcgacgacggcaccctgatgatcagaaacaccagagagagcgaccagggcgtgtaccagtgcatggccagaaacagcgccggcgaggccaagacccagagcgccatgctgagatacagcagcctgcccgccaagcccagcttcgtgatccagccccaggacaccgaggtgctgatcggcaccagcaccaccctggagtgcatggccaccggccacccccaccccctgatcacctggaccagagacaacggcctggagctggacggcagcagacacgtggccaccagcagcggcctgtacctgcagaacatcacccagagagaccacggcagattcacctgccacgccaacaacagccacggcaccgtgcaggccgccgccaacatcatcgtgcaggcccccccccagttcaccgtgacccccaaggaccaggtggtgctggaggagcacgccgtggagtggctgtgcgaggccgacggcaaccccccccccgtgatcgtgtggaccaagaccggcggccagctgcccgtggagggccagcacaccgtgctgagcagcggcaccctgagaatcgacagagccgcccagcacgaccagggccagtacgagtgccaggccgtgagcagcctgggcgtgaagaaggtgagcgtgcagctgaccgtgaagcccaaggccctggccgtgttcacccagctgccccaggacaccagcgtggaggtgggcaagaacatcaacatcagctgccacgcccagggcgagccccagcccatcatcacctggaacaaggagggcgtgcagatcaccgagagcggcaagttccacgtggacgacgagggcaccctgaccatctacgacgccggcttccccgaccagggcagatacgagtgcgtggccagaaacagcttcggcctggccgtgaccaacatgttcctgaccgtgaccgccatccagggcagacaggccggcgacgacttcgtggagagcagcatcctggacgccgtgcagagagtggacagcgccatcaacagcaccagaagacacctgttcagccagaagccccacaccagcagcgacctgctggcccagttccactaccccagagaccccctgatcgtggagatggccagagccggcgagatcttcgagcacaccctgcagctgatcagagagagagtgaagcagggcctgaccgtggacctggagggcaaggagttcagatacaacgacctggtgagccccagaagcctgagcctgatcgccaacctgagcggctgcaccgccagaagacccctgcccaactgcagcaacagatgcttccacgccaagtacagagcccacgacggcacctgcaacaacctgcagcagcccacctggggcgccgccctgaccgccttcgccagactgctgcagcccgcctacagagacggcatcagagcccccagaggcctgggcctgcccgtgggcagcagacagcccctgcccccccccagactggtggccaccgtgtgggccagagccgccgccgtgacccccgaccacagctacaccagaatgctgatgcactggggctggttcctggagcacgacctggaccacaccgtgcccgccctgagcaccgccagattcagcgacggcagaccctgcagcagcgtgtgcaccaacgaccccccctgcttccccatgaacaccagacacgccgaccccagaggcacccacgccccctgcatgctgttcgccagaagcagccccgcctgcgccagcggcagacccagcgccaccgtggacagcgtgtacgccagagagcagatcaaccagcagaccgcctacatcgacggcagcaacgtgtacggcagcagcgagagagagagccaggccctgagagaccccagcgtgcccagaggcctgctgaagaccggcttcccctggccccccagcggcaagcccctgctgcccttcagcaccggcccccccaccgagtgcgccagacaggagcaggagagcccctgcttcctggccggcgaccacagagccaacgagcacctggccctggccgccatgcacaccctgtggttcagagagcacaacagaatggccaccgagctgagcgccctgaacccccactgggagggcaacaccgtgtaccaggaggccagaaagatcgtgggcgccgagctgcagcacatcacctacagccactggctgcccaaggtgctgggcgaccccggcaccagaatgctgagaggctacagaggctacaaccccaacgtgaacgccggcatcatcaacagcttcgccaccgccgccttcagattcggccacaccctgatcaaccccatcctgtacagactgaacgccaccctgggcgagatcagcgagggccacctgcccttccacaaggccctgttcagccccagcagaatcatcaaggagggcggcatcgaccccgtgctgagaggcctgttcggcgtggccgccaagtggagagcccccagctacctgctgagccccgagctgacccagagactgttcagcgccgcctacagcgccgccgtggacagcgccgccaccatcatccagagaggcagagaccacggcatccccccctacgtggacttcagagtgttctgcaacctgaccagcgtgaagaacttcgaggacctgcagaacgagatcaaggacagcgagatcagacagaagctgagaaagctgtacggcagccccggcgacatcgacctgtggcccgccctgatggtggaggacctgatccccggcaccagagtgggccccaccctgatgtgcctgttcgtgacccagttccagagactgagagacggcgacagattctggtacgagaaccccggcgtgttcacccccgcccagctgacccagctgaagcaggccagcctgagcagagtgctgtgcgacaacggcgacagcatccagcaggtgcaggccgacgtgttcgtgaaggccgagtacccccaggactacctgaactgcagcgagatccccaaggtggacctgagagtgtggcaggactgctgcgccgactgcagaagcagaggccagttcagagccgtgacccaggagagccagaagaagagaagcgcccagtacagctaccccgtggacaaggacatggagctgagccacctgagaagcagacagcaggacaagatctacgtgggcgaggacgccagaaacgtgaccgtgctggccaagaccaagttcagccaggacttcagcaccttcgccgccgagatccaggagaccatcaccgccctgagagagcagatcaacaagctggaggccagactgagacaggccggctgcaccgacgtgagaggcgtgcccagaaaggccgaggagagatggatgaaggaggactgcacccactgcatctgcgagagcggccaggtgacctgcgtggtggagatctgcccccccgccccctgccccagccccgagctggtgaagggcacctgctgccccgtgtgcagagacagaggcatgcccagcgacagccccgagaagagatag

SEQ ID NO: 239368 - DNA, 3951 bp, Artificial Sequence
  derived and/or modified sequence
atggagcccagactgttctgctggaccaccctgttcctgctggccggctggtgcctgcccggcctgccctgccccagcagatgcctgtgcttcaagagcaccgtgagatgcatgcacctgatgctggaccacatcccccaggtgccccagcagaccaccgtgctggacctgagattcaacagaatcagagagatccccggcagcgccttcaagaagctgaagaacctgaacaccctgctgctgaacaacaaccacatcagaaagatcagcagaaacgccttcgagggcctggagaacctgctgtacctgtacctgtacaagaacgagatccacgccctggacaagcagaccttcaagggcctgatcagcctggagcacctgtacatccacttcaaccagctggagatgctgcagcccgagaccttcggcgacctgctgagactggagagactgttcctgcacaacaacaagctgagcaagatccccgccggcagcttcagcaacctggacagcctgaagagactgagactggacagcaacgccctggtgtgcgactgcgacctgatgtggctgggcgagctgctgcagggcttcgcccagcacggccacacccaggccgccgccacctgcgagtaccccagaagactgcacggcagagccgtggccagcgtgaccgtggaggagttcaactgccagagccccagaatcaccttcgagccccaggacgtggaggtgcccagcggcaacaccgtgtacttcacctgcagagccgagggcaaccccaagcccgagatcatctggatccacaacaaccacagcctggacctggaggacgacaccagactgaacgtgttcgacgacggcaccctgatgatcagaaacaccagagagagcgaccagggcgtgtaccagtgcatggccagaaacagcgccggcgaggccaagacccagagcgccatgctgagatacagcagcctgcccgccaagcccagcttcgtgatccagccccaggacaccgaggtgctgatcggcaccagcaccaccctggagtgcatggccaccggccacccccaccccctgatcacctggaccagagacaacggcctggagctggacggcagcagacacgtggccaccagcagcggcctgtacctgcagaacatcacccagagagaccacggcagattcacctgccacgccaacaacagccacggcaccgtgcaggccgccgccaacatcatcgtgcaggcccccccccagttcaccgtgacccccaaggaccaggtggtgctggaggagcacgccgtggagtggctgtgcgaggccgacggcaaccccccccccgtgatcgtgtggaccaagaccggcggccagctgcccgtggagggccagcacaccgtgctgagcagcggcaccctgagaatcgacagagccgcccagcacgaccagggccagtacgagtgccaggccgtgagcagcctgggcgtgaagaaggtgagcgtgcagctgaccgtgaagcccaaggccctggccgtgttcacccagctgccccaggacaccagcgtggaggtgggcaagaacatcaacatcagctgccacgcccagggcgagccccagcccatcatcacctggaacaaggagggcgtgcagatcaccgagagcggcaagttccacgtggacgacgagggcaccctgaccatctacgacgccggcttccccgaccagggcagatacgagtgcgtggccagaaacagcttcggcctggccgtgaccaacatgttcctgaccgtgaccgccatccagggcagacaggccggcgacgacttcgtggagagcagcatcctggacgccgtgcagagagtggacagcgccatcaacagcaccagaagacacctgttcagccagaagccccacaccagcagcgacctgctggcccagttccactaccccagagaccccctgatcgtggagatggccagagccggcgagatcttcgagcacaccctgcagctgatcagagagagagtgaagcagggcctgaccgtggacctggagggcaaggagttcagatacaacgacctggtgagccccagaagcctgagcctgatcgccaacctgagcggctgcaccgccagaagacccctgcccaactgcagcaacagatgcttccacgccaagtacagagcccacgacggcacctgcaacaacctgcagcagcccacctggggcgccgccctgaccgccttcgccagactgctgcagcccgcctacagagacggcatcagagcccccagaggcctgggcctgcccgtgggcagcagacagcccctgcccccccccagactggtggccaccgtgtgggccagagccgccgccgtgacccccgaccacagctacaccagaatgctgatgcactggggctggttcctggagcacgacctggaccacaccgtgcccgccctgagcaccgccagattcagcgacggcagaccctgcagcagcgtgtgcaccaacgaccccccctgcttccccatgaacaccagacacgccgaccccagaggcacccacgccccctgcatgctgttcgccagaagcagccccgcctgcgccagcggcagacccagcgccaccgtggacagcgtgtacgccagagagcagatcaaccagcagaccgcctacatcgacggcagcaacgtgtacggcagcagcgagagagagagccaggccctgagagaccccagcgtgcccagaggcctgctgaagaccggcttcccctggccccccagcggcaagcccctgctgcccttcagcaccggcccccccaccgagtgcgccagacaggagcaggagagcccctgcttcctggccggcgaccacagagccaacgagcacctggccctggccgccatgcacaccctgtggttcagagagcacaacagaatggccaccgagctgagcgccctgaacccccactgggagggcaacaccgtgtaccaggaggccagaaagatcgtgggcgccgagctgcagcacatcacctacagccactggctgcccaaggtgctgggcgaccccggcaccagaatgctgagaggctacagaggctacaaccccaacgtgaacgccggcatcatcaacagcttcgccaccgccgccttcagattcggccacaccctgatcaaccccatcctgtacagactgaacgccaccctgggcgagatcagcgagggccacctgcccttccacaaggccctgttcagccccagcagaatcatcaaggagggcggcatcgaccccgtgctgagaggcctgttcggcgtggccgccaagtggagagcccccagctacctgctgagccccgagctgacccagagactgttcagcgccgcctacagcgccgccgtggacagcgccgccaccatcatccagagaggcagagaccacggcatccccccctacgtggacttcagagtgttctgcaacctgaccagcgtgaagaacttcgaggacctgcagaacgagatcaaggacagcgagatcagacagaagctgagaaagctgtacggcagccccggcgacatcgacctgtggcccgccctgatggtggaggacctgatccccggcaccagagtgggccccaccctgatgtgcctgttcgtgacccagttccagagactgagagacggcgacagattctggtacgagaaccccggcgtgttcacccccgcccagctgacccagctgaagcaggccagcctgagcagagtgctgtgcgacaacggcgacagcatccagcaggtgcaggccgacgtgttcgtgaaggccgagtacccccaggactacctgaactgcagcgagatccccaaggtggacctgagagtgtggcaggactgctgcgccgacaagcaggccggcggcacccccgaggccggcagagtgtacagatgctag

SEQ ID NO: 239369 - DNA, 4392 bp, Artificial Sequence
  derived and/or modified sequence
atggaaccccgcctgttctgttggactacgctatttctgctcgcaggttggtgtctccctgggctcccttgcccatccaggtgtctgtgttttaaatcgacggtgcgatgtatgcatcttatgctggatcatattccacaggttccacagcagacaacggttctggatttgcggttcaaccgcatacgggaaatccccgggagcgccttcaagaagcttaagaacttgaatacattgttgcttaataataaccacatccggaagatctcacgaaacgcctttgaaggcctggaaaatttgctttacctgtacctgtataagaacgaaattcatgctttagacaaacagacgttcaaggggctaatatcattagagcacttgtatatacactttaaccagctcgaaatgctccagccggagacattcggtgatctgctcagactcgagagactgttcctgcacaataacaagctgagcaaaatccctgctggttctttcagcaacttggactccctgaaacgactgcgactcgattcaaacgccctcgtctgcgattgcgacttaatgtggttaggagagttactccagggtttcgcccagcacggacatacgcaagctgccgccacctgcgagtacccgcgccggctgcatggacgcgctgtggcatctgtaactgtcgaagagtttaattgccagtctcctagaatcacgtttgagcctcaggacgtggaagtgccatcgggcaatacagtgtacttcacatgtagggcggaagggaacccgaagccagagatcatatggatccataacaaccactccctcgatctagaggacgatactagattgaacgtctttgatgacggaacccttatgatccggaatacgagggaatcagatcaaggggtgtaccagtgcatggctagaaattctgctggcgaggctaagactcaaagtgcgatgctgaggtattcatcactgcccgctaaaccatcctttgtcattcaaccccaggacacagaagtgttaattgggacaagcactaccttagagtgtatggctacaggccaccctcacccgttaattacctggacccgggacaatggcttagaactcgacggatcccgccacgttgccactagcagcggcttgtatctccaaaatattactcagagggaccatgggagattcacgtgccacgccaataactcgcacggcacagttcaggctgcggcaaacattattgttcaggctcctccacagttcaccgtgacccctaaagaccaggttgtgctggaagaacacgcagtggaatggctatgtgaggctgacggcaacccaccccctgtaatagtgtggaccaagacaggaggccagctaccagtggagggccagcacacagtcctgagtagtgggacactccggatagaccgggcggctcagcatgatcaggggcagtatgagtgccaagccgtgagcagcctgggcgtcaaaaaggtgagcgttcagctgaccgtgaaacccaaagctctggcggtctttacgcagttgccgcaggacacaagcgtcgaggtaggaaagaacattaatataagctgccacgcccaaggtgaaccacagccaatcattacatggaacaaggaaggagtgcagattaccgaatctggtaagttccatgttgatgatgagggcacgctgactatttacgacgcaggatttccagatcaggggcgttatgagtgtgtggcgcgcaacagctttgggctggccgtgaccaatatgttcctaacagtaaccgctatacagggcaggcaggccggcgacgactttgttgaatccagcatcctagacgccgttcaaagggtagactccgcaattaattctactaggcgacatctcttcagccagaaacctcacacaagcagcgatctgctggctcagtttcactacccccgcgatccgctcattgtggaaatggctcgggcaggcgaaattttcgaacacaccctgcagcttattcgcgaacgtgtgaagcagggcctgacagtggacctggagggaaaggaatttaggtacaatgacctggtgtcccctcggtccctcagtctgatagccaacctcagtggttgtacggcccgaagaccattgcctaactgctccaaccggtgtttccacgcaaagtatagagcacacgacgggacctgcaataatctccagcaaccgacatggggggctgcattgaccgctttcgctcgccttttgcagccagcttacagggatggaattcgcgcccctcgaggcctgggcctgcccgtgggcagtaggcagccactacctccccctcgcctggtcgcaactgtttgggcccgggcagccgctgtgactcctgaccatagttacaccaggatgcttatgcattgggggtggtttctggaacacgatctcgatcacacagttccagccctctccacagcccgtttcagtgacggaagaccttgtagttccgtctgcacgaacgaccctccatgctttcctatgaacacccgtcacgctgatccacgcggaacacacgcaccctgcatgttgttcgccaggtcctcaccagcgtgtgcctcaggcagaccctccgcaaccgtggattccgtctacgcccgcgagcagataaatcagcagaccgcatatatcgacggcagcaatgtctacggcagttccgaacgcgaaagccaggctctccgcgatccaagcgtgccgcgtggcctgctgaaaacaggctttccctggcccccttcagggaaaccactccttccgttctctacagggcctcccacagaatgcgcccgtcaggagcaagagtccccttgctttctcgctggtgaccatcgggcgaacgagcacctcgccttggccgctatgcatacactttggttccgagaacataatcggatggcaacggaattgagcgcccttaacccccactgggaaggcaacacagtctaccaagaggcacggaaaattgtaggcgcagaactccagcacatcacatacagtcattggctgcccaaggtactgggagacccaggcacacggatgttacgggggtacagggggtataaccccaacgtcaacgctggcattatcaattcatttgcaacagctgcgttccgctttggccatacgctcattaatccgattctctatagactgaacgccaccttaggagaaattagtgagggacacctgccattccacaaagctctgttctctccatctcgaatcattaaagaaggtgggattgacccagtacttcggggactatttggagtggcggccaagtggagagctccatcatacctcctaagcccggagcttacgcagcggctcttttcagccgcctattcggcagcagtcgatagcgccgccaccatcatccaacgaggtcgcgaccacggcatcccaccctacgtagatttccgcgttttttgtaacctgacctcagtcaagaatttcgaggatctgcagaatgagatcaaggattccgaaatacggcagaagctgaggaagctgtacggctcccccggggacattgatctttggccagctctgatggtcgaggacttgatcccgggtactcgagtgggccctaccctgatgtgtctgttcgtgacacagttccagaggctgcgagatggagatcggttctggtacgagaaccccggcgtgttcaccccggcccagttaacgcagctgaaacaggcatctctctcaagggtgctgtgtgacaacggcgatagcatacaacaggtgcaggccgatgtgtttgtgaaagccgaataccctcaggactacctcaactgcagcgaaatacccaaggtggatctgcgggtgtggcaagactgttgtgccgactgtcgtagccgcggccagttcagggcggtcacacaggagtcacaaaaaaagcgctctgcccagtactcataccctgtggataaggacatggaactgagccacctgaggtcgcgccagcaggacaaaatttatgtgggggaagacgctagaaacgtcacagtccttgccaaaacgaagttctcccaggacttttccacatttgcggctgagatccaggagaccatcactgccctccgagagcagataaataaactagaagctagactgagacaggccgggtgcactgatgtgagaggggtgcctaggaaggctgaggagcgctggatgaaggaagattgtacacactgtatatgcgagagtggtcaggtgacctgcgtcgtcgaaatttgccctccagctccctgccccagtcccgagctcgtgaaggggacatgctgtcccgtctgtcgggacagaggcatgccctcagatagccccgagaaacgctag

SEQ ID NO: 239370 - DNA, 4805 bp, Artificial Sequence
  derived and/or modified sequence
agtccagcagccaccatcaccaccactgcggttgctgctgcagctgcagctgctgctctccctccggctgcttcttcgcgtggccagcagcgaatggagcgatggagcccagactgttctgctggaccactctctttctcctggccgggtggtgcctgccagggttgccctgccccagccggtgcctttgctttaagagcaccgtccgctgcatgcacttgatgctggaccacattcctcaggtaccacagcagaccacagttctagacttgaggtttaacagaataagagaaattccagggagcgccttcaagaaactcaagaatttgaacacacttctgctgaacaacaaccacatcagaaagatttccagaaatgcttttgaaggacttgaaaatttgctatatctgtacctgtataagaatgaaatccatgcactagataagcaaacatttaaaggactcatatctttggaacatctgtatattcatttcaaccaactagaaatgctacagccagagacctttggagaccttctgagattagagcgactatttttgcataacaacaaattatctaaaattccagctgggagcttttctaatctggattcattaaaaagattgcgtctggattccaacgccctggtttgtgactgtgatctgatgtggctgggggagcttttacaaggctttgcccaacacggccacacccaggctgcggctacctgcgaatatcccaggagactccatgggcgtgcagttgcttcagtaacagtagaggaattcaattgccagagcccccgaattacttttgagccgcaggatgtggaggtaccatcaggaaataccgtctacttcacctgccgggcggaaggaaaccccaaacctgagattatttggatacacaacaaccactcattggatttggaagatgatactcgacttaatgtgtttgatgatggcacactcatgatccgaaacaccagagagtcagaccaaggtgtctatcagtgcatggccagaaattccgctggggaagccaagacacagagtgccatgctcagatactccagtcttccagccaaaccaagctttgtaatccagcctcaggacacagaggttttaattggcaccagcacaactttggaatgtatggccacaggccacccacaccctcttatcacttggaccagggacaatggattggagctggatggatccaggcacgtggcaacgtccagtggactttacttacagaacatcacacaacgggatcatggtcgatttacctgtcatgccaacaatagccacggcactgttcaagctgcagcaaacataattgtacaagctcctccacaatttacagtaacccccaaggatcaagtggtgctggaagaacatgctgtagagtggctctgtgaagctgacggcaacccacctcctgttattgtctggacaaaaacaggagggcagctccctgtggaaggccagcatacagttctctcctctggcactttgagaattgaccgtgcagcacagcacgatcaaggccaatatgaatgtcaagcagtcagttcgttgggggtgaaaaaggtgtctgtgcagctgactgtaaaacccaaagctcttgcagtgtttactcaacttcctcaggatacaagtgtcgaggttggaaagaatataaacatttcatgtcatgctcaaggagaaccacagcccataattacttggaataaggaaggtgtgcagattactgagagtggtaaattccatgtggatgatgaaggcacgctgactatctacgacgcagggttccctgaccagggaagatatgaatgtgtggctcggaattcttttggccttgctgtgaccaacatgtttcttacagtcacggctatacagggtagacaagctggcgatgactttgttgaatcttccattcttgatgctgtacagagagttgacagtgcaattaactccacacgaagacatttgttttcacaaaaacctcacacctccagtgacctgctggctcaatttcattacccgcgtgacccactgattgtggaaatggcaagagcaggggagatttttgagcacacgctgcagctgatacgggaacgtgtgaagcaggggctcactgtggacttggaaggcaaagaattccggtacaatgacttggtgtccccgcgctccctcagcctcatcgccaatttatctggatgcacagctcgcaggcctctgccaaactgctccaaccggtgtttccatgcgaagtaccgcgcccacgacggcacgtgcaacaacctgcagcagcccacgtggggcgcggcgctgaccgccttcgcgcgcctgctgcagccagcctaccgggacggcatccgcgcgccccgcgggctcggccttcctgtgggctcccgccagcccctcccgccgccccggctggtcgccacagtgtgggcgcgcgcggcggccgtcacccccgaccacagctacacgcgcatgctcatgcactggggctggtttctagagcacgacttggaccacacagtgcctgcgctgagcacagcccgcttctcggatgggcggccgtgcagctccgtctgcaccaacgaccctccttgtttccccatgaacacccggcacgccgacccccggggcacccacgcgccctgcatgctcttcgcgcgctccagccccgcgtgtgccagcggccgtccctctgcgacggtggattcagtctatgcacgagagcagatcaaccagcaaacagcctacatcgatggctccaacgtttacgggagctcggagcgggaatcccaggctctcagagacccttcggtgcctcggggtctcctgaagacaggctttccttggcctccctccggaaagcccttattgcccttttctacaggcccacccaccgagtgcgcgcgacaggagcaggagagcccctgtttcctggccggggaccaccgggccaacgagcatctggctctggccgccatgcacaccctgtggttccgggaacacaacaggatggccacggagctgtccgccctgaacccccactgggagggaaacacggtttaccaggaagccaggaagatcgtgggcgcggagctgcagcacatcacctacagccactggctgcctaaggtcctgggggaccctggcactaggatgctgaggggttaccgaggctacaaccccaacgtgaatgcaggcatcattaactcttttgctactgcagcctttagatttggccacacattaatcaatcctattctttaccgactgaatgccaccttaggtgaaatttccgaaggccaccttccgttccataaagcgctcttttcaccgtccagaataatcaaggaaggtgggatagacccggttctccgggggctgtttggcgtggctgctaaatggcgggcaccctcctaccttctcagtcctgagctgacccagaggctcttctccgcggcttattctgcggccgtggattcggctgccaccatcattcaaaggggtagagaccacgggatcccaccatatgttgacttcagagttttctgtaatttgacttcagttaagaactttgaggatcttcaaaatgaaattaaagattcagagattagacaaaaactgagaaagttgtacggctctccaggtgacattgacctctggcccgcccttatggttgaagacctgattcctggtacaagagtgggaccaacacttatgtgcctgtttgttacccagtttcagcggctaagagatggagataggttctggtatgaaaaccctggagtatttaccccggcacaactcactcagctgaagcaggcgtccctgagccgggtgctttgtgacaatggtgacagcattcagcaagtgcaggctgatgtctttgtaaaggcagaatacccacaggattacctgaactgcagcgagatcccgaaggtggacctgcgagtgtggcaagactgctgtgcagactgtaggagtagaggacagttcagagcagtgacgcaagagtctcaaaagaaacgctcagctcaatacagctatcctgttgataaggatatggagttaagtcatctaagaagtaggcaacaagataaaatatatgtgggtgaagatgctagaaatgtgacagttctggcaaaaacaaagttctcccaagatttcagcacgtttgcagcggaaattcaggaaaccatcacagcactcagagagcagataaacaagctggaggcacgcctgaggcaggcagggtgtacagatgttagaggggttccaaggaaggccgaggagcgctggatgaaagaagactgcactcactgcatttgtgagagtggccaggtcacctgtgtggtggagatttgtcccccggctccctgtcccagtcctgaattggtgaaaggaacctgctgtccagtttgcagagaccgaggaatgccaagtgattccccagagaagcgctaataaaagttttgtgctgttgagccccaaatgggaaatttctcaggaagagacatttaggacttcagaacttttaacttgtagtcacattgttgatatggaaaccactgacttaagcaacttagttcatctaatcttacatatacttacgatcttttattttttcattttctaacataccttgaaataattcaaaactaaaagcaataaagtgcatatgaagtgtttgatcataagaaatatttcttactgtaagctgtcagttttatatgccacacctggaaataaaaagaatatcatggaatatttaaaaaa

SEQ ID NO: 239371 - DNA, 3951 bp, Artificial Sequence
  derived and/or modified sequence
atggaaccccgccttttttgctggaccacgttgttccttctggcaggttggtgtctgcccggcctcccttgcccctcaagatgtctgtgctttaagtctacagtgcgttgtatgcacctgatgctggatcatatccctcaagtgcctcaacagactacagtactggaccttcggtttaacagaatccgggaaatcccaggatccgccttcaaaaaattaaagaacctgaacacacttctgcttaataacaatcacattaggaaaatctctaggaatgctttcgaggggctggaaaaccttctgtacctgtacttgtacaaaaacgaaattcacgctctggataagcagacctttaaaggcctcatcagtctcgagcacctctacattcactttaatcagcttgagatgctgcagcccgaaactttcggagacctgttgcgactggagcggctttttttgcacaataacaaattgagtaagattccggccgggagtttctccaatcttgactccctcaaacgcctgagattagattctaacgcacttgtttgcgattgtgacttaatgtggctaggcgaactcctacaagggttcgcccagcatgggcacacgcaggctgcagcgacgtgcgaatatcccagacgcctacatgggagagcagtcgctagtgtgacggtggaagaattcaattgtcagtcaccacggatcactttcgaaccccaggatgtggaggtccccagcgggaatacggtgtactttacctgccgtgccgaggggaaccctaagccagagattatctggatacacaataaccactcattggatctggaggatgatacaagactgaacgtgttcgatgatggcacgctgatgatacgcaacacacgtgaatcagatcaaggggtctaccagtgtatggctcgaaattctgcgggcgaagctaaaacacaatcagctatgctacggtattcttctctgcctgcaaaacccagtttcgtgattcagccacaggatacagaagtcctgattggtacaagcaccacactggagtgcatggcaactgggcatcctcaccctctgatcacatggactcgggacaacggacttgaactggacggatctaggcatgttgccacatcttccgggttatatctgcaaaatatcacacagagggatcacggcagatttacatgtcacgctaacaatagccatggcacagtgcaggccgctgcgaatattatcgttcaggcccccccccagttcaccgtcacacctaaggatcaagtcgtcctagaagaacatgcagttgaatggctgtgtgaagcagacgggaacccaccacctgtcatcgtgtggactaagactgggggtcagctacccgtggaggggcagcacaccgttctctcatccgggactctgcgtatcgaccgggctgcgcagcatgaccagggtcaatacgaatgtcaagccgtctcttccctgggggtgaaaaaagtctcagtgcagcttactgtcaagcctaaggcccttgcagtttttacgcaactgccacaagatacatccgtggaggtcgggaagaatatcaatataagctgccatgcccagggcgaaccccaaccaataatcacctggaacaaagagggggtccagatcaccgagtccggtaagttccacgttgatgacgaaggaactctcactatctatgacgcagggttccctgaccaaggccgttacgaatgcgtcgcgcggaattcttttggcctcgcagtgacaaacatgttcctcacggtcacggccatacaagggaggcaggcaggcgatgatttcgtggaatctagtattttggacgctgtccagagggttgatagtgctattaactcaacgcgtagacacctgttctcccagaagccacacacctcttctgatctgctggctcagttccactaccctagggacccacttatcgtagagatggctcgggccggggagatttttgaacacactctacagcttatacgggagcgagtaaaacagggactcaccgtggatctggagggtaaggaattccgatacaacgatctggtcagccctcgcagcctgtcactgatcgccaacctatctgggtgtacagctagaagaccccttcctaactgctcgaacagatgtttccatgccaaataccgcgctcatgacggcacatgtaacaacctccagcaaccgacttggggggccgctctgacagcctttgctcggctgttgcagccagcttaccgtgatggcattagggctccacgcggtctgggtcttccagttggatctaggcagccactccctcctccccgtctcgtggccacggtgtgggcccgcgcggccgcggtgacacctgaccactcttatacccggatgctcatgcactgggggtggtttcttgagcatgatctggatcatactgtacccgcgctatctaccgcacgcttctctgacggacggccatgttcctccgtctgcaccaacgaccccccatgcttccctatgaacaccagacatgctgatccaagaggtacacacgctccctgtatgctgtttgcaagatctagcccagcatgtgcttccgggagaccctctgcaactgtggatagtgtctacgctcgagaacaaatcaaccaacagacggcctatatcgatgggagtaatgtgtacggttcttccgaacgggagtcgcaagctttgagagatccatcagtaccaagaggcctactaaagactggattcccttggccaccgtctggcaaacctctgttgcccttttcaaccggccccccaacagaatgtgccaggcaggaacaggaaagtccctgtttcctggcgggtgaccatcgggctaacgaacatctagccctcgcagcgatgcacaccctctggtttagagagcacaatcgtatggcaacagagctctctgctttgaacccacactgggagggcaacaccgtatatcaggaggcccgaaagatcgtgggtgccgagctgcagcacattacatattcgcattggctgcccaaagtgcttggggacccaggcacacgaatgctgaggggctatcgagggtacaatcctaatgtgaacgccgggattatcaattccttcgcgacggcagcatttcggttcggtcacactctgattaaccctattttgtatagactcaacgccactttgggcgaaatctcggagggacacctgccctttcataaggcgctgttctctcctagcagaataatcaaggagggaggtatagatcctgtgctcagagggctgttcggggtagccgcaaaatggagggctccatcatatctgctgagccccgaactgacccagaggctgttttctgccgcatactccgctgcggtcgattcagccgccactatcatccaacggggccgggaccacggaatccccccctacgtagacttccgtgtgttctgtaacttgacaagcgtgaagaactttgaggatctgcagaatgaaatcaaggactccgagattagacaaaagttacggaagctgtatggcagccccggagacatcgatctgtggccagcccttatggtcgaggatttgattcccggaacaagggtgggccccacactgatgtgtctctttgtgacacagtttcagagattgcgggatggggataggttttggtatgaaaatcccggggtgttcaccccagcccagttgacccagctcaaacaggctagcctgagtcgtgtattgtgcgacaatggtgactcaatccaacaggttcaggccgatgtgtttgtaaaggccgagtacccccaggattatctgaattgttcagaaatacctaaggtggaccttcgggtgtggcaggactgttgtgcagataaacaagcagggggaacaccggaggccggacgcgtttacagatgctag

SEQ ID NO: 239372 - DNA, 4392 bp, Artificial Sequence
  derived and/or modified sequence
atggagcccaggctcttctgctggaccaccctcttcctgctggccggctggtgcctgcccggcctgccctgccccagccgctgcctgtgcttcaagagcacagtgcgctgcatgcacctgatgctggaccacatcccccaggtgccccagcagaccaccgtgctggacctgcgcttcaaccgcatccgggagatccctggcagcgccttcaagaagctgaagaacctgaacaccctgctgctgaacaacaaccacatcaggaagatcagcagaaatgcctttgagggcctggagaacctgctgtacctgtacctgtacaagaatgagatccacgccctggacaagcagaccttcaagggcctcatcagcctggagcacctgtacatccacttcaaccagctggagatgctgcagcctgagaccttcggggacctgctgcggctggagcggctcttcctgcacaacaacaagctgagcaagatcccagctggcagcttcagcaacctggacagcctgaagaggctgcggctggacagcaatgccctggtgtgtgactgtgacctgatgtggctgggggagctgctgcagggctttgcccagcacggccacacccaggccgccgccacctgtgagtacccccggcggctgcacggccgggctgtggcctctgtgacagtggaggagttcaactgccagagcccccgcatcacctttgagccccaggatgtggaggtgcccagcggcaacacagtgtacttcacctgcagagctgagggcaaccccaagccagagatcatctggatccacaacaaccacagcctggacctggaggatgacacccggctgaatgtgtttgatgatggcaccctgatgatccggaacacccgggagagtgaccagggcgtgtaccagtgcatggccaggaacagcgctggggaggccaagacccagagcgccatgctgcgctacagcagcctgcctgccaagcccagctttgtgatccagccccaggacacagaggtgctgattggcaccagcaccaccctggagtgcatggccaccggccacccccaccccctcatcacctggacccgggacaatggcctggagctggatggcagccgccacgtggccaccagcagcggcctgtacctgcagaacatcacccagagggaccacggccgcttcacctgccacgccaacaacagccacggcaccgtgcaggccgccgccaacatcatcgtgcaggccccaccccagttcaccgtgacccccaaggaccaggtggtgctggaggagcacgctgtggagtggctgtgtgaggctgatggcaaccccccacctgtgattgtgtggaccaagacaggaggccagctgcctgtggagggccagcacacagtgctgagcagcggcaccctgagaattgaccgggccgcccagcacgaccagggccagtatgagtgccaggccgtgagcagcctgggcgtgaagaaggtgtctgtgcagctgactgtgaagcccaaggccctggccgtgttcacccagctgccccaggacacctctgtggaggtgggcaagaacatcaacatcagctgccacgcccagggcgagccccagcccatcatcacctggaacaaggagggcgtgcagatcacagagagcggcaagttccacgtggatgatgagggcaccctgaccatctatgatgctggcttcccagaccagggccgctatgaatgtgtggccagaaattcctttggcctggccgtgaccaacatgttcctgactgtgacagccatccagggccggcaggccggagatgactttgtggagagcagcatcctggatgctgtgcagagggtggacagcgccatcaacagcaccaggaggcacctgttcagccagaagccccacaccagcagtgacctgctggcccagttccactacccccgggaccccctgattgtggagatggcccgggccggggagatctttgagcacaccctgcagctgatccgggagcgggtgaagcagggcctgactgtggacctggagggcaaggagttccgctacaatgacctggtgagccccaggagcctgagcctgattgccaacctgagcggctgcacagcccggcggcccctgcccaactgcagcaaccgctgcttccacgccaagtaccgggcccatgatggcacctgcaacaacctgcagcagcccacctggggcgccgccctgacagcctttgcccggctgctgcagcctgcctacagagatggcatccgggccccccggggcctgggcctgcctgtgggcagccggcagcccctgcccccaccccggctggtggccaccgtgtgggcccgggctgctgctgtgaccccagaccacagctacaccaggatgctgatgcactggggctggttcctggagcatgacctggaccacacagtgcctgccctgagcacagcccgcttcagtgatggccggccctgcagctctgtgtgcaccaatgaccccccctgcttccccatgaacaccaggcatgctgacccccggggcacccacgccccctgcatgctgtttgcccggagcagccctgcctgtgccagcggccggcccagcgccaccgtggacagcgtgtatgcccgggagcagatcaaccagcagacagcctacattgatggcagcaatgtgtatggcagcagcgagcgggagagccaggccctgcgggaccccagcgtgccccggggcctgctgaagacaggcttcccctggcccccatctgggaagcccctgctgcccttcagcacaggccccccaacagaatgtgcccggcaggagcaggagagcccctgcttcctggccggggaccaccgggccaatgagcacctggccctggccgccatgcacaccctgtggttccgggagcacaacaggatggccacagagctgagcgccctgaacccccactgggagggcaacacagtgtaccaggaggccaggaagatcgtgggcgctgagctgcagcacatcacctacagccactggctgcccaaggtgctgggggaccccggcaccaggatgctgcggggctaccggggctacaaccccaacgtgaatgccggcatcatcaacagctttgccacagctgccttccgcttcggccacaccctcatcaaccccatcctgtaccgcctgaatgccaccctgggggagatcagcgagggccacctgcccttccacaaggccctcttcagccccagccgcatcatcaaggagggcggcattgatcctgtgctgcggggcctgtttggagtggccgccaagtggagggcccccagctacctgctgagccctgagctgacccagaggctcttctctgctgcctacagcgctgctgtggacagcgctgccaccatcatccagaggggccgggaccacggcatccccccctacgtggacttccgggtcttctgcaacctgacctctgtgaagaactttgaggacctgcagaatgagatcaaggacagcgagatccggcagaagctgaggaagctgtatggcagccctggggacatcgacctgtggccagccctgatggtggaggacctgatccctggcaccagggtgggccccaccctgatgtgcctgtttgtgacccagttccagaggctgagagatggagaccgcttctggtatgaaaatcctggggtcttcaccccagcccagctgacccagctgaagcaggccagcctgagccgggtgctgtgtgacaacggggacagcatccagcaggtgcaggctgatgtgtttgtgaaggccgagtacccccaggactacctgaactgcagcgagatccccaaggtggacctgcgggtgtggcaggactgctgtgccgactgccgcagccggggccagttccgggctgtgacccaggagagccagaagaagaggtctgcccagtacagctaccctgtggacaaggacatggagctgagccacctgcggagccggcagcaggacaagatctacgtgggggaggatgccagaaatgtgacagtgctggccaagaccaagttcagccaggacttcagcacctttgctgctgagatccaggagaccatcacagccctgcgggagcagatcaacaagctggaggcccggctgcggcaggccggctgcacagatgtgcggggcgtgcccaggaaggccgaggagcgctggatgaaggaggactgcacccactgcatctgtgagagcggccaggtgacctgtgtggtggagatctgccccccagccccctgccccagccctgagctggtgaagggcacctgctgccctgtgtgccgggaccggggcatgcccagcgacagccctgagaagaggtag

SEQ ID NO: 239373 - DNA, 3951 bp, Artificial Sequence
  derived and/or modified sequence
atggagcccaggctcttctgctggaccaccctcttcctgctggccggctggtgcctgcccggcctgccctgccccagccgctgcctgtgcttcaagagcacagtgcgctgcatgcacctgatgctggaccacatcccccaggtgccccagcagaccaccgtgctggacctgcgcttcaaccgcatccgggagatccctggcagcgccttcaagaagctgaagaacctgaacaccctgctgctgaacaacaaccacatcaggaagatcagcagaaatgcctttgagggcctggagaacctgctgtacctgtacctgtacaagaatgagatccacgccctggacaagcagaccttcaagggcctcatcagcctggagcacctgtacatccacttcaaccagctggagatgctgcagcctgagaccttcggggacctgctgcggctggagcggctcttcctgcacaacaacaagctgagcaagatcccagctggcagcttcagcaacctggacagcctgaagaggctgcggctggacagcaatgccctggtgtgtgactgtgacctgatgtggctgggggagctgctgcagggctttgcccagcacggccacacccaggccgccgccacctgtgagtacccccggcggctgcacggccgggctgtggcctctgtgacagtggaggagttcaactgccagagcccccgcatcacctttgagccccaggatgtggaggtgcccagcggcaacacagtgtacttcacctgcagagctgagggcaaccccaagccagagatcatctggatccacaacaaccacagcctggacctggaggatgacacccggctgaatgtgtttgatgatggcaccctgatgatccggaacacccgggagagtgaccagggcgtgtaccagtgcatggccaggaacagcgctggggaggccaagacccagagcgccatgctgcgctacagcagcctgcctgccaagcccagctttgtgatccagccccaggacacagaggtgctgattggcaccagcaccaccctggagtgcatggccaccggccacccccaccccctcatcacctggacccgggacaatggcctggagctggatggcagccgccacgtggccaccagcagcggcctgtacctgcagaacatcacccagagggaccacggccgcttcacctgccacgccaacaacagccacggcaccgtgcaggccgccgccaacatcatcgtgcaggccccaccccagttcaccgtgacccccaaggaccaggtggtgctggaggagcacgctgtggagtggctgtgtgaggctgatggcaaccccccacctgtgattgtgtggaccaagacaggaggccagctgcctgtggagggccagcacacagtgctgagcagcggcaccctgagaattgaccgggccgcccagcacgaccagggccagtatgagtgccaggccgtgagcagcctgggcgtgaagaaggtgtctgtgcagctgactgtgaagcccaaggccctggccgtgttcacccagctgccccaggacacctctgtggaggtgggcaagaacatcaacatcagctgccacgcccagggcgagccccagcccatcatcacctggaacaaggagggcgtgcagatcacagagagcggcaagttccacgtggatgatgagggcaccctgaccatctatgatgctggcttcccagaccagggccgctatgaatgtgtggccagaaattcctttggcctggccgtgaccaacatgttcctgactgtgacagccatccagggccggcaggccggagatgactttgtggagagcagcatcctggatgctgtgcagagggtggacagcgccatcaacagcaccaggaggcacctgttcagccagaagccccacaccagcagtgacctgctggcccagttccactacccccgggaccccctgattgtggagatggcccgggccggggagatctttgagcacaccctgcagctgatccgggagcgggtgaagcagggcctgactgtggacctggagggcaaggagttccgctacaatgacctggtgagccccaggagcctgagcctgattgccaacctgagcggctgcacagcccggcggcccctgcccaactgcagcaaccgctgcttccacgccaagtaccgggcccatgatggcacctgcaacaacctgcagcagcccacctggggcgccgccctgacagcctttgcccggctgctgcagcctgcctacagagatggcatccgggccccccggggcctgggcctgcctgtgggcagccggcagcccctgcccccaccccggctggtggccaccgtgtgggcccgggctgctgctgtgaccccagaccacagctacaccaggatgctgatgcactggggctggttcctggagcatgacctggaccacacagtgcctgccctgagcacagcccgcttcagtgatggccggccctgcagctctgtgtgcaccaatgaccccccctgcttccccatgaacaccaggcatgctgacccccggggcacccacgccccctgcatgctgtttgcccggagcagccctgcctgtgccagcggccggcccagcgccaccgtggacagcgtgtatgcccgggagcagatcaaccagcagacagcctacattgatggcagcaatgtgtatggcagcagcgagcgggagagccaggccctgcgggaccccagcgtgccccggggcctgctgaagacaggcttcccctggcccccatctgggaagcccctgctgcccttcagcacaggccccccaacagaatgtgcccggcaggagcaggagagcccctgcttcctggccggggaccaccgggccaatgagcacctggccctggccgccatgcacaccctgtggttccgggagcacaacaggatggccacagagctgagcgccctgaacccccactgggagggcaacacagtgtaccaggaggccaggaagatcgtgggcgctgagctgcagcacatcacctacagccactggctgcccaaggtgctgggggaccccggcaccaggatgctgcggggctaccggggctacaaccccaacgtgaatgccggcatcatcaacagctttgccacagctgccttccgcttcggccacaccctcatcaaccccatcctgtaccgcctgaatgccaccctgggggagatcagcgagggccacctgcccttccacaaggccctcttcagccccagccgcatcatcaaggagggcggcattgatcctgtgctgcggggcctgtttggagtggccgccaagtggagggcccccagctacctgctgagccctgagctgacccagaggctcttctctgctgcctacagcgctgctgtggacagcgctgccaccatcatccagaggggccgggaccacggcatccccccctacgtggacttccgggtcttctgcaacctgacctctgtgaagaactttgaggacctgcagaatgagatcaaggacagcgagatccggcagaagctgaggaagctgtatggcagccctggggacatcgacctgtggccagccctgatggtggaggacctgatccctggcaccagggtgggccccaccctgatgtgcctgtttgtgacccagttccagaggctgagagatggagaccgcttctggtatgaaaatcctggggtcttcaccccagcccagctgacccagctgaagcaggccagcctgagccgggtgctgtgtgacaacggggacagcatccagcaggtgcaggctgatgtgtttgtgaaggccgagtacccccaggactacctgaactgcagcgagatccccaaggtggacctgcgggtgtggcaggactgctgtgccgacaagcaggccggcggcaccccagaggccggccgggtgtaccgctgctag

SEQ ID NO: 239374 - DNA, 4392 bp, Artificial Sequence
  derived and/or modified sequence
atggagccccggctgttctgctggaccaccctgttcctgctggccggatggtgcctgcccggcttgccttgccccagtcgatgcctgtgtttcaagtccaccgtacgatgtatgcatttaatgctggatcacattccgcaggtcccacaacagaccactgtattggacttaaggttcaaccgtattcgggagatccctggctcggcctttaagaagctgaagaaccttaatacactgttgctcaataacaatcacatacggaaaatcagtcggaatgccttcgaggggttagagaacctgctctacctgtacctgtataagaacgagatccacgcgcttgacaaacaaacattcaaggggctaatcagcctggagcacctgtatatccactttaatcagctcgaaatgttgcagcctgagacctttggtgacctgttaaggttagagagactttttctgcacaacaacaaattatcaaaaattccagccgggtcattttcaaatctggatagtctgaagcgcctgcgcctggacagcaatgccttggtctgcgattgcgacctgatgtggctaggggagttactgcagggatttgcacagcatgggcacactcaagctgcagccacttgtgagtatcccaggcggctgcacggacgcgctgtggcctcggtcacagtggaggagttcaactgtcaatctcctaggatcacgttcgagccacaggacgtggaggtgccatcgggaaacacagtttactttacttgccgggcagagggcaatcccaagcccgagatcatttggatccataataaccactcattggacttggaggacgatactagactgaacgttttcgacgacggcacattgatgatccgcaatacaagggaatccgaccaaggggtgtaccagtgtatggccagaaactctgccggagaagcaaagacccagagtgcaatgctccggtacagctccctgccggcaaaaccatcttttgttatacaacctcaggataccgaggttctgatcggcactagtaccaccctagaatgtatggccacggggcacccccaccccctgatcacctggactcgggacaatggactcgaacttgacggctccagacacgtggctaccagttccggactctatttacagaacatcacgcagagagatcatggtcgcttcacatgtcacgctaataatagccacggaaccgttcaagcagctgctaatatcatcgtgcaggctccacctcagtttacagtcacacccaaagaccaggtggtgctcgaagaacacgccgttgagtggctttgcgaggctgatggcaacccacccccagtgatcgtatggacaaaaactgggggccagcttcccgtggaagggcagcacaccgtgctttcttctgggacgctgagaatagacagagctgctcaacatgatcaggggcagtacgaatgtcaagccgtctcatccctgggcgtcaaaaaagtctctgttcaactaacggtcaaacccaaagctctggccgtgtttacacaactgccacaggacactagtgtggaggttggcaagaacattaatatatcttgccatgcacagggggaaccccagccaatcattacatggaacaaagagggggtgcaaatcaccgaatctggcaaattccatgtggatgatgaaggcacattgaccatttatgacgccggattccccgaccaagggcgttacgaatgcgttgctcggaactccttcggcctggcggttactaatatgttcctgaccgttaccgcgatacagggccggcaggctggcgatgatttcgtggaatcaagcattctggacgcggtccagagggtggactctgcaatcaactctacaaggaggcacctgttctctcagaagccgcatacaagcagcgatctgcttgcacagtttcactatccaagagaccccctgatagtggaaatggctcgagctggcgaaatattcgagcatacactgcagttaattcgggagcgggtgaagcagggactcacagtggacctggaggggaaagagtttaggtacaatgaccttgtgagcccaaggagcctaagcctaattgcgaacctgtcaggctgtactgctaggcgccccctgcccaattgctcgaatagatgcttccacgcaaagtacagggcccacgacggcacctgcaataacctccaacagccaacctggggggccgcactgacagccttcgctcggctcctccagcctgcctaccgggacgggatacgggccccccgtggtctgggcctgccggtcggtagccgtcagccacttccacccccccgattagtagctaccgtttgggcccgtgcggccgctgttactccagaccacagctatactaggatgcttatgcattggggttggtttctcgagcacgacctcgatcacaccgtacctgcgctctcaactgccaggttcagcgacggccgcccttgctcaagcgtttgtactaatgatcccccgtgttttcctatgaacacccgacacgctgatcctcgcgggacccatgcaccttgcatgctgttcgcaagatcctcacctgcgtgcgcaagcggtagaccgtctgcgacggtggactctgtctacgcacgggagcagataaatcagcagaccgcttacattgatggttccaatgtttacggttcctccgagcgggagtcccaggccctgagggacccctctgtaccccggggtctgctgaagactggtttcccatggcccccttcggggaagccacttctgccattctcgactggccctcccacagagtgcgccagacaagaacaggaatctccatgtttccttgccggcgatcacagggctaacgaacatctggccctagcagcgatgcataccctatggttcagagaacataataggatggcaacagagctgtccgctctgaaccctcactgggagggcaataccgtatatcaggaagcacgtaaaattgtgggtgcagaattgcagcacatcacatattcgcattggttacccaaagttctgggggacccaggtacacgaatgctgcggggatacagaggctacaatcccaacgtgaatgcaggtatcatcaattccttcgctacggctgcttttagatttggacacacactgattaacccgatactatatcggctgaacgctaccctgggcgagatcagtgagggacaccttccatttcataaagccctgttctcaccctcacgcataattaaggaaggaggtatagaccccgtgctgcgcggcctgtttggcgtagctgcaaaatggagggcccctagctacttactatcccctgagttgactcaacgactcttcagtgcagcatattccgctgcggtcgattcggccgcaacaatcatccagcgcggtcgggatcacgggatccctccctatgtcgatttcagggttttttgtaatcttactagtgtgaagaacttcgaagatttgcagaacgagattaaggatagcgaaattcgccagaagttgcgtaagctttatgggtcccccggggacattgatctttggcctgctcttatggtcgaggatctgatcccggggacccgagtcggaccaactctgatgtgcctgtttgtaacacaattccagcggctgcgcgacggcgaccggttctggtatgaaaaccccggagtcttcacacctgcacagctgacacagctgaaacaagcatccctgagcagggtgctgtgcgataacggagattccattcagcaggtgcaggctgatgtgtttgtgaaggccgagtacccgcaggactacctgaattgctcagagattcctaaggtcgatctgagagtttggcaggactgctgtgccgattgccgcagtaggggacaatttagggccgttactcaggagtcgcagaaaaagaggagtgcccagtactcttacccggtcgataaggacatggaattgagtcacctgagatctcgtcagcaagacaaaatctatgtgggagaggatgcccgcaatgtcaccgtattggctaagactaaattctcccaagatttttcaaccttcgcagcagaaattcaggaaacaattaccgctttgcgggagcaaataaacaaactggaagcaagacttcgtcaggccggctgtaccgacgtcagaggcgtgccaaggaaggccgaggagagatggatgaaagaagactgtacccactgtatctgtgagagtgggcaggtgacctgcgtggtcgagatctgcccaccggcaccatgcccgagcccggagctggtgaaagggacttgctgccctgtatgtcgcgataggggtatgccatctgatagtccagagaaaaggtag

SEQ ID NO: 239375 - RNA, 4392 nt, Artificial Sequence
  derived and/or modified sequence
auggaacccagacuguuuuguuggaccacccucuuccuccuggccggauggugucucccugggcugccaugucccucccggugucugugcuuuaaaagcaccguccgaugcaugcaccugaugcuggaccauauaccucaggucccccaacaaacuacagugcucgaccuucgauucaauagaaucagagaaaucccuggcuccgccuuuaagaaguuaaagaaccuuaauacccuuuuguuaaacaacaaucauauccgcaaaaucucuaggaacgcauucgaaggccucgaaaaucuccuguaucuauaucuguacaagaacgaaauucacgcccuugacaagcaaaccuuuaaaggccuaaucagucuggaacaccuauacauucacuucaaccagcuggaaaugcuacagcccgagaccuuuggugaccugcuccgccucgaacgucucuuccuccauaauaauaagcucuccaagauuccagcaggcucauuuucuaaucuugacucacugaaacggcugcgccuugauucuaaugcucuggucugugacugcgaucugauguggcugggagaauugcugcagggcuuugcccagcacggacauacucaggccgcggcuaccugugaguauccacggcgccugcauggacgugcaguagcuuccgugacaguagaagaguuuaacugucaaagcccgaggauuaccuuugaaccacaggaugucgaaguacccaguggaaacaccgucuacuucaccugccgggccgagggcaauccuaagccugagaucaucuggauucacaauaaucauucccuggaucucgaggacgacacaaggcugaacguauucgaugaugggacuuuaaugauccgaaacacacgagagagugaucagggugucuaucaaugcauggcuagaaauucagccggagaagcaaaaacccagucagcaaugcuccgcuauucaucacugcccgccaaaccuucuuuuguuauccaaccccaggacacagagguucugauugggacaagcacuacacuggaaugcauggcaacuggacacccccacccauugaucacauggacuagggauaacggucuggaguuagaugggagucggcacguggcaacgaguucuggccuguaccugcagaauauuacacaaagggaccauggacgguuuacgugucaugcaaacaauagucauggcacaguacaagccgccgcuaacauaauugugcaggcccccccccaguuuacagugacucccaaagaccagguaguccuggaggagcaugcaguggaguggcugugugaggcagauggcaauccaccaccugugaucguguggacuaaaacggggggccagcugccuguugagggacagcacaccgugcucuccucuggaacccucaggauugaucgcgccgcacaacaugaccagggucaguacgaaugucaggccgugucuagucugggcgugaaaaaagugagcgugcagcugacuguaaagccgaaggcucuugccgucuuuacacaacuaccgcaggacaccuccguggagguuggcaaaaacaucaacaucucaugccacgcccagggugaaccccaaccaauuaucacauggaacaaggaaggcgugcaaauuacugaauccgggaaguuccauguggaugaugaaggaacucugaccaucuaugaugccggguuuccggaucaaggccguuacgagugugucgcaagaaacucuuucggucucgcuguaaccaauauguuucucacuguaacugccauccaagggcgacaggccggggacgauuuuguggaaaguuccaucuuggacgcuguccagcgaguggacuccgcuaucaauucaacuaggagacaucuguucagccagaaaccacauacuucuagcgaccugcucgcccaauuucauuacccccgagacccccuuaucguggagauggcucgggcaggcgagaucuucgaacauacgcuucagcugauaagagagaggguaaagcagggccugaccguggacuuagagggaaaggaauucagguacaacgaucucgucucacccagaucuuuaucucucaucgcuaaucugucagguuguacugcaagacggccccugccgaauuguucuaaucgguguuuucacgccaaguaccgcgcucacgaugguacguguaauaauuugcagcagccgacuuggggcgcagccuuaacagccuucgccagauuacugcagccagccuaccgagacggaauuagagccccccgggggcuuggacuccccguuggaagcagacagccucucccgcccccccggcugguagccacagucugggcuagagcagcagcaguuacccccgaccacuccuacacacgaaugcuuaugcacuggggcugguuucuggagcacgaccucgaccauacaguccccgcccuuagcaccgcccgcuuuucagauggaagaccgugcagcucuguguguaccaaugaucccccaugcuucccaaugaauacgaggcacgccgacccccggggaacgcacgcuccgugcauguuauucgcuaggucuaguccugccugugccucugggcggcccagcgcaaccgucgacucggucuaugcaagagagcagauaaaccagcaaaccgcuuauauugacggcuccaacguuuacgguucauccgagagggagucucaggcacugcgagacccuagcgucccuaggggacugcugaagacaggauucccauggccuccaucugguaagccucucuugccguucaguacaggacccccuacagagugcgcccgacaggaacaggagucacccugcuucuuagccggugaccaucgcgccaacgagcaccuugcguuggcagcuaugcacacacugugguucagagagcacaacaggauggccaccgaacuauccgcccuuaauccacacugggagggaaacacaguuuaccaagaggcgaggaagauuguaggggccgagcugcagcacaucacauacucacacuggcuccccaagguacuaggcgaucccgguaccagaaugcuccggggguacaggggguauaacccaaacgugaaugcuggaaucauuaacagcuucgccaccgcagccuuuagguuuggucacacccuaaucaauccuauacucuacaggcucaacgcaacauugggggaaaucagcgagggacaccuuccuuuccacaaggccuuguucuccccaucgcggaucaucaaggagggcggcauugauccuguccuuaggggccuguucgguguggccgccaaguggcgugcucccagcuaucugcugagcccagagcuuacccaaaggcuauuuucugccgcuuacucugcugccgucgacagcgcagcaaccauaauccagaggggccgagaccacggaauccccccuuauguugacuuccgcguguuuugcaaccucacuuccgugaagaacuuugaggacuuacagaacgagauuaaggacucugaaauaagacagaaacugaggaaacuauacggcucuccuggagauauagaucuauggccugcuuugaugguggaggacuuaauccccggcacuagaguaggcccaacgcuuaugugucuguuugucacgcaguuccaaaggcucagagacggagaccgguucugguacgagaauccaggggucuucacucccgcccaauugacgcaacucaaacaggcuucauugaguaggguuuugugugauaacggggacaguauccagcaaguccaggccgauguguucguaaaggccgaauauccacaagauuauuugaacuguuccgagauuccuaaaguggacuugcguguguggcaggauugcugugccgauugucgcagcagggggcaauuccgagcugucacgcaagagagccaaaagaagcggagcgcccaguauaguuaucccguggacaaagauauggaauugagccaccugagaucccggcagcaggauaagauuuacgugggagaagaugcaaggaacguaaccgugcuagccaagacaaaguuuagccaggacuuuucuacauucgcagccgaaauucaagaaacaaucaccgcucuccgggaacagaucaauaaguuagaggcuaggcuacgacaagccgggugcacagacguccgaggagucccccgcaaagccgaggaacgauggaugaaagaggacuguacacauugcauaugugagucgggccaaguuaccuguguggucgaaauuugucccccugcacccuguccuucuccugaacucgucaagggaacauguuguccuguuuguagagacaggggaaugcccucagacuccccggagaagcgcuag

SEQ ID NO: 239376 - RNA, 3951 nt, Artificial Sequence
  derived and/or modified sequence
auggaaccucgccucuucugcuggacuacccuguucuugcuggccggguggugccucccgggguugccauguccaucccgcugccugugcuuuaagucaacugugaggugcaugcacuugauguuggaccauauaccgcaagucccccagcagaccacagugcuugaccugagauuuaaccgcauccgcgagauuccgggaagcgcauucaaaaaacucaagaaccugaauacauuacugcuaaacaauaaccacauacggaaaauuuccagaaacgcauuugaggggcucgagaaucugcuguaccuguauuuguacaagaacgagauccaugcccuggacaagcagacauuuaagggucucauuagucuggagcaccuuuacauucacuuuaaucaacuugaaaugcuccagccagaaacguuuggagaucugcugcgacuggagagacuguuccugcacaacaacaagcugaguaaaauuccugccggaagcuucucaaauuuagacucucuuaaacggcugcgacucgacucaaaugcucuggugugugauugcgaucugauguggcuuggagagcuguuacagggauuugcacagcauggucacacccaggccgcagcuacuugcgaguauccacggcggcuccacggcagagcuguagcuuccgugacagucgaagaguucaauugucagucaccuaggaucacguuugaaccucaggauguggagguuccaucuggcaacacuguguacuuuacgugccgcgcugagggcaauccuaaaccggaaauuauuuggauccauaacaaccauaguuuagauuuagaggacgauacacgacugaacguguuugacgauggaacucugaugauccgcaauaccagggaaagcgaucagggaguuuaccagugcauggcccggaacucagccggugaagcgaagacacaaucagcaauguuaagguacuccucauugccugccaaaccgucuuucguuauccaaccucaggacaccgaagugcugauaggcacaaguaccacacuagaaugcauggcaacaggccacccgcauccauuaaucacauggaccagagauaacggcuuggagcuggauggaucucgccacgucgcaacuucuucgggucucuaucuucagaacaucacacagcgagaccauggacgcuuuacuugccacgcaaacaacucucacggaacaguucaggcugcagcaaacaucauuguccaggcccccccgcaauuuaccguuacccccaaggaucaagucgugcuggaagaacaugcugucgaguggcugugcgaagcagacggaaacccucccccugugauagucuggaccaagacaggcggccaauuaccaguggaggggcagcauaccguccugagcuccggcaccuuacgcaucgauagagcugcccagcacgaccagggucaguacgagugccaagccgugucgucucucggcgugaaaaaaguaaguguacaguugaccguaaaaccuaaggcacuggcaguuuucacccagcugccacaagauacauccguagaagugggaaaaaacaucaauaucucaugccaugcucaaggcgaaccacaaccaauuaucacauggaacaaggaaggcguacaaauaacagaguccggcaaguuucaugucgaugaugaagguaccuuaacuauauaugaugcagguuucccagaucagggaagguaugagugcguugccagaaacaguuucggccuggcagugacaaauauguuuuugacggugaccgccauccagggcagacaagcaggagaugauuuuguggaaucuucaauccucgacgcuguacaacgcguugacagcgcuauuaauaguaccaggcgccaccucuuuucccagaagccacauacuuccagcgaccugcuagcccaguuccauuauccucgcgacccccugaucguagagauggccagggccggggagauauucgaacauacguugcaauuaauuagagaacgcgugaagcaagggcugacaguggaccuggagggaaaagaauuuagauacaacgaucucgucuccccccgaucccuaucucugauugccaaccucuccggcuguacagcacggcgaccucugccuaauugcucaaauagaugcuuccaugcaaaguauagagcacacgacggaacuugcaauaaccugcagcagccaaccuggggcgcagcucucacagcuuuugcacgccuccuccagccugcauacagggauggcauacgugcaccccgcggacucggcuugccugucggcucucgacagccacucccuccacccaggcugguagcuacagugugggcccgcgcggccgcugugacacccgaccauucguauacgcgcauguuaaugcacugggguugguuucuggagcacgaucuggaucacaccguccccgcccugucaacggccagguucagcgacgggcguccaugcucuucuguguguacaaacgaucccccuuguuuuccuaugaauacacggcaugccgauccgcguggcacacaugcaccuuguaugcuguuugcgcggaguucaccugccugcgcuaguggccgaccuagcgcuaccguggauuccgucuacgcacgggagcagaucaaccagcagacagccuacaucgacggcuccaauguauacgggagcagcgaaagggagucccaagcccugcgcgacccgaguguuccuagaggguugcugaagacgggcuuccccuggccaccuuccggcaagccgcuucugccuuucucaaccggacccccgacugagugugcucgucaggaacaagaaagcccguguuuucucgccggggaucaccgugccaaugaacaccucgcgcuggcugccaugcacacucugugguuucgggaacauaauaggauggcgacagagcucucugcauugaacccucacugggaagggaacaccguguaccaggaagcuaggaaaaucguuggugcagaguugcaacacaucacauauucucauuggcugcccaaaguccugggggacccaggcacccgaaugcucagagguuaccgaggguauaacccaaauguuaaugccggcauaaucaacuccuucgcaacagcugcauuccgcuuuggucauacucugauuaaccccauucuguaccgucucaacgcgaccuugggugaaaucuccgaaggccaccugccuuuccauaaagcuuuguucucacccaguagaaucauuaaagaaggagggaucgacccuguccugcgggggcucuuugguguggccgcuaaauggagggcuccuucuuacuugcuguccccugaacucacccagcggcuuuuuucagcagccuauucugccgcaguggacucagcggccaccauaauucaacgcggcagggaucauggaauuccacccuacguugauuuccgggucuucuguaacuuaaccagcguaaaaaauuucgaggaccuacagaaugaaauaaaagauuccgagauccgccagaaacuacggaaacuguacggcuccccgggcgauauugaccucuggccagcgcugaugguggaagaucugauacccgguacccgcgugggcccgacacugauguguuuauuugucacacaguuccagaggcuucgggauggggacagguucugguaugagaauccugguguuuuuacgccagcucagcuuacucagcugaaacaagccaguuuguccagagugcucugcgacaauggugacucgauucagcaaguccaggcagacguguuuguuaaagccgaguacccacaggauuaccugaauugcuccgagauuccaaaaguugacuuaaggguguggcaagacugcugugccgacaaacaggcagggggcacaccagaggccggccgggucuaccggugcuag

SEQ ID NO: 239377 - RNA, 4392 nt, Artificial Sequence
  derived and/or modified sequence
auggaaccuagacucuucuguuggaccacauuauuucugcuugccggcuggugucucccgggucucccaugcccuucccgcugucugugcuucaagucaaccgucagguguaugcaucugauguuagaccacauuccucaagugccucagcaaaccacaguccuugaccuucguuuuaaucgcauucgggaaaucccugguucagcuuuuaaaaagcucaaaaauuugaacacccuguuacugaauaauaaucauauuagaaagauuagucgcaacgccuucgaaggcuuagaaaaucuucuguaucuguaucuauauaagaacgaaauccacgcucucgacaaacagacuuucaagggacugauaagucucgagcauuuauacauccacuucaaccaacuggagauguugcagcccgaaacuuucggagaccuccugagacucgaacgccucuuucugcacaacaauaaacuuuccaaaaucccagcaggcagcuucuccaaucuugacagccugaagagacugcgccuugauaguaacgcucucguuugcgacugugaucugauguggcugggugaguuacuccagggguuugcacaacacggccauacacaagccgccgcuacuugcgaguacccacggagauugcauggcagagcuguugccagcgugacugucgaggaguucaauugucaauccccgcguaucaccuuugagccacaggacguugagguccccagcggcaacacuguguacuucacuugcagggcagaagguaacccuaagccagaaauaauauggauacauaacaaccauucccuggaucuggaagaugauaccagacuuaacguauucgaugaugggacucucaugauuagaaauacacgcgaauccgaccagggugucuaucaaugcauggcuagaaauucagccggagaagcaaaaacccagucagcaaugcuccgcuauucaucacugcccgccaaaccuucuuuuguuauccaaccccaggacacagagguucugauugggacaagcacuacacuggaaugcauggcaacuggacacccccacccauugaucacauggacuagggauaacggucuggaguuagaugggagucggcacguggcaacgaguucuggccuguaccugcagaauauuacacaaagggaccauggacgguuuacgugucaugcaaacaauucgcacggaaccguacaagcagcagcgaauauuauaguucaagcacccccccaguuuacaguaaccccaaaggaucagguugucuuggaggagcaugcaguggaguggcugugugaggcugauggaaacccuccucccgucauugucuggacgaaaacaggcggucagcuccccgucgaaggucaacauaccguucucucgucuggcacucugcgcauugaucgagcugcucagcaugaucaggggcaauacgagugccaagcagugaguucucucgguguaaaaaaagugucugugcaguuaacaguaaagccuaaggcacucgccguguuuacacagcuaccacaggauaccuccguagaagucggaaagaacauuaacauuucaugccaugcgcagggggagccacagccaauuaucaccuggaacaaggaaggcgugcagauaacugaaucuggaaaauuccacguggacgacgaagggacacucacaauuuacgacgccgguuuuccagaucagggacgguaugagugcgucgcacguaauagcuuuggacuugcuguuaccaauauguuccucacaguuaccgccauucaggguaggcaagcuggggaugacuucguugaauccucaauucucgaugcaguccaacgaguugacagcgccauuaacuccacccggaggcaccucuuuucucagaaaccacauacaucuagugaucugcuugcacaauuccauuacccccgggacccacugauuguugagauggcuagagccggcgagaucuuugagcacaccuuacagcugauucgugagagagugaagcagggccucaccgucgaccuggaaggaaaagaauucagauacaaugaccuagugucaccgcgaucauuaagucugauugcuaaccucucaggauguacagcacggcguccgcucccaaacugcucaaaccgcuguuuccaugcaaaauacagagcacacgauggcacuuguaacaaucuacaacagccaacuuggggcgcugcgcucacugccuucgcacgguuacuucagccugcuuaccgcgacggaauucgggcuccacggggucuaggcuuaccagugggaucccgacagccucucccucccccccgucuggucgccaccguaugggcuagagccgcagcagucacgcccgaccauucauauaccagaaugcuaaugcacuggggaugguuucucgagcaugacuuagaccauaccgugccugcacucucuacagcgagauuuuccgauggccgaccuuguuccagcguuugcacaaaugacccacccugcuuucccaugaacacucgccacgccgaccccagagguacccacgcaccgugcaugcuguucgccaggucuuccccggcaugcgcaagcggcaggccuucagcuacaguagacagcgucuacgccagggagcaaauuaaccagcagacagcauacaucgacggaagcaauguuuaugggagcucagaacgggaaagccaggcucuacgugauccuagcgucccacgaggccuguugaaaaccggauuuccauggccgcccagcgguaaaccacuuuugccuuucucaacuggacccccaaccgagugugcccgccaggaacaggaaagcccaugcuuucuagcaggagaucacagagccaacgagcaucucgcacuggccgcuaugcacaccuuaugguuuagagaacauaaccguauggcuacagagcucagcgcccucaacccucacugggagggaaacacuguuuaucaagaagcucggaagauugucggcgcugaacugcagcacauuaccuacagucauuggcugccaaaaguacugggggacccagguaccagaaugcuccggggcuaccgcgguuauaaccccaaugugaacgcagguaucauaaacaguuucgcaacggcugcuuucagguucggccacacacuaaucaaucccauacuuuaucgacuaaaugcgacccugggcgaaaucucugaaggacaccugccauuucauaaagcacuguucucucccagccggauuauuaaggagggugguauugacccuguguuaagaggacuguucggcgucgcagccaaguggagagcaccguccuacuuacuaucuccugagcugacacaacggcuguucucagccgcguauagugcugccguggacucugccgcuaccaucauucaacgaggaagagaccacgggaucccacccuauguggauuuccgaguauuuuguaaccugaccuccguuaagaacuuugaagaccugcagaaugaaaucaaggacagcgagauaagacagaaauuacggaaacuguacgguagccccggugacauugaccucuggccagcccuuaugguugaagaucugauuccagggacgcgggugggccccacgcugaugugccucuuuguuacacaguuucagcgguuacgcgacggcgaccgauuuugguacgagaacccuggaguguuuaccccagcccaacucacccaguuaaagcaagccagccucagccggguacuaugugacaacggagauucaauucaacaggugcaggccgaugucuuugucaaggcugaguacccacaggacuaucucaacuguagcgaaauccccaaaguugacuuacgaguuuggcaagauuguugcgccgacugcagaucgcgcggccaauuuagggccguaacucaagaaagccagaagaaacgguccgcccaguacaguuaucccgucgacaaagacauggaauugagucacuuaagaagccgccagcaggacaaaauuuacgugggagaagaugcuagaaaugugaccgugcuugccaagacuaaauuuagccaggacuucucaacauucgccgccgagauccaggagacaauaaccgcacuccgagagcagaucaacaaacuugaggccagacuccgccaggcaggcuguacagacguuagaggagugccccggaaagcugaggaacgcuggaugaaggaagauuguacucacuguaucugcgagucaggccaggucacuugugucguugaaaucuguccaccugcucccugucccagcccugaacuggugaaaggaacauguugcccuguuugucgugaucggggaaugccaagcgauaguccagaaaagcgcuag

SEQ ID NO: 239378 - RNA, 3951 nt, Artificial Sequence
  derived and/or modified sequence
auggagccucgccuuuucuguuggacuacccuuuuccuccuagcaggauggugccuuccuggccuuccuugcccuucucggugucuguguuucaaaaguacuguccgcuguaugcaucucaugcuggaucacaucccccaagugccccagcaaacuaccguguuggaucuucgcuucaaucgcauaagagaaauucccgggucugccuucaaaaagcuuaaaaaccuuaauacccuacuccuuaacaauaaucacaucaggaaaauuagccguaaugcauuugaagguuuagaaaaccuuuuguauuuauaccuuuauaaaaacgagauacaugcucuggacaaacagacuuucaagggauuaaucucccucgagcaucuauauauccacuuuaaucagcuggaaaugcugcaacccgagacuuuuggugaccuguugagacuagaaaggcuguucuugcacaauaacaagcuuuccaagauaccagcuggcaguuucucaaaucuugauagccugaagagacugagacuugauucgaaugcuuuagugugcgauugugaucuuaugugguugggggagcuucugcaaggguucgcgcagcacggacauacucaggcggcugcaacuugugaguacccaagacgucugcacgguagagccguggcgucuguaacugucgaggaauuuaauugccagagcccacgcauaacuuucgaaccgcaggauguugaagucccauccggaaacaccgucuacuuuacaugccgcgccgagggcaauccuaagccugaaaucauuuggauucauaauaaccacucccuugacuuggaagacgauaccaggcugaacguguuugacgaugguaccuuaaugauuagaaauacgagagaaagugaucaaggcguuuaccaguguauggcaagaaacuccgcaggggaagcaaaaacccaaucagccaugcugcguuauucuucuuuaccggcuaagcccuccuucgugauccagccccaggauaccgagguacugauagguacaaguaccacacuugaaugcauggcuacuggacacccgcacccucuaauuaccuggacaagagacaacggccucgaguuggaugggucaagacauguggcaacaucauccggacuguacuuacagaacaucacacagcgagaucaugggcguuucacaugucaugccaauaauucccacgggacuguccaggcugccgcaaauaucaucgugcaggcuccuccccaauuuaccgucacuccgaaggaucaagucgugcuugaggagcacgcgguugaauggcuuugugaggccgauggaaaucccccaccagucaucguuuggaccaaaacuggaggucaguugccuguugaaggacagcacacgguccugucuaguggaacguugagaaucgacagagccgcccagcacgaccaggggcaauaugaaugccaagccguuucuucuuuaggagucaaaaagguuuccguccaguugaccgugaaacccaaagcucuagccguguuuacccagcucccccaagacacuucaguggaggucggaaaaaacauaaauauuuccugucaugcacagggagaaccccaaccuauaauaacguggaauaaggaggguguacaaauaaccgagucaggaaaguuccacguggacgacgaaggcacucugacaauauaugacgccgguuuucccgaccaaggacgguacgaauguguugcacgcaacucauucggacuggcaguuacaaacauguuucucaccguaacggccauucaaggccggcaagcuggggacgauuuugucgagucauccauccucgaugccguccaacgggucgacuccgccaucaauucaacccgccggcacuuauuuagucagaaaccacauacaucuucagaucucuuagcccaguuucacuacccaagggauccgcuuauuguugagauggcgcgagcgggugaaaucuucgaacacacacugcagcugauacgcgagcgagucaagcaggggcugaccguagacuuggaaggcaaagaguuccguuacaaugaccuggugagcccacgcucucugucucugauugcaaaucucucuggaugcaccgcacgccgaccgcugcccaacugcucaaauagauguuuucaugccaaauauagggcccacgauggaacgugcaacaaccugcaacagccgacauggggugcugcccugacagccuucgcucgccuccuccagccggcauaccgcgacggcauucgugcuccacgcgggcuaggauuaccuguggggucccgacagccauuaccccccccucgacugguugcuacugugugggcccgugccgccgcugugaccccugaccacagcuauacuagaaugcuuaugcacuggggaugguuucucgagcaugaccuagaucauacagugccugcucugucuaccgcaagauucucagacggucgccccugcuccagugucugcaccaacgacccuccaugcuuccccaugaacacacgccaugccgacccuaggggcacccaugcccccuguauguuguucgcacgaaguuccccugcuugugcauccggaagaccaagcgccaccgucgacuccgucuaugccagggaacagauuaaccagcagacagccuauaucgauggcucuaacguuuacgggucgucugagagagaaagucaagcccuccgcgaccccagugugccccgaggauugcucaaaacuggauuccccuggcccccaucaggaaaaccacuguugccauuuaguacgggcccaccuacagagugugcccgccaagaacaggagucaccgugcuuccuggccggagaucaccgggcaaacgaacaucuggcccuggccgcuaugcacacauugugguuucgagaacauaacaggauggccaccgaauugucugcgcuaaacccccauugggaaggaaacacugucuaccaggaggccagaaaaaucguuggagcggaacuccaacacauuaccuauagccacugguugccgaaggugcuuggcgaucccggaacccguaugcugcgaggcuauagaggauauaacccaaacgucaacgccgguaucauaaacucauucgcuacugcugcauuccgcuucggucauacacucauuaaucccauucuguacaggcugaacgccacacuuggugaaaucagcgaaggacacuuaccauuucauaaggcauuauucucucccagucgaauuaucaaagaaggcgguaucgacccugugcuucgcggacuguucggcguggcugccaaguggcgcgccccuaguuaccugcucagccccgagcugacucaaagacucuuuagugccgccuacagcgcugcuguggacagugcagcaaccaucauccagagaggcagggaucaugguaucccaccuuacguggacuuccgagucuucuguaaucucacgucaguaaaaaauuucgaggacuuacaaaaugaaaucaaagacucugaaaucaggcagaaacugcggaaacuuuauggaucuccaggagacaucgacuuauggccugccuugaugguggaagauuugauuccaggaacaagagucggcccuacccugauguguuuguucgugacccaguuccagcguuuaagagauggcgaucgcuuuugguacgagaaccccggaguauuuacuccugcucaguuaacacaguuaaagcaggccagccugucgagaguauugugcgacaacggcgauucaauccaacagguccaagcggacgucuuuguaaaggcugaauacccccaggauuaccuuaauuguagugaaaucccaaaaguggaucuaagaguguggcaggauugcugcgcagacaaacaggccgggggcacaccagaagcaggcagaguuuauagaugcuag

SEQ ID NO: 239379 - protein, 2073 aa, Artificial Sequence
  derived and/or modified sequence
MAEVRKFTKRLSKPGTAAELRQSVSEAVRGSVVLEKAKVVEPLDYENVIAQRKTQIYSDPLRDLLMFPMEDISISVIGRQRRTVQSTVPEDAEKRAQSLFVKECIKTYSTDWHVVNYKYEDFSGDFRMLPCKSLRPEKIPNHVFEIDEDCEKDEDSSSLCSQKGGVIKQGWLHKANVNSTITVTMKVFKRRYFYLTQLPDGSYILNSYKDEKNSKESKGCIYLDACIDVVQCPKMRRHAFELKMLDKYSHYLAAETEQEMEEWLITLKKIIQINTDSLVQEKKETVETAQDDETSSQGKAENIMASLERSMHPELMKYGRETEQLNKLSRGDGRQNLFSFDSEVQRLDFSGIEPDIKPFEEKCNKRFLVNCHDLTFNILGQIGDNAKGPPTNVEPFFINLALFDVKNNCKISADFHVDLNPPSVREMLWGSSTQLASDGSPKGSSPESYIHGIAESQLRYIQQGIFSVTNPHPEIFLVARIEKVLQGNITHCAEPYIKNSDPVKTAQKVHRTAKQVCSRLGQYRMPFAWAARPIFKDTQGSLDLDGRFSPLYKQDSSKLSSEDILKLLSEYKKPEKTKLQIIPGQLNITVECVPVDLSNCITSSYVPLKPFEKNCQNITVEVEEFVPEMTKYCYPFTIYKNHLYVYPLQLKYDSQKTFAKARNIAVCVEFRDSDESDASALKCIYGKPAGSVFTTNAYAVVSHHNQNPEFYDEIKIELPIHLHQKHHLLFTFYHVSCEINTKGTTKKQDTVETPVGFAWVPLLKDGRIITFEQQLPVSANLPPGYLNLNDAESRRQCNVDIKWVDGAKPLLKIKSHLESTIYTQDLHVHKFFHHCQLIQSGSKEVPGELIKYLKCLHAMEIQVMIQFLPVILMQLFRVLTNMTHEDDVPINCTMVLLHIVSKCHEEGLDSYLRSFIKYSFRPEKPSAPQAQLIHETLATTMIAILKQSADFLSINKLLKYSWFFFEIIAKSMATYLLEENKIKLPRGQRFPETYHHVLHSLLLAIIPHVTIRYAEIPDESRNVNYSLASFLKRCLTLMDRGFIFNLINDYISGFSPKDPKVLAEYKFEFLQTICNHEHYIPLNLPMAFAKPKLQRVQDSNLEYSLSDEYCKHHFLVGLLLRETSIALQDNYEIRYTAISVIKNLLIKHAFDTRYQHKNQQAKIAQLYLPFVGLLLENIQRLAGRDTLYSCAAMPNSASRDEFPCGFTSPANRGSLSTDKDTAYGSFQNGHGIKREDSRGSLIPEGATGFPDQGNTGENTRQSSTRSSVSQYNRLDQYEIRSLLMCYLYIVKMISEDTLLTYWNKVSPQELINILILLEVCLFHFRYMGKRNIARVHDAWLSKHFGIDRKSQTMPALRNRSGVMQARLQHLSSLESSFTLNHSSTTTEADIFHQALLEGNTATEVSLTVLDTISFFTQCFKTQLLNNDGHNPLMKKVFDIHLAFLKNGQSEVSLKHVFASLRAFISKFPSAFFKGRVNMCAAFCYEVLKCCTSKISSTRNEASALLYLLMRNNFEYTKRKTFLRTHLQIIIAVSQLIADVALSGGSRFQESLFIINNFANSDRPMKATAFPAEVKDLTKRIRTVLMATAQMKEHEKDPEMLIDLQYSLAKSYASTPELRKTWLDSMAKIHVKNGDFSEAAMCYVHVAALVAEFLHRKKLFPNGCSAFKKITPNIDEEGAMKEDAGMMDVHYSEEVLLELLEQCVDGLWKAERYEIISEISKLIVPIYEKRREFEKLTQVYRTLHGAYTKILEVMHTKKRLLGTFFRVAFYGQSFFEEEDGKEYIYKEPKLTGLSEISLRLVKLYGEKFGTENVKIIQDSDKVNAKELDPKYAHIQVTYVKPYFDDKELTERKTEFERNHNISRFVFEAPYTLSGKKQGCIEEQCKRRTILTTSNSFPYVKKRIPINCEQQINLKPIDVATDEIKDKTAELQKLCSSTDVDMIQLQLKLQGCVSVQVNAGPLAYARAFLNDSQASKYPPKKVSELKDMFRKFIQACSIALELNERLIKEDQVEYHEGLKSNFRDMVKELSDIIHEQILQEDTMHSPWMSNTLHVFCAISGTSSDRGYGSPRYAEV

SEQ ID NO: 239380 - DNA, 6222 bp, Artificial Sequence
  derived and/or modified sequence
atggcagaagtgcgcaaattcactaagagactttcaaaacccggcaccgcagctgaattgcgccagagtgtgtctgaggcggtgaggggtagtgtggtgctagagaaggcgaaagtggtggagcctctggattatgagaatgttatcgcacagagaaaaactcagatttacagcgaccctctaagagatcttctaatgttccccatggaggacataagcatctcagtcataggccgccagcgacgtacggtacagagcactgtgcctgaggatgctgagaagagagcacagagtctcttcgttaaagaatgcattaagacatactccaccgattggcacgtggtgaactataaatacgaggacttctccggagattttagaatgcttccctgcaaatcactacggcctgaaaaaataccgaaccatgtttttgaaatagacgaggattgcgaaaaagacgaggactcttcgtctctatgtagtcagaagggcggcgtaattaaacaaggctggcttcataaggcgaacgtcaatagtactataacggtgacaatgaaggtttttaagcgtcgctacttttatctgactcaattacctgatggcagctacatactgaacagttataaggatgagaaaaactccaaagagtcgaaaggttgtatttaccttgacgcctgtatcgatgtggtacaatgtcccaaaatgcgtagacatgccttcgaactcaaaatgctcgacaaatactcgcactatctggctgcagagacagaacaagagatggaggaatggttgatcactttaaaaaagattatacagatcaacactgactcactggtgcaggaaaagaaggagaccgtcgaaacagcgcaggacgatgaaacttcatctcaagggaaggcagagaatatcatggcatcacttgaaaggtctatgcatccagagctgatgaaatacggcagggagaccgaacagctgaacaagcttagcaggggggacggccgtcagaatttgttctcctttgattcagaggtacagcggctggactttagtggtatcgagcccgatattaaaccattcgaagaaaaatgtaataaaagattcttagtgaactgccacgatctaacttttaatatactggggcagatcggtgacaacgctaagggaccccctaccaacgtggaaccattctttataaatttagccttgtttgatgtgaaaaacaactgcaaaattagcgccgacttccacgtcgacttaaatcctccctctgttcgagaaatgctatgggggtcttcaactcagcttgcgagcgatggaagtcccaagggcagcagccctgaatcctatatacacggaattgccgagagccagctgagatatatccagcagggcatcttcagcgtgacgaatcctcaccccgagatttttctcgttgcccggatcgaaaaggtactgcaaggtaacataacccactgcgccgagccctacatcaagaatagtgaccccgtaaagacggcccagaaggtgcaccggactgccaagcaggtgtgctcacgccttgggcaatataggatgccgttcgcgtgggccgcaagaccaatcttcaaggacacccagggtagcctggatttagatggcaggttctccccgctctacaagcaggactcctctaaactcagcagcgaggatatattgaagttattgagcgaatacaagaaaccggagaaaaccaaacttcagattataccaggacagctgaacattacggttgaatgcgtgcccgtcgacctgagcaactgtatcacatcttcctacgtgcccctgaagcctttcgaaaaaaactgccaaaatattacagttgaggtcgaggagtttgtcccggaaatgactaagtattgctatcccttcacaatctacaagaaccatttgtatgtctaccccttacagctgaagtacgattcccagaaaactttcgctaaagctcgtaatatcgctgtctgtgtcgagttcagagactccgacgagagcgatgcatccgctcttaaatgtatatatggcaagcccgccggtagcgtttttacaacaaacgcctatgctgttgtgagtcaccacaaccagaatcccgagttctacgacgaaataaaaattgaactccccatccatctacaccagaagcatcacttgcttttcaccttctatcacgtctcttgcgagattaacaccaagggtaccaccaaaaagcaagatactgtagagacccccgtcggatttgcttgggtgcccctcctgaaagatggccgcatcatcacattcgaacagcagctgcccgtgtctgctaatctgcctcccgggtatctgaatctcaatgatgccgagtcccggcggcagtgcaacgtcgatatcaagtgggtagatggtgctaagccactgcttaaaataaaaagccacttggagtctacaatctacacgcaggaccttcacgtccacaaattttttcatcactgtcagttgatccaatctggctcaaaagaagtaccaggggagcttatcaaatatctaaagtgtctccatgccatggagattcaagtaatgatccagtttctgcccgttattctaatgcaactgttccgcgtccttaccaacatgacgcatgaggacgacgttcctatcaactgtacaatggtactactgcatatagtcagcaaatgccatgaggaggggctcgatagctacctgcgctcgttcatcaagtatagctttcggccagagaagccatccgccccccaagcgcaactgatccacgagacccttgcgacaacaatgatcgctattctgaagcagagtgccgattttctgtctattaataagttgctgaaatacagctggttctttttcgagattatcgccaagagcatggccacttatctgttagaggaaaacaagatcaagcttccacggggacagcggttccctgaaacataccaccatgtgttacatagcttgctgttggccattatcccccacgtgactatacggtatgccgagatacccgacgaatcacggaatgtgaactactcactggccagcttcttgaagcgctgcctgacgctcatggaccggggctttatctttaaccttattaatgattacatttcaggcttctctccaaaagaccccaaagtgctcgctgagtataagttcgagttcctgcagactatatgtaatcatgagcactacattcctctcaacctgcctatggcctttgctaagcccaaacttcagcgcgtccaggatagtaacctggagtattcactgagtgacgaatattgcaagcaccattttctggtagggttattactccgtgaaacctcgattgctcttcaggacaactacgagattcgctataccgctatttcagtcattaagaatctgctaatcaagcatgcatttgacaccagataccaacacaagaaccagcaggccaaaatagcacagctgtatctcccttttgtcggacttctgttagagaatatacagagactggccggccgcgatacactgtattcttgtgcagcaatgcccaattcggctagcagagacgaattcccctgcgggttcacaagccccgcaaatcgcggcagtctctcgacggacaaagacactgcttatgggagtttccagaatggccacgggattaagcgcgaggacagcaggggtagccttattccagaaggcgctacggggttccctgatcagggaaacacaggggagaatactcgccaaagtagtacacgctcatccgtgagtcaatataacaggctggaccagtatgagatccgctcactgctcatgtgttatctgtacatcgtcaaaatgatttcggaagataccttactgacatattggaataaggtttctccgcaggagctgattaatatcttgatccttttagaagtttgcctcttccactttagatatatgggaaagcggaatatcgccagggttcatgatgcttggctcagcaaacatttcggaattgaccgcaagtctcagacaatgcctgccttacggaacagaagcggtgtcatgcaagctaggctacaacacctgtcatcgctcgagagtagttttactctgaaccacagttctactacaaccgaggctgacatcttccatcaagcacttctagaaggaaacaccgctactgaagtgagtttgacagtcttggacacaatttcatttttcacacaatgctttaagactcagctcctgaacaatgacggtcacaatcccctcatgaagaaggtctttgacatccacctcgccttcctaaaaaacggccaatcagaggttagtttgaagcacgtgttcgcatcactcagggccttcatatctaaatttccctcggccttttttaaaggtagggtgaacatgtgcgcagcattttgttacgaggtgctgaagtgctgtacctccaaaatatccagcacccgaaacgaggcgtctgctttgttgtatttgctcatgcgcaacaacttcgagtacactaagaggaagacatttctgagaacccatctgcagattataatcgccgtcagtcagctcatcgccgacgtggccctctccgggggcagccgttttcaggagtcactgttcataataaacaacttcgcaaattccgaccgcccaatgaaagcaacagcctttcccgccgaagtcaaggacctgacaaaaagaattagaaccgttcttatggcgactgcccagatgaaagagcatgagaaagatccggagatgctgatcgatctccagtattcactggctaagagctacgcatcaactccggaacttcgcaagacatggctggatagtatggctaagattcacgttaagaatggagacttttccgaggctgcaatgtgctatgtacatgtggccgccctggttgccgaattcctccaccgcaagaagctcttccccaacggctgcagcgctttcaagaaaatcacaccaaatattgacgaagagggagcaatgaaggaagatgcaggcatgatggatgtgcactacagtgaggaagttctcttggaactgctggaacaatgcgttgatgggctttggaaggcagagagatacgaaatcatctctgagatcagtaagctgatcgtccccatttacgagaagaggcgggagttcgaaaaactaacccaagtgtatagaacgttacatggcgcctacacgaagatattggaagtcatgcatactaaaaagcgattactgggaacatttttcagagtggctttctacggacaatccttcttcgaggaagaagatggaaaggagtacatttataaggagcccaagctcactggcctgtcggaaatctcgctcagactcgtaaagctttacggggaaaaattcggcaccgagaacgtgaagattatccaggacagcgacaaggtcaacgccaaggaactcgatcctaagtacgcgcacatccaggtgacctatgtgaaaccctatttcgatgacaaagaactgaccgagagaaagaccgaatttgaaaggaaccataacatcagcaggtttgtattcgaagctccatacactctgagtgggaagaagcaggggtgtattgaggagcagtgtaaaagaaggaccatactgacgacaagcaacagttttccttacgtgaagaaaaggattccaattaactgcgagcagcaaatcaatctgaagcctatcgacgttgccacggatgaaattaaggacaagactgccgagttgcagaaattgtgctctagtacggacgtcgacatgatccaactgcaactcaagctgcagggctgtgtctcagtacaggtgaacgccgggcctctggcatatgctcgtgcctttctcaacgacagccaagcatcgaaatacccacctaagaaggtgtcggagctaaaagatatgtttcgaaagttcattcaggcatgctccattgccttggaactgaacgaaaggctgatcaaggaagatcaggtcgaatatcacgagggactgaaatctaattttcgggacatggtgaaagagctctccgacatcatccacgagcagatccttcaggaagacactatgcatagcccttggatgagtaacacactccatgtattttgtgctatctccgggacttcttctgacagaggctatggctcacccagatacgcagaagtttag

SEQ ID NO: 239381 - DNA, 6222 bp, Artificial Sequence
  derived and/or modified sequence
atggccgaggtgaggaagttcaccaagaggctgagcaagccaggcacagctgctgagctgcggcagagcgtgtctgaggccgtgcggggctctgtggtgctggagaaggccaaggtggtggagcccctggactatgaaaatgtgattgcccagaggaagacccagatctacagcgaccccctgcgggacctgctgatgttccccatggaggacatcagcatctctgtgattggccggcagaggagaacagtgcagagcacagtgcctgaagatgctgagaagagggcccagagcctgtttgtgaaggagtgcatcaagacctacagcacagactggcacgtggtgaactacaagtatgaggacttcagcggggacttcaggatgctgccctgcaagagcctgcggcctgagaagatccccaaccacgtgtttgaaattgatgaggactgtgagaaggatgaggacagcagcagcctgtgcagccagaagggcggcgtcatcaagcagggctggctgcacaaggccaacgtgaacagcaccatcaccgtgaccatgaaggtgttcaagaggcgctacttctacctgacccagctgcctgatggcagctacatcctgaacagctacaaggatgagaagaacagcaaggagagcaagggctgcatctacctggatgcctgcattgatgtggtgcagtgccccaagatgagaagacatgcctttgagctgaagatgctggacaagtacagccactacctggccgctgagacagagcaggagatggaggagtggctgatcaccctgaagaagatcatccagatcaacacagacagcctggtgcaggagaagaaggagaccgtggagacagcccaggatgatgagaccagcagccagggcaaggccgagaacatcatggccagcctggagaggtccatgcaccctgagctgatgaagtatggccgggagacagagcagctgaacaagctgagcagaggagatggccggcagaacctcttctcctttgacagcgaggtgcagaggctggacttcagcggcatcgagccagacatcaagccctttgaggagaagtgcaacaagcgcttcctggtgaactgccacgacctgaccttcaacatcctgggccagatcggggacaatgccaagggcccccccaccaacgtggagcccttcttcatcaacctggccctgtttgatgtgaagaacaactgcaagatctctgctgacttccacgtggacctgaaccccccatctgtgcgggagatgctgtggggcagcagcacccagctggccagtgatggcagccccaagggcagcagccctgagagctacatccatggaattgctgagagccagctgcgctacatccagcagggcatcttctctgtgaccaacccccaccctgagatcttcctggtggccagaattgagaaggtgctgcagggcaacatcacccactgtgccgagccctacatcaagaacagcgaccctgtgaagacagcccagaaggtgcacaggacagccaagcaggtgtgcagccggctgggccagtacaggatgccctttgcctgggccgcccggcccatcttcaaggacacccagggcagcctggacctggatggccgcttcagccccctgtacaagcaggacagcagcaagctgagcagcgaggacatcctgaagctgctgtctgagtacaagaagccagagaagaccaagctgcagatcatccctggccagctgaacatcaccgtggagtgtgtgcctgtggacctgagcaactgcatcaccagcagctatgtgcccctgaagccctttgagaagaactgccagaacatcaccgtggaggtggaggagtttgtgcctgagatgaccaagtactgctaccccttcaccatctacaagaaccacctgtatgtgtaccccctgcagctgaagtatgacagccagaagacctttgccaaggccaggaacattgctgtgtgtgtggagttccgggacagtgatgaaagtgatgccagcgccctgaagtgcatctacggcaagccagctggctctgtgttcaccaccaatgcctatgctgtggtgagccaccacaaccagaaccctgagttctatgatgagatcaagattgagctgcccatccacctgcaccagaagcaccacctgctcttcaccttctaccacgtgtcctgtgagatcaacaccaagggcaccaccaagaagcaggacacagtggagacccctgtgggctttgcctgggtgcccctgctgaaggatggccgcatcatcacctttgagcagcagctgcctgtgtctgccaacctgcccccaggctacctgaacctgaatgatgctgagagccggcggcagtgcaatgtggacatcaagtgggtggatggagccaagcccctgctgaagatcaagagccacctggagagcaccatctacacccaggacctgcacgtgcacaagttcttccaccactgccagctgatccagagcggcagcaaggaggtgcctggagagctgatcaagtacctgaagtgcctgcacgccatggagatccaggtgatgatccagttcctgcctgtgatcctgatgcagctgttccgggtgctgaccaacatgacccatgaagatgatgtgcccatcaactgcaccatggtgctgctgcacatcgtgtccaagtgccacgaggagggcctggacagctacctgcggagcttcatcaagtacagcttccggcctgagaagcccagcgccccccaggcccagctgatccacgagaccctggccaccaccatgattgccatcctgaagcagagcgctgacttcctgagcatcaacaagctgctgaagtacagctggttcttctttgagatcatcgccaagtccatggccacctacctgctggaggagaacaagatcaagctgccccggggccagcgcttccctgagacctaccaccacgtgctgcacagcctgctgctggccatcatcccccacgtgaccatccgctatgcagagatcccagatgagagcagaaatgtgaactacagcctggccagcttcctgaagcgctgcctgaccctgatggaccggggcttcatcttcaacctgatcaatgactacatcagcggcttcagccccaaggaccccaaggtgctggccgagtacaagtttgagttcctgcagaccatctgcaaccacgagcactacatccccctgaacctgcccatggcctttgccaagcccaagctgcagagggtgcaggacagcaacctggagtacagcctgagtgatgagtactgcaagcaccacttcctggtgggcctgctgctgcgggagaccagcatcgccctgcaggacaactatgagatccgctacacagccatcagcgtcatcaagaacctgctgatcaagcacgcctttgacacccgctaccagcacaagaaccagcaggccaagatcgcccagctgtacctgccctttgtgggcctgctgctggagaacatccagaggctggccggccgggacaccctgtacagctgtgccgccatgcccaacagcgccagcagagatgagttcccctgtggcttcaccagccctgccaacagaggcagcctgagcacagacaaggacacagcctacggcagcttccagaatggccacggcatcaagcgggaggacagccggggcagcctcatccctgagggcgccaccggcttcccagaccagggcaacacaggagagaacacccggcagagcagcaccaggagctctgtgtcccagtacaaccggctggaccagtatgagatccgcagcctgctgatgtgctacctgtacatcgtgaagatgatcagcgaggacaccctgctgacctactggaacaaggtgagcccccaggagctgatcaacatcctgatcctgctggaggtgtgcctcttccacttccgctacatgggcaagaggaacatcgcccgggtgcatgatgcctggctgagcaagcacttcggcatcgacaggaagagccagaccatgcctgccctgaggaacagaagtggagtgatgcaggcccggctgcagcacctgagcagcctggagagcagcttcaccctgaaccacagcagcaccaccacagaggccgacatcttccaccaggccctgctggagggcaacacagccacagaggtgtccctgactgtgctggacaccatctccttcttcacccagtgcttcaagacccagctgctgaacaatgatggccacaaccccctgatgaagaaggtgtttgacatccacctggccttcctgaagaatggccagagcgaggtgtccctgaagcacgtgtttgccagcctgcgggccttcatcagcaagttccccagcgccttcttcaagggccgggtgaacatgtgtgccgccttctgctatgaggtgctgaagtgctgcaccagcaagatcagcagcaccagaaatgaggccagcgccctgctgtacctgctgatgaggaacaactttgagtacaccaagaggaagaccttcctgcggacccacctgcagatcatcatcgctgtgtcccagctgattgctgatgtggccctgagcggcggcagccgcttccaggagagcctcttcatcatcaacaactttgccaacagcgaccggcccatgaaggccacagccttccctgctgaggtgaaggacctgaccaagaggatcagaacagtgctgatggccacagcccagatgaaggagcacgagaaggaccctgagatgctgattgacctgcagtacagcctggccaagagctatgccagcaccccagagctgaggaagacctggctggacagcatggccaagatccacgtgaagaatggagacttcagcgaggccgccatgtgctacgtgcacgtggccgccctggtggccgagttcctgcacaggaagaagctgttccccaacggctgcagcgccttcaagaagatcacccccaacattgatgaggagggcgccatgaaggaggatgctggcatgatggatgtgcactacagcgaggaggtgctgctggagctgctggagcagtgtgtggatggcctgtggaaggccgagagatatgagatcatcagcgagatcagcaagctgattgtgcccatctatgagaagagaagagaatttgagaagctgacccaggtgtaccgcaccctgcatggagcctacaccaagatcctggaggtgatgcacaccaagaagaggctgctgggcaccttcttccgggtggccttctacggccagagcttctttgaggaggaggatggcaaggagtacatctacaaggagcccaagctgaccggcctgtctgagatcagcctgcggctggtgaagctgtatggagagaagtttggaacagaaaatgtgaagatcatccaggacagcgacaaggtgaatgccaaggagctggaccccaagtatgcccacatccaggtgacctacgtgaagccctactttgatgacaaggagctgacagagaggaagacagaatttgagaggaaccacaacatcagcagatttgtgtttgaggccccctacaccctgagcggcaagaagcagggctgcatcgaggagcagtgcaagaggaggaccatcctgaccaccagcaacagcttcccctacgtgaagaagaggatccccatcaactgtgagcagcagatcaacctgaagcccattgatgtggccacagatgagatcaaggacaagacagctgagctgcagaagctgtgcagcagcacagatgtggacatgatccagctgcagctgaagctgcagggctgtgtgtctgtgcaggtgaatgccggccccctggcctatgcccgggccttcctgaatgacagccaggccagcaagtacccacccaagaaggtgtctgagctgaaggacatgttcaggaagttcatccaggcctgcagcatcgccctggagctgaatgaaagactcatcaaggaggaccaggtggagtaccacgagggcctgaagagcaacttccgggacatggtgaaggagctgagtgacatcatccacgagcagatcctgcaggaggacaccatgcacagcccctggatgagcaacaccctgcacgtgttctgtgccatcagcggcaccagcagtgaccggggctacggcagccccaggtatgcagaggtgtag

SEQ ID NO: 239382 - DNA, 6222 bp, Artificial Sequence
  derived and/or modified sequence
atggccgaggtgcggaagttcaccaagcggctgagcaagcccggcaccgccgcagagttgcgacagtcagtgtctgaggccgtgcggggtagcgtagtcttggagaaagctaaagtggtagagcccctggattacgaaaatgtaatcgcccagaggaagactcagatctatagcgatcccctgagagacttgttgatgttccctatggaagatatttcaatcagcgttatcggtcgacagagacgcactgtacagtcgacggtgccagaggacgcagagaaacgcgcacagagcctcttcgtgaaggagtgcataaagacctactcaaccgattggcatgtcgtcaattataaatatgaggatttcagcggtgactttcgcatgcttccttgcaagagccttaggccggagaagatccctaaccatgtctttgaaattgatgaggactgcgagaaggacgaggacagcagctcattgtgctcccagaaggggggggtcattaagcagggctggctgcacaaagccaatgtgaactcaacaattacagtgacaatgaaggtgtttaagagacggtacttttatctcacccagctccccgacgggtcatatatcttgaattcatataaagacgaaaagaatagcaaggagagcaaaggttgcatttatctggatgcctgcatcgatgtggtgcagtgccccaagatgcgccggcacgcttttgagctaaaaatgcttgacaaatattcccactatctcgcggccgagactgaacaggagatggaagaatggctgattaccctcaaaaaaattatccagattaacaccgacagtctggtgcaggagaaaaaggagacagtcgagactgctcaggacgacgaaacttcaagccagggaaaggccgagaacatcatggccagcttggagcggagcatgcacccagaactcatgaagtacggccgggagactgaacagctgaataagttatcacggggtgacggtcgacagaatctatttagcttcgattccgaggtgcaacgccttgatttcagcggaattgagcccgatatcaagccattcgaagagaagtgcaacaagagatttctggttaattgtcatgatttgaccttcaatattctgggccagattggagataatgcaaaagggccacccaccaatgtcgaaccattttttatcaatctggccttgtttgacgtgaaaaacaactgtaaaatcagtgcagattttcacgttgatcttaatcctccaagtgtgcgtgaaatgctgtggggctctagcacccagctcgcctctgacggctctcctaagggaagcagccccgagagctacattcatgggattgctgagagtcagctgcggtacattcagcagggtatctttagcgtgaccaacccgcaccctgagatcttcctggttgcgagaatcgaaaaggtcctgcagggaaatattacccattgtgctgagccgtacattaagaactccgatcctgtgaagaccgctcagaaagtgcaccgaacagcgaagcaagtttgttcccggctcggccaatacaggatgcctttcgcgtgggccgcgcgacctatcttcaaggacactcagggatcactcgacttggacgggcgtttttccccactctacaagcaggattcgtcaaaactttcctctgaagatatcctgaagctactgagtgagtataaaaaaccggagaagacaaagctccaaatcattcctggtcagctcaacattactgtggagtgcgttcccgtagatttgtccaactgcatcacctcttcctacgtacctctcaagcccttcgagaaaaactgccagaacattacagttgaggtggaagaatttgtgcctgaaatgacaaaatactgttatcccttcaccatttacaagaaccacctgtacgtgtaccccttgcagctgaagtacgacagccagaaaacctttgctaaggccagaaatatcgcagtgtgcgtggagtttcgagacagcgacgaatcagatgcatccgccctcaaatgtatctacggcaaacctgccgggtcagttttcacaaccaacgcctacgcggttgtcagtcatcataaccagaatccggaattctatgacgagatcaagatagagctgcctatccatctccaccagaaacatcatttgctgtttaccttttaccacgtctcctgtgaaataaacactaaagggaccaccaagaaacaggataccgtggagaccccagttgggtttgcatgggtgccattattaaaggatgggcgaatcattacctttgaacagcaactgcccgtgtccgccaacctgcccccagggtacctgaacctgaacgatgcagaaagccgacgtcagtgcaacgttgacattaagtgggtggatggggccaaaccattgttaaagatcaagtcccacctggagtcaaccatttacacacaagatcttcacgttcacaagttctttcatcactgtcagctaattcaatccggaagcaaagaggtacccggggaactgattaaatacctcaagtgcctccatgcaatggagattcaggtgatgatccaatttctgccagtgatcttgatgcagctgtttcgcgtgctgacaaacatgacacatgaggacgatgtccctattaactgtacgatggtactacttcacatagtatctaaatgccatgaggaaggtcttgactcctacctgagatccttcataaaatattccttcagaccagaaaaaccttcggctcctcaagcacagctcatccacgagacccttgctaccactatgatcgctatacttaaacagtcagcagattttctcagcattaacaagcttcttaaatactcctggtttttctttgagattattgccaagtcaatggcaacttatctcctggaagaaaacaagatcaagttgccacgtggtcagcggtttccagagacatatcatcatgtcctgcactctcttctgctggcgatcatccctcacgtcactatcaggtatgctgaaatccctgatgagtctcggaacgtcaattattccctggctagttttctcaagcggtgtctgacgctcatggatcgaggcttcatttttaacctcatcaatgactatatcagcggttttagcccaaaagacccgaaagtattggctgagtacaagtttgagtttctgcagaccatttgtaaccacgagcattacattcctctaaatttacccatggcatttgccaagccaaagctacaaagggtgcaggacagtaatctggagtactcactgtcagacgagtactgcaaacaccattttctggtcggattacttttgcgggagacatcaattgctctgcaggacaactatgagattagatacacagctatcagtgtgattaaaaacttgctgatcaagcacgcattcgacacgcgataccaacacaagaatcagcaggcaaagatcgcccagttatatcttccttttgtgggcctactgctagagaatatccagagactggcgggtcgcgataccctttactcctgtgccgccatgcctaacagcgcgtctagagacgagttcccatgtgggttcacttcaccagcaaatcgaggttccctctcgaccgacaaggacacggcctacggtagttttcagaacggccacggaatcaaaagagaggatagcagagggtcactgattcccgagggtgccactggatttcccgaccaggggaacacaggcgaaaacacccgacagtccagcacacggtcttccgtatcgcagtacaaccgcctggatcagtacgagattcgaagtcttctgatgtgctacttgtacatcgtcaaaatgattagcgaggacaccctgcttacatactggaacaaggtctcccctcaggagctgatcaatatcctgatcttgctggaagtttgcttgtttcatttcagatacatgggcaagcggaacattgcccgggtccacgacgcctggttaagcaaacattttggaatcgatcgcaaatcacagacaatgccggccttaaggaaccggagtggcgttatgcaagccaggctgcagcacttgtcatcattggaatcttctttcacgctcaatcacagctctaccacaaccgaggctgacatttttcaccaggccttattggagggcaataccgctaccgaagtttccttgaccgtgctagacaccatttcgttctttacccagtgcttcaagactcagctgctgaataatgacggacacaatccattgatgaagaaagtgtttgatattcacttggcctttctgaaaaacggccagagcgaagtgtctctcaaacacgtcttcgcaagtttgcgagcctttatttctaaattcccttctgccttctttaaaggtagggtgaacatgtgcgcagctttctgttatgaggttctgaagtgctgtacctcaaaaatctctagtacaagaaacgaggccagcgctctgctctacctcctgatgaggaataacttcgagtatacaaaaagaaagaccttcttacgcacccacttgcagatcattatcgcagtgagccagctcattgccgacgtggccctgtcaggtgggtcccgattccaggaaagcttatttattattaataatttcgctaatagcgacaggcctatgaaggctaccgcttttccagccgaggtgaaagacctcacaaaacggattaggaccgtgcttatggccactgcccaaatgaaggagcatgagaaagacccggaaatgctgatcgatctccaatattctctggctaaatcatacgccagcactcccgaattacgtaagacatggctcgattcaatggcgaaaatccacgtgaaaaatggagacttctccgaggctgccatgtgttacgtgcatgtggccgccctagtcgctgagttcctccaccggaagaagttgttccctaatggctgcagcgcattcaagaagatcactcccaacatcgatgaggagggagcaatgaaagaagatgctggcatgatggacgtgcactattcagaggaagtgctcctggaactgctggagcaatgtgtggatggtctttggaaggctgagaggtacgagatcattagtgagattagtaaacttatcgtgccaatctacgaaaaaagaagagagttcgagaagttaacacaggtctatcgtacgctgcacggcgcttataccaagattcttgaagtcatgcatactaagaaacgactccttggcacatttttccgcgttgctttctacggccagtccttttttgaggaagaggacggcaaagaatacatatataaggaacctaagctgacgggcctgtcagagatctccctgcgcctggtaaagctgtacggcgaaaaatttggtactgaaaatgtcaaaatcattcaggacagcgataaggttaacgcaaaagagctggaccctaaatatgcccacatccaggtaacctacgtgaaaccctatttcgatgacaaggagctgactgagcgaaagacagagtttgagaggaaccacaatatttcccgatttgtttttgaggcgccctacaccctgagtggcaagaagcagggttgcatagaagaacaatgcaagcgtcgaacaattctgactacgagtaattcattcccttacgtgaagaaacggatcccaattaattgtgagcagcagattaacctcaagcctattgacgttgctacggatgaaattaaggataagaccgcagaactccaaaagctctgcagttcaacggacgtcgacatgatccaattacagctgaagctccaagggtgtgtgagtgtgcaagttaacgctggacccctggcttatgccagagcctttctgaacgacagccaggccagcaaatatccacctaaaaaagtttctgaactgaaggacatgttccgcaaatttattcaagcctgctctatcgctctggagttaaacgaacgccttataaaagaggaccaggtggagtatcacgaaggactgaagagcaacttcagagacatggttaaggagcttagcgatatcatccacgaacagatccttcaggaggataccatgcacagtccctggatgtcgaacactttgcacgtcttttgcgcaatcagtgggactagcagcgatcggggatatggatccccaaggtatgccgaggtctag

SEQ ID NO: 239383 - DNA, 6222 bp, Artificial Sequence
  derived and/or modified sequence
atggctgaggtgagaaaatttaccaagcgcctctccaagcccggtactgcagcagaattacgtcagagcgtctccgaggccgttaggggaagcgtagttttagagaaggcaaaggtggttgaacccctcgactacgagaacgtgatagcccagcgcaagacgcagatctattccgatcccctgagagatctcttgatgtttccaatggaagacatctcaataagcgttatcggcagacaaaggcgcaccgtgcagtctacagtcccagaggacgcagaaaaacgtgcacagtctctttttgtgaaggagtgcattaaaacctacagcactgattggcacgttgtgaattataaatatgaagacttctctggcgatttccggatgttgccatgtaagtcccttcggcctgaaaagatcccgaaccacgtgtttgaaatcgatgaagactgtgagaaggatgaagactccagcagtctctgtagccagaagggaggtgtcataaaacagggttggctgcacaaggctaatgtgaactctacaataaccgtgactatgaaggtgttcaagcgacggtacttctacctcacgcagctcccagatggaagctacatactcaactcttacaaagacgagaagaactctaaggaatcaaagggatgcatctacctggacgcatgcatagatgtggtccaatgtcccaagatgaggaggcacgcttttgagctgaaaatgctggataagtattctcactacttagctgctgagactgagcaggaaatggaggaatggcttattaccctcaagaagataatccagataaacacagactctctggtccaggagaaaaaagagaccgtggagaccgctcaggacgatgaaacatcttcccaggggaaagccgaaaacattatggctagtctggaaaggagtatgcatccggaattgatgaagtatggacgtgagaccgagcagttgaacaaactgagtcgaggggatggacgccagaacctcttttcttttgactccgaggtgcagcgtctggactttagtggtattgagccagacattaagcctttcgaggaaaaatgtaacaaacgtttcctggtcaactgtcatgacctgacatttaatatcctgggacagattggagataacgcaaaaggtcctcccacgaacgtggaacctttctttatcaacctcgctttatttgatgtgaagaacaactgtaaaatctctgctgacttccatgtggacctcaaccccccttccgtcagggaaatgctgtgggggtcctcaacccagttggccagcgatggctctcccaagggcagttcgccagaatcgtacattcatggcattgccgaatcccagctccgatacattcaacagggcatcttctcagtaacaaacccgcatccggagatttttctggttgccagaatcgagaaggttttgcaaggaaatattactcattgtgccgagccctacatcaaaaattctgaccccgttaaaacagcgcagaaagtccataggactgcgaagcaggtatgtagcagactcggccagtaccgcatgccctttgcatgggcagcaaggccaatttttaaggatacccagggctctctggacctggacggtagattttctcctttatacaaacaagactccagcaagctcagttcagaggacatcctgaagctactcagtgagtacaaaaaacccgagaaaacgaagctacagataatccctggtcagctaaacattaccgtggagtgtgtgccagtggacttgagcaactgcataacatcctcctacgtgcccttgaaaccatttgagaaaaattgccagaatattactgtcgaagtcgaagagttcgtgcccgagatgaccaagtattgctacccgtttaccatttataaaaaccatctgtatgtataccccctccagctgaagtacgattcccagaagacatttgccaaggcccgaaatatcgcagtatgcgttgaatttagagattccgacgaaagtgacgcctccgccttaaagtgtatctacggaaaacctgccggatcggtgttcaccacaaatgcctacgctgttgtgagccaccataaccaaaaccctgaattttacgatgaaataaaaatagagcttcccatacacttgcaccagaagcaccatctcctgttcacattttatcacgtgtcatgtgagatcaatactaaagggactacaaagaaacaagataccgtggaaacaccggtgggtttcgcatgggttccactgctgaaggatgggagaattattacctttgagcagcaactgccagtctccgcaaacttgccgcctggctatttgaacttgaatgatgcggagtctagaaggcagtgtaacgtggacatcaaatgggtagatggggcaaaacccctactaaaaattaagagccatctcgaaagcactatttacacacaagatctccatgtgcacaaattttttcaccactgccaactcatccagtctggctctaaggaggtgcccggagaactgataaaatatcttaagtgcctgcatgcgatggaaatccaggtgatgatacaattccttcccgtgattctcatgcaattatttagagtgctgaccaacatgacacacgaggatgacgtgccaatcaactgcactatggtgctgttgcacattgtgagcaaatgtcatgaggaaggactggactcatatttgagatctttcattaaatactcgtttcgacccgagaagccttccgctcctcaggcccaactgattcatgagactcttgctaccaccatgattgctattctcaagcagtcagcagacttcctctccataaataaactgctgaagtattcctggtttttttttgaaatcatagctaaaagcatggccacatatctgctggaagaaaacaagattaaactgcctcggggacagaggtttcccgagacctaccaccacgttcttcatagtctgctgctcgctatcattccgcacgtaacaatccgctatgcagagataccagatgaaagcagaaacgttaattacagtttggcctcctttctgaaaaggtgtttgacgctgatggatagaggatttatttttaatctgatcaacgattacatctccgggtttagcccaaaagatcccaaggtacttgccgagtataagttcgagtttcttcagactatctgtaaccacgaacattacatccccttaaacctgcccatggccttcgcgaaacccaaactgcagcgtgtgcaggacagcaatttggagtattctctctccgatgagtattgtaaacaccacttcttggtcggacttctcctgagagagacatcgatagctctgcaagataactatgagatccgatatacagccatctctgttatcaagaatctgcttatcaaacacgcgtttgatacacgatatcagcataaaaaccaacaggcgaagatagcgcagctttacctgccctttgtcggtctgctgctcgagaatattcagcggctcgcgggacgagatacgctgtactcttgcgcagccatgccgaatagtgcctccagggacgaatttccatgtggatttacgagtcccgcaaacagaggtagcctttccactgacaaggatacggcctatggttccttccagaacggccacggcattaagagggaagattcacgcggttctcttatccccgaaggcgctacggggttcccggaccaagggaatacaggggaaaatactcgtcagagcagcacacgctcttcagtctcccagtacaacagactggatcagtacgagatcaggtctctgctgatgtgttatctatatattgtgaaaatgatttcggaggacaccttgttaacttattggaacaaagtgtcaccacaggagctaataaatattttaatccttctggaggtttgcctgtttcacttccggtatatggggaaacgcaacattgctcgcgtgcacgacgcatggctgtctaaacactttggaatcgaccgcaaatcacagacaatgcctgccctgcgcaatcggagtggggtaatgcaggccagactccaacacctgtctagcctcgaaagttccttcacccttaaccattccagtaccacaacggaggccgacatctttcatcaggctcttctcgaagggaacactgcaaccgaagtatccctcaccgtgcttgataccatctcctttttcacacagtgcttcaagacccagttactcaataacgacggtcacaatccactcatgaaaaaggtttttgacatccatcttgcctttctcaaaaacgggcaatctgaagtctctctaaagcacgttttcgcgtcccttcgggctttcatttccaaatttcctagtgccttcttcaaagggagagttaatatgtgtgcggcattctgttacgaagtgcttaaatgttgcacgtccaagatcagctctactagaaatgaggcttctgccctgctgtatttgctgatgcgcaataactttgagtacactaagcgcaagacctttctccggactcacctacaaattatcattgccgtgtcccagctgatcgctgatgtggcactgtccggtggatccaggttccaggagtcactgttcatcatcaataattttgctaattcggacaggcctatgaaggctactgcttttcctgctgaggtgaaggatctgactaagcgaatccgaacagtattaatggctaccgcccagatgaaagagcatgagaaagatcccgagatgctcatcgacctgcaatactctctggctaaaagttatgcctccacaccagagctgagaaaaacatggcttgactctatggccaaaattcacgtcaagaacggcgatttcagtgaggccgctatgtgctatgtacacgtcgcagcactggttgccgagtttctgcacagaaagaagttgtttccaaacggctgttctgcattcaagaaaattactcccaatattgacgaggaaggagctatgaaagaggatgccggaatgatggacgttcattattccgaagaggtgttgctggaacttcttgagcaatgcgtggacggcctctggaaggcggaacgatatgaaatcattagcgagatctccaagctgatcgtgcccatctatgagaaacgccgagagtttgagaaattgactcaggtctataggacactccacggcgcttatactaagatcttagaggtcatgcatactaaaaagaggctactgggtacttttttccgggtggccttttacggtcaatcatttttcgaggaagaggatgggaaggagtatatctacaaggagccgaaactgacgggccttagtgaaatttctctcaggctggtgaaactctatggagagaagttcggcaccgagaacgtgaaaataattcaggatagcgacaaggtgaacgcaaaggagctggaccccaagtacgctcacattcaggtgacttacgtgaaaccatattttgacgacaaggagctgaccgagcgcaaaaccgaattcgagaggaatcataacatctcccggtttgtgttcgaagccccatatactctgtcaggcaaaaaacagggatgcattgaagagcagtgtaagcggaggacaatcctcacaacatccaactcgtttccatatgtcaaaaagcgcattcccattaattgtgaacaacagattaatcttaagcctattgatgtcgcaactgatgaaatcaaagacaagactgcggagctgcagaaattgtgtagttccacggacgtggacatgatccaattgcagcttaagctgcagggctgtgtgagcgttcaagttaacgcaggccctctcgcatatgcccgagcattcctgaatgacagccaggccagcaagtatccccctaagaaagtgagtgaactgaaggacatgttccgaaagtttattcaggcctgttcaatagctctcgagttgaatgagaggctcatcaaagaagaccaggtcgagtatcacgagggcctgaagtcgaatttccgcgatatggtcaaagagctatcggacattattcatgagcagattctgcaagaagatacaatgcactccccttggatgagtaatacactccatgtcttttgcgccattagtggcacctccagcgatcgcggttatggaagccccagatatgcggaagtgtaa

SEQ ID NO: 239384 - DNA, 6625 bp, Artificial Sequence
  derived and/or modified sequence
gcagtgagtccacccgcccgccgaggtccgcccgcccgccgagacccgcccgccgccgctgccatggccgaagtgcgcaaattcaccaaacggctcagcaagcctggcacggcggctgagctccggcagagcgtgtctgaggccgtgcggggctccgtggtgctggaaaaggccaaagttgttgagcccctggactatgagaatgttattgcccaaagaaaaacccagatttacagcgaccccctccgagatctgcttatgttcccaatggaagatatatctatctcggtgataggtcgtcaacgcagaacggtgcagtctactgtaccagaagatgctgaaaagagggcccagagtttatttgttaaagagtgtattaaaacctatagcacagattggcacgtggtaaactacaagtatgaggacttctctggggactttcgaatgttgccatgtaaatctttgagaccagaaaagattcctaatcatgtatttgagatagatgaagactgtgagaaagatgaggactcatcttctttatgttctcagaagggtggtgtgataaaacaaggctggttgcataaagcaaatgtaaatagtaccatcacagtaaccatgaaggtattcaagagacgatatttttacttgacccaacttcctgacggttcatatattctcaattcctataaagatgagaaaaattcaaaagaatcgaaaggttgcatctacttggacgcctgcattgatgttgttcagtgccccaaaatgcgccgtcatgcttttgaactcaagatgttagataaatatagccattatctggctgctgaaactgagcaggaaatggaggaatggttgataactttgaaaaagattattcagatcaacaccgacagtttagttcaagaaaaaaaggagacggtagaaacagcacaagatgatgaaactagcagccaaggaaaagccgagaacatcatggcaagtttggaaaggagcatgcatccggaactgatgaagtatggaagagaaactgaacaactaaacaaactcagtagaggagatggaagacagaatctcttttcttttgattcagaagttcagaggttggacttttcaggaattgaacctgatataaagccatttgaagaaaaatgcaataaacgtttcctggtgaattgccatgatttaactttcaatatcttgggccaaattggagacaatgcaaaaggaccacccacaaatgttgagcccttttttatcaatcttgccttatttgatgtaaagaacaattgtaagatttcagcagactttcatgtagacctgaatcccccatctgtccgtgaaatgctgtggggctcttcaacccaactggccagtgacggtagcccaaagggctcttcacccgaatcttacattcatggaattgccgaatctcagttacgctacatacaacagggaattttctcagtgacgaatccacatcctgaaatttttctagttgccagaattgaaaaggtactacagggaaacattacacactgtgcagaaccctatatcaaaaattctgatccagtaaagacggcccagaaggtgcacaggacagctaaacaagtgtgtagccgccttggacaatacagaatgcccttcgcttgggctgccagacccattttcaaagatactcaaggctctcttgatctggatgggagattttctcctctgtataaacaagacagtagcaagctttcaagtgaagacattctcaagttgctctcagaatataagaagccagaaaagaccaaactgcagattattcctgggcagctaaacatcacagtagaatgtgttcctgtggatttatcaaattgtattacttcttcatatgtgcccttgaagccttttgaaaagaattgccaaaatattactgtggaggttgaagagtttgttccagaaatgacaaaatattgttatccatttactatttacaaaaaccatctgtatgtatatcccctgcaattaaaatacgatagccagaaaacatttgccaaggcaaggaacattgcagtctgtgtggaattccgggattcagatgaaagtgacgctagtgccctaaagtgtatttatggaaaacctgcagggtctgtttttaccacaaatgcttatgctgttgtctcgcatcacaaccaaaatccagagttctatgatgagattaaaattgagcttcccattcacctacatcaaaaacatcatttgcttttcactttttatcatgtaagttgtgaaattaacacaaagggaacaaccaaaaagcaagacacagttgaaactccagttgggtttgcctgggtacctttgctgaaagatggtagaatcatcacatttgagcagcagctgccagtttccgccaatcttcccccaggctacttgaatctgaatgatgcagaatcaagaaggcaatgtaacgtggatattaaatgggtagatggtgcaaagcctttgttgaagattaaaagccacttagaatctaccatttacactcaagatctgcatgtgcacaaattcttccatcattgccagctgattcagtcaggctcgaaagaagttccaggggagctcattaaatatttaaagtgtttgcatgccatggagatccaagtcatgatacagtttctacctgtaattcttatgcaactcttccgagttctcacaaatatgacccatgaagatgacgttcctatcaactgcaccatggttctcttacatattgtatcaaagtgccatgaagaaggcttggatagttatctaagatcattcataaagtatagcttccgacctgaaaaaccgagtgctcctcaggcccagctgatacatgaaaccctggctactacgatgatagcaatattgaaacagtctgcagattttttatcaataaacaaattgctaaagtactcatggtttttctttgaaataattgcaaagtcaatggccacatacttgttggaagagaataagattaagcttccccgaggccagagatttcccgagacatatcatcatgtcttacattcactgcttcttgcaataattccccatgtgactattcggtatgcggagattcccgatgagtccagaaatgtgaactatagtttggctagcttcctgaagcgctgtttgacactaatggatagaggatttattttcaatttaataaatgactatatatctggattcagccccaaagatcctaaggttctggctgaatacaagtttgaatttctgcaaacaatttgcaatcacgaacattacattcctctgaacttgccaatggcatttgcaaaacctaaactgcagcgggttcaagattcaaatcttgaatacagtttatcagatgagtattgcaagcatcacttcttggttggtctacttctgagggaaacttccattgctcttcaggacaattatgagatcagatatacagctatctctgttataaagaatcttttgataaaacatgcatttgacacaagataccagcacaagaaccaacaagccaaaatagcacaattgtacctcccctttgttggactacttttggaaaatatacagcgattagcaggtcgagataccttgtattcttgtgcagccatgcctaattctgcatccagagatgagtttccatgtggctttacttcacctgccaatagagggagtctgagcactgacaaagacaccgcttatgggtcttttcaaaatggacatggaattaagagagaagattcaagaggttccctcatcccagaaggagcaacaggatttccagatcagggcaacactggtgaaaatacccgacagagttctacaaggagtagtgtatcccagtataaccgcctggatcagtatgaaatcagaagcctcctgatgtgctacctgtatatagtaaaaatgatttcagaagatactctcttaacttactggaataaagtatcacctcaggagctcataaacattcttatacttttagaagtatgcttgtttcactttagatatatggggaaaagaaacatagcaagggtgcatgatgcctggctgtcaaaacacttcggaatagaccgaaaatcgcaaaccatgcctgctcttcgaaacagatcaggagtaatgcaggcccggcttcagcatcttagtagcctagaaagttcatttacacttaatcacagttctacaacaactgaagcagacattttccaccaggcacttcttgaaggcaatacagctactgaagtttccctaacagtactagacaccatatcatttttcactcagtgcttcaagacccaacttttaaataatgatggccataacccattaatgaaaaaagtgtttgatatacatcttgcttttcttaaaaatggacaatctgaagtgtcgctgaaacatgtatttgcctcactgagagctttcatcagtaagtttccttcagcatttttcaaaggaagagtaaacatgtgtgctgcattttgctatgaggttttaaagtgctgcacatcgaagattagctcaaccaggaatgaagcatctgcacttttgtatcttttgatgagaaacaactttgagtataccaaaaggaaaacctttttgaggacacatctacagataataattgctgtaagccaactgatagctgatgtagcactaagcggaggatcaagatttcaggagtctttattcattatcaataattttgcaaatagtgacagacctatgaaggcaactgcctttcccgcagaagtcaaagacttgaccaagagaatccgcactgttcttatggccactgcccaaatgaaggagcatgagaaagaccctgaaatgctaattgatctccagtatagcttagccaagtcctatgcaagcaccccagagctcaggaaaacctggcttgatagcatggccaagattcatgtaaaaaatggagatttttcagaggctgcgatgtgttatgtccatgtagcagctctagttgcagagtttcttcatcgaaaaaaattatttcctaacggatgttcagcgttcaagaaaattactcccaatatagatgaagaaggagcaatgaaagaagatgctgggatgatggatgtccattatagtgaagaggtcttgctggagttgctagaacaatgtgtggatggcttatggaaggcagaacgttatgaaataatttctgagatttccaagttgatcgttccaatttatgagaaacgtcgtgagtttgagaaacttactcaagtttatagaactcttcatggagcttacacaaaaattctggaagttatgcatacaaaaaagagacttttaggcactttcttcagagttgccttttatggccaatctttttttgaagaagaagatggaaaggagtacatctataaagaaccaaagctcactggcctctcagaaatttccttgagacttgttaaactttatggtgaaaagtttggtacggagaatgtcaaaataattcaggattcagacaaggtaaatgccaaagagcttgatccaaaatatgctcatatacaagttacttatgtgaagccttactttgatgacaaagaactcacagaaaggaagaccgagtttgaaagaaatcataatatcagcagatttgtttttgaggccccttacactttatcaggcaaaaaacagggctgtatagaagaacagtgcaaacgccgtacaatcttgacaacttcaaactcgtttccttacgtgaagaagaggattcctattaactgtgaacagcagattaatttaaaaccaattgatgttgccactgatgaaataaaagataaaactgcagagctgcaaaagctttgctcctctactgacgtggacatgattcagctccaacttaaattgcagggctgtgtttctgtgcaggtcaatgctggtccattagcatatgcaagagctttcttaaatgacagccaagctagcaagtatccacctaagaaagtgagtgagttgaaagacatgtttaggaaatttatacaagcatgcagcattgcacttgaactaaatgagcggctaattaaagaagatcaagttgagtaccatgaagggctaaagtcaaatttcagagacatggtaaaagaattatctgacattatccatgagcagatattacaagaagacacaatgcattctccctggatgagcaacacattacatgtattttgtgcaattagtggtacatcaagtgaccgaggttatggttccccaagatacgctgaagtgtgaggaaatgcagatgtacgtgacaatgagactgacctttctcaggaatatttggagctgtgcaaatgttaaaatttaaagatttgatatacatggagtgtttcttctcgacaccaaaattttcatgtgttccaacagggtgcttacatatttgtaaataagcaacttgaaagtgcctggaaaattgcaccactgtgcttggtttgtacttttttaggtaaatctatatgctgaaaagtagagctcaaaaacagtagttcaatttgcttaattattgcttaaaataatggtactatgtaaaattgtataatggaatacaataaaaggtaaaacttatttgtaa

SEQ ID NO: 239385 - DNA, 6222 bp, Artificial Sequence
  derived and/or modified sequence
atggccgaggtgagaaagttcaccaagagactgagcaagcccggcaccgccgccgagctgagacagagcgtgagcgaggccgtgagaggcagcgtggtgctggagaaggccaaggtggtggagcccctggactacgagaacgtgatcgcccagagaaagacccagatctacagcgaccccctgagagacctgctgatgttccccatggaggacatcagcatcagcgtgatcggcagacagagaagaaccgtgcagagcaccgtgcccgaggacgccgagaagagagcccagagcctgttcgtgaaggagtgcatcaagacctacagcaccgactggcacgtggtgaactacaagtacgaggacttcagcggcgacttcagaatgctgccctgcaagagcctgagacccgagaagatccccaaccacgtgttcgagatcgacgaggactgcgagaaggacgaggacagcagcagcctgtgcagccagaagggcggcgtgatcaagcagggctggctgcacaaggccaacgtgaacagcaccatcaccgtgaccatgaaggtgttcaagagaagatacttctacctgacccagctgcccgacggcagctacatcctgaacagctacaaggacgagaagaacagcaaggagagcaagggctgcatctacctggacgcctgcatcgacgtggtgcagtgccccaagatgagaagacacgccttcgagctgaagatgctggacaagtacagccactacctggccgccgagaccgagcaggagatggaggagtggctgatcaccctgaagaagatcatccagatcaacaccgacagcctggtgcaggagaagaaggagaccgtggagaccgcccaggacgacgagaccagcagccagggcaaggccgagaacatcatggccagcctggagagaagcatgcaccccgagctgatgaagtacggcagagagaccgagcagctgaacaagctgagcagaggcgacggcagacagaacctgttcagcttcgacagcgaggtgcagagactggacttcagcggcatcgagcccgacatcaagcccttcgaggagaagtgcaacaagagattcctggtgaactgccacgacctgaccttcaacatcctgggccagatcggcgacaacgccaagggcccccccaccaacgtggagcccttcttcatcaacctggccctgttcgacgtgaagaacaactgcaagatcagcgccgacttccacgtggacctgaacccccccagcgtgagagagatgctgtggggcagcagcacccagctggccagcgacggcagccccaagggcagcagccccgagagctacatccacggcatcgccgagagccagctgagatacatccagcagggcatcttcagcgtgaccaacccccaccccgagatcttcctggtggccagaatcgagaaggtgctgcagggcaacatcacccactgcgccgagccctacatcaagaacagcgaccccgtgaagaccgcccagaaggtgcacagaaccgccaagcaggtgtgcagcagactgggccagtacagaatgcccttcgcctgggccgccagacccatcttcaaggacacccagggcagcctggacctggacggcagattcagccccctgtacaagcaggacagcagcaagctgagcagcgaggacatcctgaagctgctgagcgagtacaagaagcccgagaagaccaagctgcagatcatccccggccagctgaacatcaccgtggagtgcgtgcccgtggacctgagcaactgcatcaccagcagctacgtgcccctgaagcccttcgagaagaactgccagaacatcaccgtggaggtggaggagttcgtgcccgagatgaccaagtactgctaccccttcaccatctacaagaaccacctgtacgtgtaccccctgcagctgaagtacgacagccagaagaccttcgccaaggccagaaacatcgccgtgtgcgtggagttcagagacagcgacgagagcgacgccagcgccctgaagtgcatctacggcaagcccgccggcagcgtgttcaccaccaacgcctacgccgtggtgagccaccacaaccagaaccccgagttctacgacgagatcaagatcgagctgcccatccacctgcaccagaagcaccacctgctgttcaccttctaccacgtgagctgcgagatcaacaccaagggcaccaccaagaagcaggacaccgtggagacccccgtgggcttcgcctgggtgcccctgctgaaggacggcagaatcatcaccttcgagcagcagctgcccgtgagcgccaacctgccccccggctacctgaacctgaacgacgccgagagcagaagacagtgcaacgtggacatcaagtgggtggacggcgccaagcccctgctgaagatcaagagccacctggagagcaccatctacacccaggacctgcacgtgcacaagttcttccaccactgccagctgatccagagcggcagcaaggaggtgcccggcgagctgatcaagtacctgaagtgcctgcacgccatggagatccaggtgatgatccagttcctgcccgtgatcctgatgcagctgttcagagtgctgaccaacatgacccacgaggacgacgtgcccatcaactgcaccatggtgctgctgcacatcgtgagcaagtgccacgaggagggcctggacagctacctgagaagcttcatcaagtacagcttcagacccgagaagcccagcgccccccaggcccagctgatccacgagaccctggccaccaccatgatcgccatcctgaagcagagcgccgacttcctgagcatcaacaagctgctgaagtacagctggttcttcttcgagatcatcgccaagagcatggccacctacctgctggaggagaacaagatcaagctgcccagaggccagagattccccgagacctaccaccacgtgctgcacagcctgctgctggccatcatcccccacgtgaccatcagatacgccgagatccccgacgagagcagaaacgtgaactacagcctggccagcttcctgaagagatgcctgaccctgatggacagaggcttcatcttcaacctgatcaacgactacatcagcggcttcagccccaaggaccccaaggtgctggccgagtacaagttcgagttcctgcagaccatctgcaaccacgagcactacatccccctgaacctgcccatggccttcgccaagcccaagctgcagagagtgcaggacagcaacctggagtacagcctgagcgacgagtactgcaagcaccacttcctggtgggcctgctgctgagagagaccagcatcgccctgcaggacaactacgagatcagatacaccgccatcagcgtgatcaagaacctgctgatcaagcacgccttcgacaccagataccagcacaagaaccagcaggccaagatcgcccagctgtacctgcccttcgtgggcctgctgctggagaacatccagagactggccggcagagacaccctgtacagctgcgccgccatgcccaacagcgccagcagagacgagttcccctgcggcttcaccagccccgccaacagaggcagcctgagcaccgacaaggacaccgcctacggcagcttccagaacggccacggcatcaagagagaggacagcagaggcagcctgatccccgagggcgccaccggcttccccgaccagggcaacaccggcgagaacaccagacagagcagcaccagaagcagcgtgagccagtacaacagactggaccagtacgagatcagaagcctgctgatgtgctacctgtacatcgtgaagatgatcagcgaggacaccctgctgacctactggaacaaggtgagcccccaggagctgatcaacatcctgatcctgctggaggtgtgcctgttccacttcagatacatgggcaagagaaacatcgccagagtgcacgacgcctggctgagcaagcacttcggcatcgacagaaagagccagaccatgcccgccctgagaaacagaagcggcgtgatgcaggccagactgcagcacctgagcagcctggagagcagcttcaccctgaaccacagcagcaccaccaccgaggccgacatcttccaccaggccctgctggagggcaacaccgccaccgaggtgagcctgaccgtgctggacaccatcagcttcttcacccagtgcttcaagacccagctgctgaacaacgacggccacaaccccctgatgaagaaggtgttcgacatccacctggccttcctgaagaacggccagagcgaggtgagcctgaagcacgtgttcgccagcctgagagccttcatcagcaagttccccagcgccttcttcaagggcagagtgaacatgtgcgccgccttctgctacgaggtgctgaagtgctgcaccagcaagatcagcagcaccagaaacgaggccagcgccctgctgtacctgctgatgagaaacaacttcgagtacaccaagagaaagaccttcctgagaacccacctgcagatcatcatcgccgtgagccagctgatcgccgacgtggccctgagcggcggcagcagattccaggagagcctgttcatcatcaacaacttcgccaacagcgacagacccatgaaggccaccgccttccccgccgaggtgaaggacctgaccaagagaatcagaaccgtgctgatggccaccgcccagatgaaggagcacgagaaggaccccgagatgctgatcgacctgcagtacagcctggccaagagctacgccagcacccccgagctgagaaagacctggctggacagcatggccaagatccacgtgaagaacggcgacttcagcgaggccgccatgtgctacgtgcacgtggccgccctggtggccgagttcctgcacagaaagaagctgttccccaacggctgcagcgccttcaagaagatcacccccaacatcgacgaggagggcgccatgaaggaggacgccggcatgatggacgtgcactacagcgaggaggtgctgctggagctgctggagcagtgcgtggacggcctgtggaaggccgagagatacgagatcatcagcgagatcagcaagctgatcgtgcccatctacgagaagagaagagagttcgagaagctgacccaggtgtacagaaccctgcacggcgcctacaccaagatcctggaggtgatgcacaccaagaagagactgctgggcaccttcttcagagtggccttctacggccagagcttcttcgaggaggaggacggcaaggagtacatctacaaggagcccaagctgaccggcctgagcgagatcagcctgagactggtgaagctgtacggcgagaagttcggcaccgagaacgtgaagatcatccaggacagcgacaaggtgaacgccaaggagctggaccccaagtacgcccacatccaggtgacctacgtgaagccctacttcgacgacaaggagctgaccgagagaaagaccgagttcgagagaaaccacaacatcagcagattcgtgttcgaggccccctacaccctgagcggcaagaagcagggctgcatcgaggagcagtgcaagagaagaaccatcctgaccaccagcaacagcttcccctacgtgaagaagagaatccccatcaactgcgagcagcagatcaacctgaagcccatcgacgtggccaccgacgagatcaaggacaagaccgccgagctgcagaagctgtgcagcagcaccgacgtggacatgatccagctgcagctgaagctgcagggctgcgtgagcgtgcaggtgaacgccggccccctggcctacgccagagccttcctgaacgacagccaggccagcaagtacccccccaagaaggtgagcgagctgaaggacatgttcagaaagttcatccaggcctgcagcatcgccctggagctgaacgagagactgatcaaggaggaccaggtggagtaccacgagggcctgaagagcaacttcagagacatggtgaaggagctgagcgacatcatccacgagcagatcctgcaggaggacaccatgcacagcccctggatgagcaacaccctgcacgtgttctgcgccatcagcggcaccagcagcgacagaggctacggcagccccagatacgccgaggtgtag

SEQ ID NO: 239386 - DNA, 465 bp, Artificial Sequence
  derived and/or modified sequence
atggagcccagcaagaccttcatgagaaacctgcccatcacccccggctacagcggcttcgtgcccttcctgagctgccagggcatgagcaaggaggacgacatgaaccactgcgtgaagaccttccaggagaagacccagagatacaaggagcagctgagagagctgtgctgcgccgtggccaccgcccccaagctgaagcccgtgaacagcgaggagaccgtgctgcaggccctgcaccagtacaacctgcagtaccaccccctgatcctggagtgcaagtacgtgaagaagcccctgcaggagccccccatccccggctgggccggctacctgcccagagccaaggtgaccgagttcggctgcggcaccagatacaccgtgatggccaagaactgctacaaggacttcctggagatcaccgagagagccaagaaggcccacctgaagccctacgaggagtag

SEQ ID NO: 239387 - DNA, 465 bp, Artificial Sequence
  derived and/or modified sequence
atggaaccgagtaagacattcatgcggaatctgcctatcaccccgggctactcaggctttgtgccttttttgagttgtcagggcatgtcaaaggaagacgacatgaatcattgtgtcaaaacattccaggaaaagacgcaacgctacaaagagcagttacgcgaactctgctgcgcagtggctaccgcgcctaaactgaaaccagtgaactccgaggagacagtcctgcaagcccttcatcagtacaaccttcagtatcacccactgattctcgagtgtaaatacgtaaaaaaacctctgcaggaaccccctataccaggctgggccggatacctgcccagggccaaagtcacagaattcggatgcggtacccgatacaccgttatggcgaaaaactgctacaaagattttctggagatcactgagagagccaagaaagcccatctgaagccttacgaagaatag

SEQ ID NO: 239388 - DNA, 465 bp, Artificial Sequence
  derived and/or modified sequence
atggagcccagcaagaccttcatgaggaacctgcccatcaccccaggctacagcggctttgtgcccttcctgagctgccagggcatgagcaaggaggatgacatgaaccactgtgtgaagaccttccaggagaagacccagcgctacaaggagcagctgcgggagctgtgctgtgctgtggccacagcccccaagctgaagcctgtgaacagcgaggagaccgtgctgcaggccctgcaccagtacaacctgcagtaccaccccctcatcctggagtgcaagtatgtgaagaagcccctgcaggagccccccatccctggctgggccggctacctgccccgggccaaggtgacagaatttggctgcggcacccgctacacagtgatggccaagaactgctacaaggacttcctggagatcacagagcgggccaagaaggcccacctgaagccctatgaggagtag

SEQ ID NO: 239389 - DNA, 465 bp, Artificial Sequence
  derived and/or modified sequence
atggagcccagcaagaccttcatgcggaacctgcccatcacccccggctattctggcttcgtgcctttcttaagctgtcagggcatgtctaaggaagacgatatgaatcactgcgtgaagactttccaggagaagacacaaagatacaaagaacagcttagagagctgtgctgtgccgtggctactgcccccaaactgaagcccgtgaactccgaggagaccgtgctacaggccctccaccagtacaacctgcaatatcacccccttattctggaatgcaaatacgtgaagaagccgctgcaggaaccgccaatccctggatgggctggctatcttcctagggctaaggtgacagaatttggatgtggaacccgctacactgtcatggctaagaattgctacaaagatttccttgaaattactgagcgggccaagaaggcccatctgaagccgtatgaagaatag

SEQ ID NO: 239390 - DNA, 465 bp, Artificial Sequence
  derived and/or modified sequence
atggaacccagtaaaacctttatgagaaacctccccataaccccaggttattctggctttgtcccattcctttcctgtcagggtatgagtaaggaagacgatatgaaccactgcgttaaaaccttccaggagaagacccaacggtacaaggagcagcttcgtgagttgtgctgtgcagtagcaacagcccctaagcttaaaccagtgaattctgaagaaaccgttctgcaggcacttcaccaatacaatctgcagtaccatcctttgatcctggagtgtaagtatgtaaagaagccgcttcaggagccacccattcccggttgggctgggtatttacctcgggctaaggtcaccgagtttgggtgcggcactcggtatacagtgatggcgaaaaattgctataaagactttttagagatcaccgagagagccaagaaggcccatctgaagccttatgaggagtag

SEQ ID NO: 239391 - protein, 317 aa, Artificial Sequence
  derived and/or modified sequence
MNRGGGSPSAAANYLLCTNCRKVLRKDKRIRVSQPLTRGPSAFIPEKEVVQANTVDERTNFLVEEYSTSGRLDNITQVMSLHTQYLESFLRSQFYMLRMDGPLPLPYRHYIAIMAAARHQCSYLINMHVDEFLKTGGIAEWLNGLEYVPQRLKNLNEINKLLAHRPWLITKEHIQKLVKTGENNWSLPELVHAVVLLAHYHALASFVFGSGINPERDPEISNGFRLISVNNFCVCDLANDNNIENASLSGSNFGIVDSLSELEALMERMKRLQEEREDEEASQEEMSTRFEKEKKESLFVVSGDTFHSFPHSGLLKY

SEQ ID NO: 239392 - protein, 321 aa, Artificial Sequence
  derived and/or modified sequence
MNRGGGSPSAAANYLLCTNCRKVLRKDKRIRVSQPLTRGPSAFIPEKEVVQANTVDERTNFLVEEYSTSGRLDNITQVMSLHTQYLESFLRSQFYMLRMDGPLPLPYRHYIAIMAAARHQCSYLINMHVDEFLKTGGIAEWLNGLEYVPQRLKNLNEINKLLAHRPWLITKEHIQKLVKTGENNWSLPELVHAVVLLAHYHALASFVFGSGINPERDPEISNGFRLISVNNFCVCDLANDNNIENASLSGSNFGIVDSLSELEALMERMKRLQEEREDEEASQEEMSTRFEKEKKESLFVVSGDTFHSFPHSGAFLHFFAF

SEQ ID NO: 239393 - protein, 492 aa, Artificial Sequence
  derived and/or modified sequence
MNRGGGSPSAAANYLLCTNCRKVLRKDKRIRVSQPLTRGPSAFIPEKEVVQANTVDERTNFLVEEYSTSGRLDNITQVMSLHTQYLESFLRSQFYMLRMDGPLPLPYRHYIAIMAAARHQCSYLINMHVDEFLKTGGIAEWLNGLEYVPQRLKNLNEINKLLAHRPWLITKEHIQKLVKTGENNWSLPELVHAVVLLAHYHALASFVFGSGINPERDPEISNGFRLISVNNFCVCDLANDNNIENASLSGSNFGIVDSLSELEALMERMKRLQEEREDEEASQEEMSTRFEKEKKESLFVVSGDTFHSFPHSDFEDDMIITSDVSRYIEDPGFGYEDFARRGEEHLPTFRAQDYTWENHGFSLVNRLYSDIGHLLDEKFRMVYNLTYNTMATHEDVDTTMLRRALFNYVHCMFGIRYDDYDYGEVNQLLERSLKVYIKTVTCYPERTTKRMYDSYWRQFKHSEKVHVNLLLMEARMQAELLYALRAITRHLT

SEQ ID NO: 239394 - DNA, 954 bp, Artificial Sequence
  derived and/or modified sequence
atgaacagaggcggtggatctcccagcgcggcagccaactacctcctctgtactaattgtaggaaggtgctccgtaaggataagcggatccgagtgagtcagccattgacacgagggcccagcgcatttattcctgagaaagaggtggttcaggctaacactgtggacgaacggaccaattttttagtggaggagtactcaacttccgggcgactggacaatatcacccaggtgatgtctttacacacacaatacctggaatccttcttgagatctcagttttacatgttacgcatggatggtcctctgccactgccctataggcattacatcgcgatcatggcagcagctcggcaccagtgtagttacctgatcaacatgcacgtggatgagtttttaaagaccgggggcatagccgaatggctgaatggcctggagtacgtgcctcagaggctgaaaaacctcaatgagataaacaagctgcttgctcaccgtccttggttgatcacaaaagaacacatccagaagctggtgaagactggagaaaacaattggtctctccctgagttagtgcatgcagtcgtccttctggcccactaccacgcgctggcatcatttgtgttcggaagtggtattaacccagagcgtgatccagagatttccaacggctttaggttgatttctgtcaataatttttgcgtgtgtgacctcgctaatgacaacaatattgaaaacgccagtctgagtggttcaaatttcggcatcgtggactctctatccgagctggaggccctaatggagcggatgaagaggttgcaggaggaaagagaagacgaagaggcctcccaagaagagatgtcaactcgctttgaaaaggagaagaaggagtcgctgtttgtcgtttccggggacacttttcattcatttccacatagcggactactgaaatactag

SEQ ID NO: 239395 - DNA, 966 bp, Artificial Sequence
  derived and/or modified sequence
atgaatcggggcggaggctccccaagcgcggccgctaattatctgctatgcacgaactgcagaaaggtgctaaggaaagacaagcgaataagagtcagtcagccacttacacggggacccagtgcctttatccctgagaaggaggttgtccaggccaatactgtcgacgaaaggactaattttcttgttgaggaatatagtaccagcggacgtctcgacaatatcacacaagtgatgtccctacacacacaatatctggagtcattcctacgtagccagttctatatgctccgcatggacggcccgctacctctcccctaccgtcactacatcgcgatcatggccgcggctagacaccagtgttcttacctgatcaacatgcatgttgacgagtttctcaagactggaggtatagccgaatggcttaatgggttagaatacgtcccacagcggctcaagaatctgaacgagattaataagttacttgcacatagaccttggctaattacgaaggagcacatccagaaactggtgaagactggagaaaataactggagtcttccggaattggtccacgcagtggttctgctcgctcactatcatgcccttgcttcttttgtgttcgggtcaggtatcaatcccgaacgcgatccagaaatctctaatgggttccgtctgatcagcgtgaacaacttctgcgtgtgtgatctggctaatgacaacaatatcgagaatgccagtcttagtggaagcaacttcggaatagtggacagcttgtctgaactcgaagccctaatggagaggatgaaacgtctgcaggaagaacgggaggacgaagaggccagtcaggaggagatgtctacacggttcgagaaggaaaaaaaggaatccctgtttgtagtctccggagatacctttcactcatttccacacagcggagcgtttcttcatttcttcgcgttctag

SEQ ID NO: 239396 - DNA, 1479 bp, Artificial Sequence
  derived and/or modified sequence
atgaaccgtgggggcggctcacccagcgcagccgctaattacctgctgtgcacaaactgccggaaagttcttagaaaggacaagcgcattagggtgagccaacctctgacccgcgggcccagcgccttcattccagaaaaggaagtggttcaggcgaatacagtcgacgaacgtaccaactttctcgtggaagagtactctacgtcaggacggctcgacaacattactcaggtgatgtctctacatacacagtacctggaaagctttctgcgatcccaattctacatgttaagaatggacggaccgcttcctctgccttaccggcattacattgctatcatggccgcggcaaggcatcaatgtagttatctgatcaatatgcatgttgatgagtttctcaagaccggcggaatagccgaatggctcaacgggctggaatatgtacctcagcggctgaagaacttgaatgagatcaataagctgctggcacatagaccctggctgattacgaaggagcacatacagaagctggtaaaaactggcgagaacaactggtcactgcctgagctcgttcatgcagtggttctcctggctcactatcacgcgcttgcctcattcgtgttcggttctggcataaacccagaaagagatcccgaaatatccaatggattccggctgataagtgtcaataatttttgtgtttgcgatctggctaatgacaataacattgagaatgcttcactgtccgggagtaacttcgggattgtggatagtctgagtgagcttgaggcactgatggagaggatgaaaagactccaggaggagcgggaggacgaagaggcaagtcaagaagagatgagtacaagattcgagaaagagaagaaggagagcctgttcgttgtcagtggtgatacgtttcacagttttccccactcagatttcgaggacgacatgatcattacaagcgatgtttcacgatatatagaagatcctggcttcgggtacgaagactttgcaaggcgaggggaggagcacctccccacatttcgggcccaggattatacctgggagaaccacggatttagcctcgtgaacagactgtactccgacatcgggcatctgctggacgaaaagtttcgaatggtctataacctcacttataatactatggcgacgcatgaggacgtagacacaactatgctgcggagagccctgttcaactatgtgcactgcatgttcggcattagatacgatgattatgattacggggaagtgaaccagctgctagaaaggtctctcaaggtatatatcaaaacagtcacctgctatccagaaagaacgactaaacgaatgtatgattcatattggagacaattcaaacattcagaaaaggtccatgtgaacttacttttgatggaggccagaatgcaggccgagttattatacgccctccgtgctattacgcgtcatttaacgtag

SEQ ID NO: 239397 - DNA, 954 bp, Artificial Sequence
  derived and/or modified sequence
atgaacagaggaggcggcagccccagcgctgctgccaactacctgctgtgcaccaactgcaggaaggtgctgaggaaggacaagaggatccgggtgtcccagcccctgacccggggccccagcgccttcatccctgagaaggaggtggtgcaggccaacacagtggatgagaggaccaacttcctggtggaggagtacagcaccagcggccgcctggacaacatcacccaggtgatgagcctgcacacccagtacctggagagcttcctgcggagccagttctacatgctgaggatggatggccccctgcccctgccctaccgccactacatcgccatcatggccgccgcccggcaccagtgcagctacctgatcaacatgcacgtggatgagttcctgaagacaggaggcattgctgagtggctgaatggcctggagtatgtgccccagaggctgaagaacctgaatgagatcaacaagctgctggcccaccggccctggctgatcaccaaggagcacatccagaagctggtgaagacaggagagaacaactggagcctgcctgagctggtgcatgctgtggtgctgctggcccactaccacgccctggccagctttgtgtttggcagcggcatcaaccctgagcgggaccctgagatcagcaatggcttccgcctcatctctgtgaacaacttctgtgtgtgtgacctggccaatgacaacaacattgaaaatgccagcctgagcggcagcaactttggaattgtggacagcctgtctgagctggaggccctgatggagaggatgaagaggctgcaggaggagagagaagatgaggaggccagccaggaggagatgagcaccaggtttgagaaggagaagaaggagagcctgtttgtggtgtctggggacaccttccacagcttcccccacagcggcctgctgaagtactag

SEQ ID NO: 239398 - DNA, 966 bp, Artificial Sequence
  derived and/or modified sequence
atgaacagaggaggcggcagccccagcgctgctgccaactacctgctgtgcaccaactgcaggaaggtgctgaggaaggacaagaggatccgggtgtcccagcccctgacccggggccccagcgccttcatccctgagaaggaggtggtgcaggccaacacagtggatgagaggaccaacttcctggtggaggagtacagcaccagcggccgcctggacaacatcacccaggtgatgagcctgcacacccagtacctggagagcttcctgcggagccagttctacatgctgaggatggatggccccctgcccctgccctaccgccactacatcgccatcatggccgccgcccggcaccagtgcagctacctgatcaacatgcacgtggatgagttcctgaagacaggaggcattgctgagtggctgaatggcctggagtatgtgccccagaggctgaagaacctgaatgagatcaacaagctgctggcccaccggccctggctgatcaccaaggagcacatccagaagctggtgaagacaggagagaacaactggagcctgcctgagctggtgcatgctgtggtgctgctggcccactaccacgccctggccagctttgtgtttggcagcggcatcaaccctgagcgggaccctgagatcagcaatggcttccgcctcatctctgtgaacaacttctgtgtgtgtgacctggccaatgacaacaacattgaaaatgccagcctgagcggcagcaactttggaattgtggacagcctgtctgagctggaggccctgatggagaggatgaagaggctgcaggaggagagagaagatgaggaggccagccaggaggagatgagcaccaggtttgagaaggagaagaaggagagcctgtttgtggtgtctggggacaccttccacagcttcccccacagcggggccttcctgcacttctttgccttctag

SEQ ID NO: 239399 - DNA, 1479 bp, Artificial Sequence
  derived and/or modified sequence
atgaacagaggaggcggcagccccagcgctgctgccaactacctgctgtgcaccaactgcaggaaggtgctgaggaaggacaagaggatccgggtgtcccagcccctgacccggggccccagcgccttcatccctgagaaggaggtggtgcaggccaacacagtggatgagaggaccaacttcctggtggaggagtacagcaccagcggccgcctggacaacatcacccaggtgatgagcctgcacacccagtacctggagagcttcctgcggagccagttctacatgctgaggatggatggccccctgcccctgccctaccgccactacatcgccatcatggccgccgcccggcaccagtgcagctacctgatcaacatgcacgtggatgagttcctgaagacaggaggcattgctgagtggctgaatggcctggagtatgtgccccagaggctgaagaacctgaatgagatcaacaagctgctggcccaccggccctggctgatcaccaaggagcacatccagaagctggtgaagacaggagagaacaactggagcctgcctgagctggtgcatgctgtggtgctgctggcccactaccacgccctggccagctttgtgtttggcagcggcatcaaccctgagcgggaccctgagatcagcaatggcttccgcctcatctctgtgaacaacttctgtgtgtgtgacctggccaatgacaacaacattgaaaatgccagcctgagcggcagcaactttggaattgtggacagcctgtctgagctggaggccctgatggagaggatgaagaggctgcaggaggagagagaagatgaggaggccagccaggaggagatgagcaccaggtttgagaaggagaagaaggagagcctgtttgtggtgtctggggacaccttccacagcttcccccacagcgactttgaagatgacatgatcatcaccagtgatgtgagccgctacattgaagatcctggcttcggctatgaggactttgcccggcggggggaggagcacctgcccaccttccgggcccaggactacacctgggagaaccacggcttcagcctggtgaacagactctacagcgacatcggccacctgctggatgagaagttcaggatggtgtacaacctgacctacaacaccatggccacccatgaagatgtggacaccaccatgctgcggcgggccctcttcaactacgtgcactgcatgtttggcatccgctatgatgattatgactatggagaggtgaaccagctgctggagaggagcctgaaggtgtacatcaagacagtgacctgctacccagagaggaccaccaagaggatgtatgacagctactggaggcagttcaagcacagcgagaaggtgcacgtgaacctgctgctgatggaggccaggatgcaggccgagctgctgtatgccctgcgggccatcaccaggcacctgacctag

SEQ ID NO: 239400 - DNA, 954 bp, Artificial Sequence
  derived and/or modified sequence
atgaaccggggcggcggcagccccagcgccgccgccaactacctgctgtgtacaaattgccgaaaagtacttaggaaggataaacggatcagggtgagccaaccacttaccagaggaccctctgccttcattcccgagaaggaagtcgtccaggccaacacagtcgacgagaggaccaatttccttgtggaggaatatagtactagcgggcggctggataacatcactcaagtgatgagtctgcacactcagtacttagagagttttcttaggtcgcagttctacatgctgagaatggacggccccctgcccttaccctataggcactacatcgctataatggcggctgccaggcaccagtgctcgtacttaataaatatgcatgtggatgagttcctgaagaccggcggcatcgccgagtggctgaatggactggaatatgtgccacagcgactgaagaacctgaacgagatcaacaagctgttagcacacagaccatggttaatcaccaaggagcacattcaaaagttggtgaagacaggcgaaaataactggtctctccccgagcttgtccacgcagtcgttttgctagcccactaccatgcattggcctcatttgtgtttggttcaggtatcaaccctgagcgggacccggagatctcaaacggattcagattgatcagtgtcaacaacttttgtgtctgtgacctggccaatgacaacaatatagagaacgcctcccttagcggatccaattttggaatcgtggattccctgtcagagctggaagctcttatggagagaatgaagaggcttcaggaggagagggaggatgaggaggcatctcaagaagagatgtccacccgatttgaaaaggaaaagaaggagtctctgttcgtcgtcagcggcgatacttttcattccttcccgcactctggactgctgaagtattag

SEQ ID NO: 239401 - DNA, 966 bp, Artificial Sequence
  derived and/or modified sequence
atgaaccggggcggcggcagccccagcgccgccgccaactacctgctgtgcacaaattgtcgtaaagtgctccggaaagataaacggatcagggtgagtcagcccctcacacggggcccatccgccttcattccagagaaagaagtcgtacaggcaaataccgtggatgaaaggacaaacttcttggtggaggagtactcaacctctggtcggctagataatattacccaggttatgagtctacatacccagtacctcgagtcgtttctgcgttcacagttctacatgctgcgaatggatggtccactgccgcttccctaccgtcattatatcgctattatggcggccgctaggcatcagtgctcttacctgatcaatatgcatgtcgatgagttcctgaagacaggaggaatcgcagaatggttgaacggcctcgagtacgtgcctcagaggctgaagaatttgaatgagatcaacaaactgttggcccaccgcccttggttgattacaaaggagcacattcagaagctggtcaagaccggagaaaacaactggagcctcccggagcttgtgcacgctgtcgtcttgctggcgcactatcatgccttggcatcatttgttttcgggtccggtataaatcctgagagagatcctgaaatatcaaacggctttaggctaatttctgttaataatttctgcgtctgcgatcttgccaacgataacaatatagagaacgcctcactcagcgggagtaatttcgggattgtggacagcttgtcagagcttgaggctctgatggagcgtatgaagaggctgcaggaggagagggaagatgaggaagcatcccaagaggagatgtccacacgcttcgaaaaggagaagaaggaaagtttgttcgttgtgagcggcgacacattccactcgtttccccattccggggcgtttctccacttctttgccttctag

SEQ ID NO: 239402 - DNA, 1479 bp, Artificial Sequence
  derived and/or modified sequence
atgaaccggggcggcggcagccccagcgccgccgccaactacctgctgtgcaccaactgtcggaaagttctgcggaaggacaagagaatccgagtgagccagccgctaacccgggggcctagcgcgttcattcccgaaaaagaggtcgtgcaggctaacactgtagacgaacggactaactttctggttgaagagtactctacaagtggcaggctggataatatcacacaggtcatgagcctccacacgcaatacttggaatcatttctgcgaagccagttttacatgcttagaatggatggcccactgcccttaccctaccgccactacattgcaatcatggccgcggcacgtcatcagtgtagctacctgattaacatgcatgtggatgagttcttgaagactgggggtattgctgaatggctcaatggcctcgaatacgtcccccaaagacttaagaatctaaatgaaattaacaaactcctggcgcatcgaccctggttaatcaccaaagagcacatacagaaattggtaaagaccggggaaaataactggagtctgcctgagctggtgcacgccgttgttctcctggcccattatcacgccctggcctcattcgtcttcggatcaggcatcaatcccgagagagaccccgagatttccaacggtttccgtctgatctccgtgaacaacttctgtgtgtgcgacttggcaaatgacaataacatagagaatgcatctttaagtggtagcaacttcggaatcgtagactccttgtccgagctcgaggcgcttatggaaaggatgaagcggcttcaggaagaaagggaagatgaggaggccagccaggaggagatgtccaccagatttgagaaggagaagaaagagtcgctgttcgtggtcagcggtgatacttttcactcttttcctcatagtgactttgaagatgacatgattatcacaagcgacgtgtctagatacattgaggaccccggctttggctacgaagacttcgccagaagaggtgaggaacatctgccaacctttagggctcaggactacacttgggaaaatcacggcttttccctggtgaataggctgtattcggacatcggccatttgttggatgaaaaattccggatggtatacaatctcacctacaacacgatggccacacatgaagacgtggataccacaatgcttcggagagctctcttcaactatgtgcactgtatgttcggaatccgatacgacgattacgactatggggaagtcaaccagctcctcgagcggtccttaaaagtctacatcaaaacggtgacctgttatcctgagcggacgacgaaacggatgtatgattcttactggcggcaattcaagcatagcgagaaagtgcacgtgaacctgctgctgatggaggcaagaatgcaagcagaactcctgtacgcgttgcgggcaattacccgccacctgacttag

SEQ ID NO: 239403 - DNA, 1176 bp, Artificial Sequence
  derived and/or modified sequence
agccgccgccgtctccgccgtcgctggggcagctgccgcggtggtcgcctctggcagtgccgctagctttcaggcagtcgcctctcctcccgacatcccgccttgaggaggctgaggcggaatcgcggctggcggcggggggacggaccggccctgcagtggccgcagtgacagcccggacccggccctccgcccgctctcgcctcggcgcccgcagccacgatgaaccggggcggcggcagcccgtcggccgccgccaactacctgctctgtaccaactgccggaaagtgctgcggaaggataaaagaatcagagtgtctcaacccttgacaagaggaccaagtgcctttattccagagaaggaagttgtccaagcaaacacagtggatgaacgtactaactttcttgtggaagaatactctacatccggtcgtctggacaacatcacacaggtcatgagtttacacactcagtacctggagtctttcttgcggagccagttttacatgttgcgcatggatggtccccttcctctaccatacaggcactatattgcaataatggctgcagctagacatcagtgttcttacttaataaacatgcatgtggatgaatttttaaagactggaggtattgctgagtggttgaatggtttggaatatgtgccacaaagactgaaaaatcttaatgaaattaataagctgctagcacatcgaccttggctgatcacaaaagagcacattcagaaacttgtcaaaactggagaaaataattggtctctgcctgaactggtacatgctgtggtcctcctggcacattatcatgctttggcaagctttgtttttggtagtggtatcaatccagagagagatccagaaatctccaatggattcaggctaatatcagtcaacaatttctgcgtttgtgatcttgctaatgacaacaacatagagaatgcatctctttcaggcagcaactttgggattgtggattctctaagtgagctagaggccttaatggaaaggatgaaaagacttcaagaagaaagggaagatgaagaggcgtctcaagaagaaatgagcactcgttttgaaaaggagaagaaagaaagtctttttgtggtctctggagatacttttcattcatttcctcattcaggtcttttgaaatattaa

SEQ ID NO: 239404 - DNA, 1408 bp, Artificial Sequence
  derived and/or modified sequence
cgcggtggtcgcctctggcagtgccgctagctttcaggcagtcgcctctcctcccgacatcccgccttgaggaggctgaggcggaatcgcggctggcggcggggggacggaccggccctgcagtggccgcagtgacagcccggacccggccctccgcccgctctcgcctcggcgcccgcagccacgatgaaccggggcggcggcagcccgtcggccgccgccaactacctgctctgtaccaactgccggaaagtgctgcggaaggataaaagaatcagagtgtctcaacccttgacaagaggaccaagtgcctttattccagagaaggaagttgtccaagcaaacacagtggatgaacgtactaactttcttgtggaagaatactctacatccggtcgtctggacaacatcacacaggtcatgagtttacacactcagtacctggagtctttcttgcggagccagttttacatgttgcgcatggatggtccccttcctctaccatacaggcactatattgcaataatggctgcagctagacatcagtgttcttacttaataaacatgcatgtggatgaatttttaaagactggaggtattgctgagtggttgaatggtttggaatatgtgccacaaagactgaaaaatcttaatgaaattaataagctgctagcacatcgaccttggctgatcacaaaagagcacattcagaaacttgtcaaaactggagaaaataattggtctctgcctgaactggtacatgctgtggtcctcctggcacattatcatgctttggcaagctttgtttttggtagtggtatcaatccagagagagatccagaaatctccaatggattcaggctaatatcagtcaacaatttctgcgtttgtgatcttgctaatgacaacaacatagagaatgcatctctttcaggcagcaactttgggattgtggattctctaagtgagctagaggccttaatggaaaggatgaaaagacttcaagaagaaagggaagatgaagaggcgtctcaagaagaaatgagcactcgttttgaaaaggagaagaaagaaagtctttttgtggtctctggagatacttttcattcatttcctcattcaggtgcttttttgcacttttttgccttttagttgttcttagaaccctgacagggcaacttcagtgttttccatgtggatatgtaaaaatgattctgctaccatctttctcttatttagttctcctcttctatcttaccctcatgctattgctttccctcaggctggttcatccttgaatgtatttcagattgagttgagagaaactttcagctttgtagttcatactctatcctggataaaatgttatttaaagcagatcagttacttataaagttagatagacata

SEQ ID NO: 239405 - DNA, 9531 bp, Artificial Sequence
  derived and/or modified sequence
gaggcgctgcggcggcggtggtggcggtggcagcggtggcggctgctcgtcctagcctggcgggggcgggggtctggaagatgggggcgggtggaacaacgggccggtgaggagcagccgccgccgtctccgccgtcgctggggcagctgccgcggtggtcgcctctggcagtgccgctagctttcaggcagtcgcctctcctcccgacatcccgccttgaggaggctgaggcggaatcgcggctggcggcggggggacggaccggccctgcagtggccgcagtgacagcccggacccggccctccgcccgctctcgcctcggcgcccgcagccacgatgaaccggggcggcggcagcccgtcggccgccgccaactacctgctctgtaccaactgccggaaagtgctgcggaaggataaaagaatcagagtgtctcaacccttgacaagaggaccaagtgcctttattccagagaaggaagttgtccaagcaaacacagtggatgaacgtactaactttcttgtggaagaatactctacatccggtcgtctggacaacatcacacaggtcatgagtttacacactcagtacctggagtctttcttgcggagccagttttacatgttgcgcatggatggtccccttcctctaccatacaggcactatattgcaataatggctgcagctagacatcagtgttcttacttaataaacatgcatgtggatgaatttttaaagactggaggtattgctgagtggttgaatggtttggaatatgtgccacaaagactgaaaaatcttaatgaaattaataagctgctagcacatcgaccttggctgatcacaaaagagcacattcagaaacttgtcaaaactggagaaaataattggtctctgcctgaactggtacatgctgtggtcctcctggcacattatcatgctttggcaagctttgtttttggtagtggtatcaatccagagagagatccagaaatctccaatggattcaggctaatatcagtcaacaatttctgcgtttgtgatcttgctaatgacaacaacatagagaatgcatctctttcaggcagcaactttgggattgtggattctctaagtgagctagaggccttaatggaaaggatgaaaagacttcaagaagaaagggaagatgaagaggcgtctcaagaagaaatgagcactcgttttgaaaaggagaagaaagaaagtctttttgtggtctctggagatacttttcattcatttcctcattcagattttgaggatgacatgattataacatctgatgtctctcgatatattgaagaccctggttttgggtatgaagactttgccagacgaggagaagagcatttgccaacattccgagctcaggactatacctgggaaaatcatgggttctccctggtgaacagactttattctgacattggacatcttcttgatgaaaagtttcggatggtctacaatctcacatataacactatggccacccatgaggatgttgacacaaccatgctgcgcagagctttatttaactatgttcactgtatgtttggaatcaggtatgatgactatgattatggagaagttaatcaattacttgaaagaagcctgaaggtttacattaagacagtgacctgctatcctgagagaactacaaaacgcatgtatgatagttactggcggcagttcaaacactcagaaaaagttcatgtcaatctacttttaatggaagcacgaatgcaagctgaacttctttatgctcttcgtgccataactcggcatttgacctgaagtatcacccaaggaaaatgtcatacatgtgtaaagacctttcacataagataaacattgaagctatttgtgatatagcatcaaaaattattcagttctctagtgtcaaagtttagccgtttgtttttttttttttgttttttgcggctgtaatgtgcaatgatgtgttttattttccttgatgcttaacattactaacaattgcaaaaataatactgaggagcactactttgcattgtttgtagttggagttttggatactgatcataaatcatgaatctggcgtattaatgcttaacttcagcgcctttgggttgtgtgtatgtgtattttttctccccccaccccgcccttttttttttaagaataaggacaagtgcttacaatctgctcaagcaattgtttttcagatattggaattcagcaaagagtgacctctctggccattctaaaactttaatgttgtgtcctaaatctggtggaggaaaagcatgcgctgttgaaccaagctgctcactggacacatatttgtgtccccaggagattatttgtcaggcactgttttttatttgtttgtttgttcatttattgttgttttactgctattggcgataacatgaaatgtgatacagctattgcccataatttaatgtgaaattaatcatgatgaattctatagcatgctactgaaatgccaaattcagctattttctttctcttctaaaatggaagtttcagttttccatatcagatgtatataagtggaattataacacaatcctatcactgacagtaatcctcagtcaccttaaataatcagtgctcacagtgctgcttacagttcatttagttggcacatataaacctgtacccacacaagactgaccaaaaattttctttgcacatttttcctttctcatagtttttttctatatttcgttaagcaaaggaaggttaatatgcctatttttcctgttaggcttttagaaattattttccatgacttttgttcttataataggttagacagtttatttttcaaaggtaaaaattgtgtttctatgcattaatgtgattgaactacaaaaacagagtgcaatatgttcaaaaaatactcaactaaactttccccctgtcatatcactgcaaaagtgtccttttaaacagagccataaagaaatttttttcaaatttctttattgcacaggcttttttcagttttacctttctgggattgaacaatgttcctttcataatgccaaagcattcccttccccagaaaaatctccttggacaactggtttaaaaacgttattaagtcataggggaggaataagcggccaaaaagtcacatttttgcattggtttacgttgcttgattagactatcttcagagagcacattatgtgtttatagctttaatttgtattatgtcaatgaaccagtgaagtgcctaaagagatgcttacaactatccagtaggacacaactgcactgctttttaaacactttttggttagttaagggtgacttgaattgtacacatacatgctaatttttgaaaacttatccatttttcatagtaaataatatagataaaattttctgttagagttcccgcaaatatttcattttagacttacttgtgatataagatttaacttttcttttgtgaaagaatcgtgaactagtgtttcatgaaatcattttcctcttccatttatcatcctcctctggtacaatatattgggttgctttcttttagattttgttccagataggaaaacaaatatgactgtatacttattaacataaggtagttctgcatttttggattccaggatcctgtttgaaatcttccatgtgaggaaaaaattactaatatttttaaagacagggtggtttatttaaagagattattcagagaacttgtgccatatctcgtctgttttattgcatatgccatatgttaacttttattcaatattacattatgtagatatgtaatacaaagaaaatatttaggagaatggcaaaacacaaatggcaacataaatgtccatttgacttacctaacttcacaactttcaagttgaggatgtcatttattcttgaatttgtttttttactagatgctttcaattaatagccctatatttttgtgcaggcgaactgtataacaggataaaaaatgatttgtatgtattgaaaaggaggagaaattctcacagaacaccatatgagctttagaccaaaaggggaaacaaggtttaagtaactaaaatggccacttagtttgtgtttatttttttccctggaaatgtaagtagttggagtttaggctatggaaatattagtgcctttaatagatctctttccttgcaaagtttctttttagctcagcattgatctatcttatcaataggaaaataagttgacttggaactataaacaaaaacaacaccatatatttatgaacctcagtgaaccagcctagaaaaattgacttctgcaggtgctaaagcacctactaatacgcagcatgcacagcatttcaggttgtgaataccattttacaacgagtttgctgttaactctctttatccaatgcaaacttgaaattctgatgcggttttccagggtggtattttttcagagtattgaatttactatttagtaatttatagtatagctttttatattaaaatgtgatatttttaaaagagatatctggttcaattggtataatgacgtgattatgcaatatgctgatctacaccttgcgctcacattgtgccaaacttaaatgtgcaagtgtacgtgagaaaagcacatgtgaatgtgaattctttaattctttgcttattatgttaaaattagtcttcatagtccactgatgtgtatgcttgaataatgtctatttactttggaatttcaagatttccagcttcaatggtaatttataatttctcagatcaccttaagaaatattgagatactctcccacctgaaaataatctgttctttaacccacctgactatgggagtagccaggcaggtgcctcactggcttcttcagacgaggcttcctcaggtggatatatgactattaggggaaaagaggcttttgagacagcttattacctccttcccctttttgaactaagtacattgtctcagtcccagtatgaatttgtcccatttggggtatttttaaaataaaagatggctaacatggaatctggggcatagccttggcctttaattatggttgtaagcccaaataatggcagagaaacacagggctgtttttacaacagaaaactcaatataagttttatataagaatcctataaaatttgaaccagagctcctatttagttgttataatgtctcctaaagatcttaaatgcttctaaaagctaattattattccagagcaactttttccttttcccccttataaagtttttttttaaatccaaaatcttagatttctgtgccacagcaaaataaaatgatcaacaattaaagatctgtacttaaaatagtacaccatttttagtggagggagggtgcatgcctatatgatggtaagattcttttgaactctaaggacaattcctcatggaaaaaataaatttcagtgcatattataaaaatgatttgcactgtgttagcaaaataaggtgttttaggttgtattttaaagacaattctaaatcatttctctggaaagcaagaccttaaattcttctctttaatagaactgcttttatgcaaagagatggtcttaacatggactaaacagtacataacaataatgtttgttatgtaaatagtatatcacatttgcttagtagcacaattcaacagcaggctgaaagtcgtggctcctctgctcagattgagttttaagttacctaatttatgtaatcagaatctattctaggtggccgtcaacgtaaactgtgtttccctattatatccctctggagactgagaatcaaattaaatagtctttcttcaaagcagtactgtaacatgaatgtatttatctcagtcaacagaacttatatgcccactgtatgtggagcttatttcaatgctaatttggcttagttagcagacctagaatctgcccaggtgagacctagaacaaaaatagctggggtgaaatggataagagaggtagaggtatatgtcaaggcagagccctatgaggaaggaagagttttcaaagaatatgaggaacatagtgctgagagtgtggctgccttcagcaccgtacacctaatctagagaaaatatttcccatgtgggaggtcctgtctgcattcagtccacccttttctgcctgcttcttcctccaagtgcctcaacctctacatgctcactctcctccccttccctcagcccatcttggtctaagcagctttcacaatccaaaccaaacatcaccagccacccgctgataagtcaccagcatttactttcctgagttactttttctccattcattgagactatggattcatcccaactccttctaaatccctcaaccatccagctatattttggctaacctttgccctagacactctaccagatgttaatgcagtatcaagtgtaaattgtgtcaccctattctgttctacccttttccctgctgccgaaatatcttgctctcctctacctcatccccaaagagcctataaattcagagtatccaaccttttcatggattcactcactgttgttcagtaatacaacttccatattttaaataaatcataaaagatttttgccttctatcaaagtaggaaactttatatttatacatgatacagaaattgaactatttctatcgttcagaatttagcatataacaggattttaaagtgattgaattgccatcctaacttggatttgtattaggttatgaatgaatactgttgttagtccaagctatttgaatgtaaagttaaaattctccagcaatccagaatgacttgtaacccttcagtggaatgggaaatttctggtatgcaaatagggtggtgttccagacatttgttttattggtggtgtttgggccttgaaacacatttctaatagaatgacatatggcaaagggtatttagatggtcctatgggatcacagaagcccatatgatttaaaatatagataaaataacacaaaattgggtacataagggtttaaccaggctttcctgggttagactaagcctctaacctctgttcctatcctgttcttatgggaggaaaaaaaatgttccatgggatgaaaagaaaatgcattgactttgtagtctttattctcctagccgcacttcgggtatatccagaaggaagaggaaatgcaaagaggaagaagatgtaatagttcttctctccagctaggtgcacttgaggttgttcataaatgtaaaattatgtcaggtttctaacatgggacactgcacacagttgtctgacctgatgaaccatcccatttgaaagtatagattattattatttcttgtagtatttggttgttttccatctcattcatgaacaactcaacctgatagtagtatccaataaatgcctttcagggctcaggaatgaattgacatcctagttaagaaatgagacttaataatggagactgaatgaggcggtttgtattaaattatatgccatgaagtgttcattttagctttaacctaattatgactgtaccaccatgaagtacagaatgaaaaattatatatatgggggggaaacagaatgaatatctgattcttttgaatgcttgtggaaatctttgagatcgtgcagggcataccacaaaatagcctttagaacagatacccaattttacagttcataggacaacatcaaacattagtaagtctaaataagatgaatagaatttttgttatgtaaattttgctagaacagtctattttcttgcacccctcaagttaacctcttaaaaaaatgaatgtataatttctaccgaaagaatatcagagagaatctctctggcctatagtgttaaaatattgttcacaaatcctgattagttaagtgcatacattatgaaacttacagaataaaacttattatacatctctttcttaaattaatatctttacacattttcaactggctccccaagtctgataaggaaggattaaaagaaaaaagaaatgtattagttgggtggccaaggagtttcctttgtaatgttgagagacttccgctttctgaatttcgctggttctctaaggtaaaagagttaaatagtacccttgttcaccaaggaaagtgatccaaactatatatctagtgcagatatttcctttgcattatttagtcttctctggagagaaaatacagtttccccttcctctttctcttcacatttactcttttcaacccaaaataagagacatagaaagcaaaccacagccagtttggcatcttctcagtgctactagtataggcacatacacatacacagtctcagcaaggttataaagaaccctgtcaggtccacttgcaacatggccttgctacttggattagctcctttaagcctgaaaataactttcctggtcatggaagaactggacgcatcttttaacttatgaaatagaagttgaacttgaaaactctttttaaaaaatcctggttttgcaggacagctacataatgaatgtatatattaagactgtagctgaattgcacatgaaatcagattgccaacttcttgactttcaatgttagacatttatccttaagttgtgagcgatatatgtagcatgctgtgaaatgtctgttatagctctttaattcatcagtattaatacagaattatcatttgcgtttcttggtactttttattcaatgtaatcagaagctgtgatgttttgcctttgtagtcctgtgctttgttactgtaattttttttttttttttacgaagcacgtgactggactaatgtaaggcagatgacgtgatctttaagactgctatatatatcagtctcttactctataaggttttaaattagaataagcttttatcaaatagataattgatgcaatttaggattcacgcaagtttcagtgtcaaatggcggtcttatagtttcaattctgaaaatagcaaacttaataaacagccactttaaacttgttctggcaaaccagaccctgctgtagatatagtctaaggtagttaaccatataagccttttcaactcttaatgccctccacatgaatcagcagttaagaaggttctagaacccatgaaagcttttgtatgtattactaggttttgtttttcttatgtttgctgattttacagttctgactaaagctgacctaaatggatcagtttatgtgtaatattctagtgctttaatgactctttttttctttggagggagggtaacattatttggacagatgcagaaggaactgttagtgagtcaagacaaacacatctgaaataaaggaactgtgtattaacatgttaacaattcataactgcactttttatgacattttgaaaatctatttataggtacagaacaatgggttttgttaaactgtatcacatttatacttgcagaaatttatttcattgttattagtaggaattttattggttcaataaaattggcaaaactgaacaccaa

SEQ ID NO: 239406 - DNA, 954 bp, Artificial Sequence
  derived and/or modified sequence
atgaatcggggaggcggtagcccttcggccgctgccaattacctgctgtgtacaaactgcaggaaggtgcttcggaaggacaagaggattagagtctcccagcctttgacaaggggaccctcagcctttatccctgaaaaggaagtcgtgcaggcaaatacagtggacgaaaggacaaacttcttggtcgaggagtattccacctcaggcaggctcgacaacattacccaggtgatgtctctgcacacacaatatctggaatcctttctgagatcccagttctacatgctgcggatggatgggccactgcctttgccgtatagacattacatcgctatcatggcagcagctcggcatcagtgcagttacctcataaacatgcacgtagacgaattcctcaagaccgggggtatagctgagtggcttaacgggctggaatatgtaccccagagactgaaaaacctgaacgaaattaacaagttactggctcaccggccatggctcatcacaaaagagcacattcagaagctggtgaaaactggcgaaaacaactggtcccttcctgagcttgtccatgcggtagtgctcctggctcactatcatgccctcgcatcatttgtctttggaagtggaattaatccagagagagaccccgaaatctctaatggttttagacttattagtgtgaacaacttttgtgtttgcgacttagcaaacgataacaatattgagaacgcctcgctttcaggatccaattttggcatagtggattccctgtccgagctggaagccctgatggaacgaatgaagcgcctgcaggaagagcgagaagacgaagaggcatctcaggaggagatgagcacacggttcgagaaggagaaaaaggaatcattgtttgtggtgagcggagacacattccatagtttcccacacagtggtcttctcaaatattag

SEQ ID NO: 239407 - DNA, 966 bp, Artificial Sequence
  derived and/or modified sequence
atgaacaggggcggtggttcaccttctgccgcagcaaattatcttctctgcacaaactgccgcaaggtcctgagaaaagacaagcgtattagggtcagccaaccattgaccaggggcccatccgcattcatacccgagaaggaggtcgtccaggctaacaccgtggatgagagaaccaatttcctggtcgaagagtactccacaagcggtcgactagacaacatcacgcaggttatgagcctccacactcagtacctggagtctttcctgcgctcccagttctatatgctgcggatggatgggccactgccattaccctatagacattacattgcgattatggccgcagccagacaccagtgctcctatctgattaacatgcacgtggacgaatttctaaagactggcggaattgctgagtggctcaatggcctcgaatatgtgcctcaacgtctgaagaacctaaatgagataaataaactcctggcccaccgcccttggctgattaccaaagagcacatccagaaattagtgaagacgggagaaaacaattggtctcttccagaactggtccacgcagtcgttctccttgcccactatcatgctttagcatcattcgtgtttgggagcggaataaaccccgagcgtgatcccgaaataagtaatgggttccgactaatttcagtgaacaacttctgcgtctgcgacctggccaatgacaacaacattgagaacgccagcctctcgggtagcaattttggtatcgttgacagcctgtccgaactagaggcactcatggagcggatgaagcgtctgcaagaagagagggaggacgaagaagcctcccaggaagagatgtctactagattcgaaaaggagaagaaggagtctctgtttgttgtaagtggggatacattccacagctttccccactctggcgcttttctgcactttttcgctttttag

SEQ ID NO: 239408 - DNA, 1479 bp, Artificial Sequence
  derived and/or modified sequence
atgaatcggggaggaggttcaccctctgcggcagcaaactacctgctgtgtactaattgcaggaaagtcctccgcaaagataaaaggattagggtgagtcagccccttacccgagggccttctgcatttatccctgaaaaggaagttgtgcaggccaacacagtggatgagaggaccaattttctagtcgaagagtacagtacatctggaagattagacaacattacccaggtgatgtctctacatacccaatacctggaatcctttctaagatcccagttctacatgttgaggatggacggccctctcccgctgccctatcggcactatatcgcaatcatggcagccgcacgacatcagtgcagttacttaatcaatatgcatgtcgacgaatttctaaaaacgggcggaattgctgaatggctgaacgggctcgaatacgtcccacagcggttaaaaaacctgaacgagataaacaagcttcttgctcaccggccatggctcataaccaaagaacacattcagaaactcgtcaaaactggagaaaacaactggagcctccccgagctcgtccatgccgtagtactcttggcccactaccatgcgctggcatcatttgtgttcggcagcggcatcaatccagaacgggaccctgagatttccaacgggttccggctgatttctgtgaataatttctgtgtgtgcgatctggcaaatgacaataatatagaaaacgcctctctttctgggagtaacttcgggatcgtcgactctttgagtgagctggaggcactgatggagcgaatgaaacggcttcaggaggaacgggaggatgaagaggccagccaggaggagatgagcacacggtttgaaaaggaaaaaaaggagagtctgttcgtggtgtccggcgacaccttccattcatttcctcactcagatttcgaggacgatatgataataacttcggacgtatcccgttatattgaggaccccggatttggttacgaagattttgctcggcgtggcgaagagcacttaccaacgtttagagcgcaggattacacatgggaaaaccatggcttctccttagtcaacaggctgtattcggatatcggccacctactggacgagaagtttcgcatggtttataatctgacttataataccatggccacgcatgaggacgtcgacactacaatgctgagacgcgctctgttcaactatgtacattgtatgttcggtatccgttatgatgattatgactacggagaagttaaccaattgctggaacgcagcttgaaagtctatattaaaactgtgacctgctacccagagagaaccacaaagcggatgtacgactcctattggcgacaatttaaacattctgagaaggtgcatgtgaacctgttactgatggaggccagaatgcaggctgagctcctgtatgcccttcgcgctattacacggcacctgacctag

SEQ ID NO: 239409 - DNA, 954 bp, Artificial Sequence
  derived and/or modified sequence
atgaacagaggcggcggcagccccagcgccgccgccaactacctgctgtgcaccaactgcagaaaggtgctgagaaaggacaagagaatcagagtgagccagcccctgaccagaggccccagcgccttcatccccgagaaggaggtggtgcaggccaacaccgtggacgagagaaccaacttcctggtggaggagtacagcaccagcggcagactggacaacatcacccaggtgatgagcctgcacacccagtacctggagagcttcctgagaagccagttctacatgctgagaatggacggccccctgcccctgccctacagacactacatcgccatcatggccgccgccagacaccagtgcagctacctgatcaacatgcacgtggacgagttcctgaagaccggcggcatcgccgagtggctgaacggcctggagtacgtgccccagagactgaagaacctgaacgagatcaacaagctgctggcccacagaccctggctgatcaccaaggagcacatccagaagctggtgaagaccggcgagaacaactggagcctgcccgagctggtgcacgccgtggtgctgctggcccactaccacgccctggccagcttcgtgttcggcagcggcatcaaccccgagagagaccccgagatcagcaacggcttcagactgatcagcgtgaacaacttctgcgtgtgcgacctggccaacgacaacaacatcgagaacgccagcctgagcggcagcaacttcggcatcgtggacagcctgagcgagctggaggccctgatggagagaatgaagagactgcaggaggagagagaggacgaggaggccagccaggaggagatgagcaccagattcgagaaggagaagaaggagagcctgttcgtggtgagcggcgacaccttccacagcttcccccacagcggcctgctgaagtactag

SEQ ID NO: 239410 - DNA, 966 bp, Artificial Sequence
  derived and/or modified sequence
atgaacagaggcggcggcagccccagcgccgccgccaactacctgctgtgcaccaactgcagaaaggtgctgagaaaggacaagagaatcagagtgagccagcccctgaccagaggccccagcgccttcatccccgagaaggaggtggtgcaggccaacaccgtggacgagagaaccaacttcctggtggaggagtacagcaccagcggcagactggacaacatcacccaggtgatgagcctgcacacccagtacctggagagcttcctgagaagccagttctacatgctgagaatggacggccccctgcccctgccctacagacactacatcgccatcatggccgccgccagacaccagtgcagctacctgatcaacatgcacgtggacgagttcctgaagaccggcggcatcgccgagtggctgaacggcctggagtacgtgccccagagactgaagaacctgaacgagatcaacaagctgctggcccacagaccctggctgatcaccaaggagcacatccagaagctggtgaagaccggcgagaacaactggagcctgcccgagctggtgcacgccgtggtgctgctggcccactaccacgccctggccagcttcgtgttcggcagcggcatcaaccccgagagagaccccgagatcagcaacggcttcagactgatcagcgtgaacaacttctgcgtgtgcgacctggccaacgacaacaacatcgagaacgccagcctgagcggcagcaacttcggcatcgtggacagcctgagcgagctggaggccctgatggagagaatgaagagactgcaggaggagagagaggacgaggaggccagccaggaggagatgagcaccagattcgagaaggagaagaaggagagcctgttcgtggtgagcggcgacaccttccacagcttcccccacagcggcgccttcctgcacttcttcgccttctag

SEQ ID NO: 239411 - DNA, 1479 bp, Artificial Sequence
  derived and/or modified sequence
atgaacagaggcggcggcagccccagcgccgccgccaactacctgctgtgcaccaactgcagaaaggtgctgagaaaggacaagagaatcagagtgagccagcccctgaccagaggccccagcgccttcatccccgagaaggaggtggtgcaggccaacaccgtggacgagagaaccaacttcctggtggaggagtacagcaccagcggcagactggacaacatcacccaggtgatgagcctgcacacccagtacctggagagcttcctgagaagccagttctacatgctgagaatggacggccccctgcccctgccctacagacactacatcgccatcatggccgccgccagacaccagtgcagctacctgatcaacatgcacgtggacgagttcctgaagaccggcggcatcgccgagtggctgaacggcctggagtacgtgccccagagactgaagaacctgaacgagatcaacaagctgctggcccacagaccctggctgatcaccaaggagcacatccagaagctggtgaagaccggcgagaacaactggagcctgcccgagctggtgcacgccgtggtgctgctggcccactaccacgccctggccagcttcgtgttcggcagcggcatcaaccccgagagagaccccgagatcagcaacggcttcagactgatcagcgtgaacaacttctgcgtgtgcgacctggccaacgacaacaacatcgagaacgccagcctgagcggcagcaacttcggcatcgtggacagcctgagcgagctggaggccctgatggagagaatgaagagactgcaggaggagagagaggacgaggaggccagccaggaggagatgagcaccagattcgagaaggagaagaaggagagcctgttcgtggtgagcggcgacaccttccacagcttcccccacagcgacttcgaggacgacatgatcatcaccagcgacgtgagcagatacatcgaggaccccggcttcggctacgaggacttcgccagaagaggcgaggagcacctgcccaccttcagagcccaggactacacctgggagaaccacggcttcagcctggtgaacagactgtacagcgacatcggccacctgctggacgagaagttcagaatggtgtacaacctgacctacaacaccatggccacccacgaggacgtggacaccaccatgctgagaagagccctgttcaactacgtgcactgcatgttcggcatcagatacgacgactacgactacggcgaggtgaaccagctgctggagagaagcctgaaggtgtacatcaagaccgtgacctgctaccccgagagaaccaccaagagaatgtacgacagctactggagacagttcaagcacagcgagaaggtgcacgtgaacctgctgctgatggaggccagaatgcaggccgagctgctgtacgccctgagagccatcaccagacacctgacctag

SEQ ID NO: 239412 - protein, 4753 aa, Artificial Sequence
  derived and/or modified sequence
MVPEERRVGLSSDETSSDSLKSWHSICVLDSKEQPLACQQKQRQFVKPVTESEQPTVLELLLAELRTLFSAVLQDSSPAAWRYLHAVLGLLPPYRELLVGHLDLLPFLEQLYCWAPWVQTHLHLDLLGAIVQAFPPDSSLLDSASHADCCPQKRRLHHRPPCPACPFVQAQWSRQQVKEELATWLRPLTLPELQRCLGIVGAQVALEEAVWLDGLSLLPLALAADIPVRYESSDTDNAEVEPVGRKETRSQLDYEVPREKAFQKSSTGFSPETSFLDSQVMTALKMERYLKKIHFLYLNVAPSRYFRPYSLMVVPPDKVNPEHYIFSPFGILHVHPVEGSETMTLGTWHHHCVLWQQLQFIPFFKYCLLRKSFTCWKKNVRLQGLHRLQKFLENHLLLAVPHFGAGLLHISRLLQELHSVSWLPQELDRCYELLDLQTALAEEKHKALRLLHRCLNLCTSILRLVHEDTYHMQQCLQERVQNCDRIRTGQGSIYLQRVQHKQLEQKLKQAEAWWLQLGKFARLVDYMICQSLISVLEEQITSFVANILQAPRQKPFLSSQLVFDDHGQLSHVPCVENMIQTLTGGLQSVKTSALQVVQSADLKTSSDSLYSEEEDEEEDSKDEFLMPKFQGQPSDAVSIFCGPNVGLVWPWKSHPIAGILEVRGCRLRGQYFPHNYKQLEEDLDNNPKIQQALNIQQVLLEGVLCKVQEFCREHHWITGIYEFLQSWGPQKLEDMRGGPIKNYVTLVSRLNVWQARVSSMPIELLTKGGLLLLSCHDVQAEMESKLNSIRKDILAHVQNECWNLSQQLMTELTDFMHIFRTINSDIHAIAQCTQKLNEANEQYVELEERMEYVRALHELIRNHFSLFSAENEALDISVRRQFGESPIPPCPPPPQPHLLHCPLLAPQLLDMWEAFQFEKSQASEFLLSKRHAIMPKLQQLMAAALAELEGLLAKALSGPFMDPTQDQRSTEHQLVSLERQFQNTVSDLSELHHAYAIFTEDETPVPLPICGTRPIVQQQRIWHLYRVISENISEWKCMAFAKFSPAMAQEKTEGWLTEAARMSTTLELHSPVLQHCMRILGEFRSYLPLLTKLGSLHPQSLNCQCLLRALGLGSLQTIELLTLGQLLTYPLLEFADRINQVWQNENERIHAQETIRRLQRYWEARQLRLLNFILHVPYEPPASERSKRQVLRSPQWEVVDKDSGTFILSDYSNLQDSIQESLQVLSKILAIEKSGDLNKIALEWVAIMHGLGALLEVWLTFQQKWIFLNKVLHEMKIQFPNADLNSRFKVMDDQYRTLMRISVADPMVLSLVVPSAERSPYFQGQQLQQLLQAGSVELEGIIMSLESVLYGVCAHFPRLFFLSDSELVALLAARLESCEAQLWVRRCFPHVHAVSFRSCPTGEKNTDDWESSPNTQTQVEALAVLGAGGEEVKLQGPLPLHPDLPKWLASLEKCLRLALVHMLQGCVAARLARGPSLGEALKQLPKQNKLYLQLYVQHWIDLVQAFPWQCVLVAEEVVWRAEMEEALLEWGTLAMVSMHMRKLEVLVNFMRAQRASQGGQSLPSVRQTSLLSALLVMAVTHRDIAQLLEQHQVSDLTDFHWVRQLKYHLGSPHIIPKSPLQSLKTIASSEPSLSPAACWIDVLGRSFLYNYEYLGPRLGPLPSLLPERPALVLLLALEEVACGTVLGPNGVGKRAIVNSLAQALGRQLVMLPCSPQIEAQCLSNYLNGALQGGAWLLLEKVHQLPPGLLSALGQRLGELHHLYAPLYQEASRNTSTIDPTQPQLLGSSFFEKHHVSVRLGYGCLLVLRALSSAVPANLHLLLRPVALALPDLRQVAELTLLGAGMRDAFQMATRLSKFFSLERELVSGPLPCRLPLLKQILEDTIRTLNVTKEEPKCQKPRSLAAIEEAALLRSPLFSILNGLHLHNLRGLLCALFPSASQVLAEPMTYKLMKPLVVEELQQVGLDPSPDILGSLEQLSQALSRASGILLLGPAGSGKTTCWHSLFKIQNRLAAMEDTSTQGCQPVEITHLYPSGLSPQEFLGWLEGSCWHHGIFPKVLRAAGQCNNMGQKRQTEESIGIQHWIICDGASNGAWLDSITCLLSELPQLSLPSGQQIARPPGTFLLMEVADTTGISPTVVGCCALVWCGGEQTWQCILSALMASLPYEYRLQHRTVAELNHMAEVLVPATLRFLTCQGVSSLLQVHGQQAVCAGVAEVTSMARILHSLLDLHLRLKEEKAPGPEDLSYSDPVAQSFRSSKSSFLNRSQVDSDDVPDKCREHLLAVSSFLFALIWGFGAHLPSRFWPIFDTFIRDSISRLSNYPEPPPSALVFDLHVSPEDGTLVPFTGQYLSSHIKGTLGTFHPSIQTERLLYVVDLLLSGGQPVLLAGEAATGKSAFVEVLVEPHHPYIYSPIHPAFSSSHLRLLLSRGIQGQTQASPQPGHHQDSKPSLLFLLEDLHLATSDPEKSCQPVLETLRQAMDGTVYAHSTLELQTLQPTVNFLATVTVPGYCERPLCPRLFRLFTVLALESMTQATLLERHVPIIQAWLERFPSVERERALARGLVRASVEAWEAVCNCFMPSPLHPHYHFSLHSVSHLLSSLQLLPNRTGSRGFVDYPNHQEHLRRVSGLRGTCLTVMMATRNVVRLWLHEAQRTFCDRLDSPRERSYCAKLLLVVAQSVFCCGPGPQHLGKDHQESEEEEEEERVPEVESEGELAQWEDFSNSNSETEEEEEPYGLQVARVSNSRDPSLTPSIGPVSRGMKESISHKIRQEKGTRASNYRLQVRRSFKTWWQKKPQMDLISPLLLPVLLLHPQEKPSDLVFSQELILGPNSETPNLYLERQWEKLEEQLATSAAQLKLSPHLARCHSMAQHVARLVRVLARPRQHGLLLSGALGTGRHTAITLASSICQAHFFHLPSGSEEAILQCLRDASWHAGMLSQPVALLVPSGVDLTTLHRLLALATSGSFPGQYTEADLDRIGEHLPRENLGVKQNIKKEMVLQRFHQQVCSHLHLFFLIGDKQAHKQLPSTLFLRLLQLATASIDRYEPWDQAALAKVAQHHLEGAQSVPLDDGSWKYPDLQASIPSVAKAMALIHLSATHYHEHLCPALPLVTPKTFLDFLDTFLMLQQQTILKIKNKAQRVQNALENLRMLIKEHGTHANLIFDLEQQLKDSGKSLSMFQQQLEQSKLLYKQQLEECRHQENLIENLARQRDALQAQREAFLEQMSKAFLEPLSQLQVADFEEIRSYRAPPESVVRVTDAMCDLFHHETGWASAKQLLCTEDFYQELVFFPKEKITDSELIKLHLILKAPGMDDAALRAVSRPAASLAAWLWAVLHYGLAHCRGLPTDLLLQQVEATLTREQARLGYYQFQAQETLEHNLALAKMVEDAQASHNCVAKTLSQAQCGQYHKWPMKAALLTPMRAWTTQLQKLKGRCMTVFGDTLLCSAAIIYLGPFPPLRRQELLDEWLALCRGFQEALGPDDVAQALKRKQKSVSIPPKNPLLATHSPFSILSLLSSESEQYQWDGNLKPQAKSAHLAGLLLRSPTHYSSCRWPLLLDPSNEALIWLDPLPLEENRSFAPALTEGRGKGLMRNQKRESKTDMKEEDDESEESNEAEDQTKEQKAEERKNEQEKEQEENEEKEEEKTESQGSKPAYETQLPSLPYLSVLSGADPELGSQLQEAAACGLPVLLTNVELGLGCEELQWLLQREQLSPPQVQPGFCLYLSTTLSLCAMEKVLGCELLKGLNVLDLGLNMEILEEQMLHEILCREYPELETRWQDLKIRALDTCKAVEAAEERLLTMLLFQNPKRQKPAKFLRNIVRAQGKLCQLRAHCEELEGQKLQEMVLWAPYRPVVWHGMAMVKALSQLQNLLPLFCMSPENWLAVTKQALDSMKPREINHGEDLASHLLQLRAHLTRQLLGSTVTALGLTQVPLVGALGALALLQATGKASELERLALWPGLAASPSTVHSKPVSDVARPAWLGPKAWHECEMLELLPPFVGLCASLAGHSSAWQAYLSLSSTVLGPAPGPGPEPLSLLQKLILWRVLRPECLAGALADFTTSLLGRPLDENTYAPTMPFKHSQATQPMLILLPPPGHPSATLHPLTVIQKLAAKYQQGQKQLQVIALGSEAWDPVSVVVSTLSQAMYEGHWLVLDNCHLMPHWPKELLQLLLELLGRAKVVADLESEQLLDQPESRNVSTVHRDFRLWLIVPAESSASLPAVLTQHSMPVFWNQSLELGHVLIDSVELAQQVLYMQPPTQALPLLLLHGLLLHRQLYGTRLQAHRGRWSQVTLTQVLQTQDQLWASLSNPRAAMQELAASVFYGGPLGDTEDREALISLTQACLSPSSGSWVQPHTPQSLLATLMPLPELRELDAMAECKAQMHLLPSPPEPRLCGLSEGPQAWLLRRQSRALLSALQRSSPVWVPESRRGAQLAERRLRQRLVQVNRRLESLQDLLTHVIRQDESDAPWSVLGPNARRPLEGVLETEALELSQLVGTLQRDLDCLLQQLKGAPPCPSRRCAAVAHALWTGRLPLPWRPHAPAGPQPPWHWLRQLSRRGQLLVRYLGVGADASSDVPERVFHLSAFRHPRRLLLALRGEAALDQNVPSSNFPGSRGSVSSQLQYKRLEMNSNPLHFRVENGPNPTVPERGLLLIGLQVLHAEWDPIAGALQDSPSSQPSPLPPVSISTQAPGTSDLPAPADLTVYSCPVYMGGPLGTAKLQSRNIVMHLPLPTKLTPNTCVQRRVHVCSPPLS

SEQ ID NO: 239413 - protein, 597 aa, Artificial Sequence
  derived and/or modified sequence
MVPEERRVGLSSDETSSDSLKSWHSICVLDSKEQPLACQQKQRQFVKPVTESEQPTVLELLLAELRTLFSAVLQDSSPAAWRYLHAVLGLLPPYRELLVGHLDLLPFLEQLYCWAPWVQTHLHLDLLGAIVQAFPPDSSLLDSASHADCCPQKRRLHHRPPCPACPFVQAQWSRQQVKEELATWLRPLTLPELQRCLGIVGAQVALEEAVWLDGLSLLPLALAADIPVRYESSDTDNAEVEPVGRKETRSQLDYEVPREKAFQKSSTGFSPETSFLDSQVMTALKMERYLKKIHFLYLNVAPSRYFRPYSLMVVPPDKVNPEHYIFSPFGILHVHPVEGSETMTLGTWHHHCVLWQQLQFIPFFKYCLLRKSFTCWKKNVRLQGLHRLQKFLENHLLLAVPHFGAGLLHISRLLQELHSVSWLPQELDRCYELLDLQTALAEEKHKALRLLHRCLNLCTSILRLVHEDTYHMQQCLQERVQNCDRIRTGQGSIYLQRVQHKQLEQKLKQAEAWWLQLGKFARLVDYMICQSLISVLEEQITSFVANILQAPRQKPFLSSQLVFDDHGQLSHVPCVENMIQTLTGGLQSVKTSALQVF

SEQ ID NO: 239414 - protein, 630 aa, Artificial Sequence
  derived and/or modified sequence
MEKVLGCELLKGLNVLDLGLNMEILEEQMLHEILCREYPELETRWQDLKIRALDTCKAVEAAEERLLTMLLFQNPKRQKPAKFLRNIVRAQGKLCQLRAHCEELEGQKLQEMVLWAPYRPVVWHGMAMVKALSQLQNLLPLFCMSPENWLAVTKQALDSMKPREINHGEDLASHLLQLRAHLTRQLLGSTVTALGLTQVPLVGALGALALLQATGKASELERLALWPGLAASPSTVHSKPVSDVARPAWLGPKAWHECEMLELLPPFVGLCASLAGHSSAWQAYLSLSSTVLGPAPGPGPEPLSLLQKLILWRVLRPECLAGALADFTTSLLGRPLDENTYAPTMPFKHSQATQPMLILLPPPGHPSATLHPLTVIQKLAAKYQQGQKQLQVIALGSEAWDPVSVVVSTLSQAMYEGHWLVLDNCHLMPHWPKELLQLLLELLGRAKVVADLESEQLLDQPESRNVSTVHRDFRLWLIVPAESSASLPAVLTQHSMPVFWNQSLELGHVLIDSVELAQQVLYMQPPTQALPLLLLHGLLLHRQLYGTRLQAHRGRWSQVTLTQVLQTQDQLWASLSNPRAAMQELAGETLPLPLGVISPQESLEEGGGGIQFTALVLAVVETEGTGTERL

SEQ ID NO: 239415 - DNA, 1893 bp, Artificial Sequence
  derived and/or modified sequence
atggagaaggtgctgggctgcgagctgctgaagggcctgaacgtgctggacctgggcctgaacatggagatcctggaggagcagatgctgcacgagatcctgtgcagagagtaccccgagctggagaccagatggcaggacctgaagatcagagccctggacacctgcaaggccgtggaggccgccgaggagagactgctgaccatgctgctgttccagaaccccaagagacagaagcccgccaagttcctgagaaacatcgtgagagcccagggcaagctgtgccagctgagagcccactgcgaggagctggagggccagaagctgcaggagatggtgctgtgggccccctacagacccgtggtgtggcacggcatggccatggtgaaggccctgagccagctgcagaacctgctgcccctgttctgcatgagccccgagaactggctggccgtgaccaagcaggccctggacagcatgaagcccagagagatcaaccacggcgaggacctggccagccacctgctgcagctgagagcccacctgaccagacagctgctgggcagcaccgtgaccgccctgggcctgacccaggtgcccctggtgggcgccctgggcgccctggccctgctgcaggccaccggcaaggccagcgagctggagagactggccctgtggcccggcctggccgccagccccagcaccgtgcacagcaagcccgtgagcgacgtggccagacccgcctggctgggccccaaggcctggcacgagtgcgagatgctggagctgctgccccccttcgtgggcctgtgcgccagcctggccggccacagcagcgcctggcaggcctacctgagcctgagcagcaccgtgctgggccccgcccccggccccggccccgagcccctgagcctgctgcagaagctgatcctgtggagagtgctgagacccgagtgcctggccggcgccctggccgacttcaccaccagcctgctgggcagacccctggacgagaacacctacgcccccaccatgcccttcaagcacagccaggccacccagcccatgctgatcctgctgcccccccccggccaccccagcgccaccctgcaccccctgaccgtgatccagaagctggccgccaagtaccagcagggccagaagcagctgcaggtgatcgccctgggcagcgaggcctgggaccccgtgagcgtggtggtgagcaccctgagccaggccatgtacgagggccactggctggtgctggacaactgccacctgatgccccactggcccaaggagctgctgcagctgctgctggagctgctgggcagagccaaggtggtggccgacctggagagcgagcagctgctggaccagcccgagagcagaaacgtgagcaccgtgcacagagacttcagactgtggctgatcgtgcccgccgagagcagcgccagcctgcccgccgtgctgacccagcacagcatgcccgtgttctggaaccagagcctggagctgggccacgtgctgatcgacagcgtggagctggcccagcaggtgctgtacatgcagccccccacccaggccctgcccctgctgctgctgcacggcctgctgctgcacagacagctgtacggcaccagactgcaggcccacagaggcagatggagccaggtgaccctgacccaggtgctgcagacccaggaccagctgtgggccagcctgagcaaccccagagccgccatgcaggagctggccggcgagaccctgcccctgcccctgggcgtgatcagcccccaggagagcctggaggagggcggcggcggcatccagttcaccgccctggtgctggccgtggtggagaccgagggcaccggcaccgagagactgtag

SEQ ID NO: 239416 - DNA, 3205 bp, Artificial Sequence
  derived and/or modified sequence
ttctaacagctgggtgcgggtggagctgcgggcgatcgccagctcgagtgcagattccttgctgtgaccgaggttcagagtgagctctgtcggtgtgtcagtttgcctcttcaggtgattgcacgtctgtgtgcgagtctctccgtgtatgggtggctatgattagggtgagcctcagactggaactcaagtctaagttcattcactgctccagcaggcactcttcaatgaaacctcatcagcagatcgggctctcttcccttgccttgcctcctaacccccctaggccaggtgagggggacagggtactgggaggtaagaaggaactcttctgcaaggagggctctcacgtctgtcttaggcctgctccttaccagagtctttggggaagcagtagggagggcctgagggtctcaggaaaggctctctgctggtctggctctgctctgtagctccatctatttccctgtcccaggtcctttcttcctcctaaccccattgactctgaccatcccctgcccagagcctgaggtcccttctctggcccctctgctgggctggcccatgcaggtgaggccccgcatctggcatcctggaactggcagttggagcctgagctatgggcaaggtcacttcgacagcagttgaatgcccagctcctcatggtcccggaggagaggagggtaggtttgtcttctgatgagacatcatctgattcccttaagtcttggcactccatatgtgtcttggacagcaaagaacagcccttggcctgccagcagaaacagaggcagttcgtgaagccagtgactgagtcagagcagcccacagtgctggaactcctgctagctgagctccgaactctgttctcagctgtgttgcaggacagtagccctgcagcttggcgctatcttcatgcagtactgggtctactgcctccatatcgtgagttgctagttggccaccttgatttgctgcccttcctggagcagctgtactgctgggcaccctgggtccaaacccacctccatctggacctgctaggtgccattgtccaggcctttcctccagacagctctttgttagacagtgcttcccatgctgactgctgtccccagaagcggaggctccatcacaggcccccatgcccagcttgcccttttgtgcaggcccagtggagcaggcagcaagtaaaggaggagctggccacctggctgcgaccattgacactgcctgagctacagcgctgcctgggcattgttggtgctcaggtggccctagaagaggctgtgtggctggatggacttagtctccttcccttggcactggcagcggacatccctgtacggtatgaaagcagtgacactgacaatgcagaggtggagcctgttggaagaaaagagaccaggtctcagcttgactatgaagttcccagggaaaaggccttccaaaagagcagcaccggcttttcacctgagacttccttcctggatagccaggtgatgactgctctgaagatggagagatacctgaagaagatccacttcctctatctcaatgtggctcccagccggtactttaggccttacagcctgatggtggtgccacccgacaaggtgaatcccgagcactacatcttctctccctttgggatcttgcatgtacatcctgtggaaggtagcgagacgatgacactgggtacctggcaccatcactgtgttctctggcagcagctccagttcattccattctttaagtattgcctcttacgcaagtcctttacctgttggaagaagaatgtgagattacaggggctgcatcgactccagaaattcctagagaatcatctgctcttggctgtgccccactttggagctgggctactccatattagcaggcttctgcaggagctacactctgtgtcctggctaccccaggaactggatcggtgctatgagctgctggacctgcagacggctctagccgaggagaagcataaggctctacggctgctccatcgttgcctaaacctctgcacatccattcttcgactggttcacgaggacacataccacatgcaacagtgcctacaggagcgagtacaaaactgtgacaggatcaggacaggccaaggctccatataccttcagagggtacagcacaagcaactggagcagaagctgaagcaagcagaggcctggtggctgcagctgggaaagtttgcccgcctggttgactacatgatttgtcagagcctcatttctgtcttggaagagcagataacctcttttgtggccaacatccttcaagccccaaggcagaaaccctttctctcatcacagctggtctttgatgatcatggtcaactgtctcatgtgccctgtgttgaaaatatgatccagactctaactggaggcctacagtctgtcaagacctctgccttgcaggtattctgaattgggcagagagctggctgtgggaattcccagttcctatcctctgagtaatcagaagctcacaacctggtttgaatccctcattgctttcccatttctgccccttctccatatcctggcatgaaggtagtgcagtctgcagacctgaagacctcctcggattccctgtattctgaaggtatttagggagacctaggcagggggtaggaaggctgaaggagggaaagggcacaagtactaatggcatgggaagaaggcaggaggtccaggctatagagtcaggcactgggtgtggatggagcagctctaacctgggtactgcacatatgtgttgtgggtagaaaggtcagggaatgtttttgctcacaaattcacgtggttatgtgtatgtgcgtgcaatgagagggtgtatgaaagagtgtgagtacattgtccttccaaacctgattcatcccaaactctgtgaggtttttctccagtgccataattgcatttcatttactactgaattttattgctaagtaaatttgtacttgtttgaagagctctgcttgctcaacacttgctttatgtcatatagctctttttcatttcatatggattaattcattgtattgaaatattttatggttaccaattattattggttatcagtcttcacacttattaaccatcagcgtggaaacacatcttcacatttcccttatttaggatactaatgctgtcacaaataaaatcattaaatgcaa

SEQ ID NO: 239417 - DNA, 14262 bp, Artificial Sequence
  derived and/or modified sequence
atggtgccggaggaacgaagggtcggcctgtcgagcgatgaaacctcttctgactccctgaaatcatggcattctatctgcgtgctggattccaaagagcaacctctggcttgtcagcagaaacaaaggcaatttgtcaagcctgtgaccgagtccgaacagcctactgtacttgagctgctgttagctgagcttcgcactcttttctccgccgttctgcaggacagttctcccgcagcctggcggtacctgcacgccgttctgggactactgcctccttaccgagaactcctggtgggccatctggacctgcttccctttttggagcaactctattgttgggcaccctgggtacagacccatctgcatctcgatctgctcggcgccatagtacaggcgttccctccagactctagtctgttggattcagcctctcacgcagattgttgcccacagaaacgaaggttacaccatcggcctccttgccctgcatgtcccttcgtgcaagcccaatggtcaaggcagcaggtaaaggaggagctggcaacgtggctgagaccattgacgcttccagagctgcagcgctgtctcgggatcgtgggagcccaagtggcacttgaggaagcagtatggctggatggtttgagtttgctaccattagctctggccgccgatattccagtgaggtacgagtcttcagacaccgacaatgcagaggtggagccagtgggccgtaaagaaacaaggtcccagctggactatgaggtgccaagggagaaagcattccaaaagtcttcaacggggttcagtccagagacaagcttcctagattcacaggtgatgacggccctgaagatggagagatacctaaagaagatccactttctgtacttgaatgtggcccctagtagatattttagaccttacagtttgatggtggtgcctcccgacaaagtgaatccggagcactatattttcagtccctttggaatcctacacgtgcatccagtcgagggatcggagactatgacattgggaacttggcaccaccactgcgtattatggcaacagttacagtttatcccttttttcaagtactgcctgcttcgcaaaagttttacgtgttggaaaaaaaacgtgagactgcagggccttcatagattgcagaagttcctcgaaaaccatttactgctggcagtgcctcatttcggagcagggttgcttcacatttcccgccttttgcaagaattgcattcggtctcttggctgccacaggagctggatagatgttacgagttgttagatttgcagacagcgctggctgaggaaaagcacaaggccttgagactgctccaccggtgccttaacctttgcacgagtatactaagacttgttcacgaagatacctatcatatgcagcagtgtctccaggaaagagtccaaaattgtgacaggattcgtacgggccagggatccatctatctacagagggtgcagcataaacagctcgaacagaagctcaaacaggctgaggcctggtggctgcagctgggaaagtttgcgcggcttgtggactatatgatctgccagtcgctgattagcgtgttagaagagcagattacttcctttgtggctaacatcctacaagcccccagacagaagccatttcttagctcacagctggtgttcgatgaccatggccagctgtctcacgtcccatgtgtggagaacatgatccagaccctcactggcggcctccagtccgtcaaaacaagtgccttgcaggtggtacagagcgccgatttgaagacttccagcgattcactgtactctgaagaggaagatgaggaggaggattcaaaagacgaattccttatgcccaaattccaaggccaacctagtgatgctgtctctattttctgtggcccaaacgtggggctcgtttggccgtggaagtcgcaccccattgcaggtatcctcgaggtcagaggttgtaggctgagagggcagtatttcccacacaactataagcaattggaggaggatctagacaataatccaaaaatccagcaggcactgaacattcagcaggtgttgctagaaggtgtgctctgcaaggtacaggagttttgtcgtgagcatcactggataactggaatctacgaatttctgcagagttggggaccacagaagctggaagacatgagagggggccccatcaaaaattacgtgacgctggtgtcaaggctcaatgtttggcaggcaagagtgtccagcatgccaattgagctgctcacaaaagggggccttctcctgctgtcgtgtcacgacgtgcaggcggaaatggagtccaaactgaatagcatccggaaagacatactggctcatgtgcaaaacgagtgctggaacttgtcccagcagttgatgacggagctcacagatttcatgcacatcttccggacaattaactctgacattcacgctatcgctcagtgtacacagaagctgaacgaggccaatgaacagtatgtggagttagaagagagaatggagtacgtccgggcactccatgaactcatccgtaaccacttttcccttttctcagccgaaaacgaagccttagatatctcagtccgccgccaatttggcgagagccctatacctccctgtccaccacccccccaaccccacctcctgcactgcccacttctggcccctcagctgctcgacatgtgggaagcattccaatttgagaagtctcaggcctctgaatttcttttgtccaagcgtcacgctattatgccaaagctgcagcagttgatggccgcagccctggccgaattagagggactgctggcgaaagccctttctggaccttttatggacccaacacaggaccagcgcagcaccgaacaccagcttgtctcacttgagagacagttccagaacaccgtgagcgatctgtctgagctgcatcatgcatacgctatctttaccgaagacgagactcctgtgcccttaccaatatgcgggacaagaccgatcgtgcagcagcagagaatatggcatctgtacagggtaattagtgagaatatcagtgagtggaagtgcatggccttcgcaaagttttcccctgccatggcccaggagaagacagagggttggctgacggaagccgccaggatgtcaacaacgctggaattacattcacctgttctgcagcattgtatgcgaatcttgggcgaatttcgatcttatctgcctttgctcacaaagctgggcagcttgcatccacagtcactcaactgccaatgtttgctgagggcactcggccttggctccctccagactattgaacttctgacacttggccaactcctgacctatcccttgctagagttcgcggataggataaaccaggtttggcaaaacgagaatgagaggatccatgcacaagagaccattcgacggttgcagagatactgggaggctcgacagctaaggttgctcaacttcatcctccacgtgccttatgaaccccccgcttcagagcgtagtaagcgacaggttctgcgatctccacaatgggaagtggtggacaaagactcaggcactttcatcttatctgactactctaatctccaggactcaatccaagagagcttgcaggtgctatccaaaatcctggccattgagaagtccggtgatcttaataagatagcgttggagtgggtggcgattatgcatggactcggcgcactgttagaggtctggctcacgtttcagcagaagtggatcttccttaataaggtcctgcacgaaatgaagatccaatttcccaatgcagatctaaactccagattcaaggttatggacgaccaataccgcacccttatgaggatttctgtcgccgaccccatggtgctctcactagtggttccatctgcagaaagatcaccctactttcaaggacagcagctccagcagctcttgcaggctggatcggttgaattggaaggtataatcatgtcactcgaatctgtcctctacggagtctgcgcccattttccccggctgttttttttgtccgactctgagttagtggccttactcgctgcgcgactggaatcctgcgaggcccagctttgggtccggaggtgttttcctcacgtgcacgcagtttctttcaggagctgcccaactggcgagaaaaatactgacgattgggaatcgtcgccaaacacacagacccaggttgaggccctcgctgtgttgggcgccgggggtgaggaggtcaagctgcagggcccacttcctctgcatcctgatcttccgaagtggctggctagccttgagaagtgcctgcgcttggctctggtgcatatgttgcagggttgtgtggcagccaggctagcccgcggaccctctctgggggaggcactgaagcagctaccgaaacagaataaactctacctgcagctctacgttcagcactggatcgaccttgtgcaggccttcccttggcagtgtgttctggtggccgaggaagttgtgtggcgtgctgagatggaagaagctctgctcgaatggggcaccttagcaatggtgagtatgcacatgagaaaactggaggtgctggtcaacttcatgagagctcagcgggcttctcaaggtggtcagtcactgccaagtgtccggcagacctccctgctgtcagccctgcttgtaatggccgtgacccaccgtgatattgcccagctgcttgaacagcaccaggtttctgaccttactgatttccactgggtacgccagcttaaatatcacctggggagtccacacataatacccaaatcccccctgcagtcactgaagacaatcgcctccagtgaaccttccctatctcctgccgcctgttggattgacgtcctgggccgtagcttcttatataactacgagtatcttgggccgaggttaggtcccctgccttccctgctgcccgaacgccccgctttagtactcctgctcgccctcgaggaagtcgcgtgcggcacagtgcttggcccaaatggcgttgggaagagggccattgtgaactctctggctcaggcattggggagacagttggtcatgttaccctgttccccacagattgaggcacaatgcctctcgaattatctgaatggggcacttcaggggggtgcgtggctgctattggaaaaggttcatcagctgccgcctgggcttctgtcggctctaggccaacggctgggagagctgcaccacctgtatgcccccctgtatcaggaggcatctcgtaatacatcaaccatcgatccaacgcagccacaactgttgggctcatcttttttcgaaaaacatcacgtgagcgtccgactaggctatggatgcctactcgtgctccgggccttgtcctctgccgtcccggccaatctgcacctactccttcgccctgtagctctggccctccccgaccttcgacaagttgccgaactgaccttgctcggcgctggaatgcgtgatgcgttccagatggccacccggctcagtaagtttttttcactggagcgcgaattagttagtggccccttgccctgtagattgcccttgctcaagcagatcttggaagacacaatccgcacactgaatgtgactaaggaggaaccgaagtgccagaagccgcgcagccttgcagcgatagaggaggccgctttattgcgaagcccattgtttagcattctgaatggtctgcacttgcacaatctgagggggctcctctgcgctctgtttcccagcgctagccaagtgctggctgagccgatgacatacaaacttatgaaacccctggtggtggaggaactgcagcaagtggggctggatccctccccagacatactaggctccctggaacagttgtcacaggccctgtcgagagcaagtggcatcctcttactgggtcccgctggcagtgggaagacaacttgttggcattctttatttaagatccagaaccggttggcagcaatggaagatacatctacccagggttgccagccggtggagattacccatctgtacccgagcggtctatctcctcaggaatttctggggtggctggagggatcatgctggcaccatggcattttccctaaagtgctgcgcgcagcgggccaatgtaacaacatggggcagaagagacaaactgaagaatccatcggaatccagcattggattatctgcgacggtgcctcaaatggggcgtggctcgattctataacgtgcttacttagtgagctcccccagttgtcgttgccttcaggtcagcagatcgcccgccctcccggtacatttcttcttatggaagttgccgacaccactggtataagtcctaccgtcgttggctgttgtgctctggtttggtgcgggggagaacagacttggcagtgtatcctgtccgccctgatggcctctctgccatatgagtaccgcctacaacatcgcacagtcgccgagctgaaccacatggccgaagtactagtccctgccacactgcgctttctcacatgtcagggtgtgtcttccctccttcaggtgcacggtcagcaggcagtatgcgctggagtggccgaggtgacctcaatggctcgcattctgcacagtttactggatctacatctgaggctcaaggaggaaaaggcccctggccccgaagatctctcctactctgacccggttgcgcagtcttttaggtcttctaaaagttcctttcttaaccgaagccaagtggactcagatgacgttcctgacaagtgccgggagcaccttctcgctgttagttcatttctgttcgcgctgatttggggcttcggggcgcacctgcctagccgcttctggcccatctttgataccttcattcgggacagtatttcaaggctgagcaattatccagagcctcccccttctgcccttgtgtttgatctgcatgtgagtccagaggacgggaccttggtgcccttcacaggccagtacctgagcagtcatatcaagggaacactggggaccttccacccatctattcagacagagcggctcttatacgtagtcgatctgctgctgagcggaggccagccagtccttctggcaggagaagctgctaccggtaagtctgcgtttgttgaggtgcttgtagagccccatcacccatatatatactctcccattcacccagcttttagctcctcacatctcagactcctgctgtcccgtggtatccaaggtcagacccaagccagtccgcagcctggacaccaccaggactcaaaaccttcccttctgttccttttagaggatcttcatctggcgacctccgatcccgagaagagctgccaacctgttctcgagacattgaggcaggcaatggacggaactgtctatgcccactccaccctggagctccagacacttcaacccacagtgaactttctggctacagtaactgtgcccggttattgcgagaggccgctatgtcccagacttttcaggttattcactgtgcttgctctggagtccatgacacaagccactctactggaacgtcatgtccccatcatccaggcctggctcgagcgttttccttcagtcgagagggagcgggcactggcacgaggtctcgtgcgcgcttccgtggaggcatgggaagcggtctgtaactgtttcatgccttcacctctgcatccccattatcatttcagtctgcacagcgtatctcacttgttgagctccctccaacttctgcctaacaggacaggatcccgaggcttcgtggattaccccaatcaccaggagcatctccgcagggttagcgggttaagagggacgtgtctcaccgttatgatggccacccgcaatgttgtaagactgtggctgcatgaggcacagaggacattctgcgatcgactggacagccctcgcgagcggagttattgcgccaagctcttgcttgtcgtggctcagtccgtgttctgctgtggcccgggaccgcagcacctgggcaaggaccatcaggagtcggaggaagaggaagaagaggaacgcgtcccagaggtcgagtcagagggcgagcttgctcagtgggaggactttagcaattcaaattcagagaccgaagaggaagaagagccttatggactgcaggtggctagagtgtctaattctcgggatccttctctgacgccctcaatcggtccagtgagtaggggtatgaaggaatccatttcccataagatcagacaggaaaagggtacacgcgcaagtaattatcggctacaggttcggaggagctttaaaacttggtggcagaagaagcctcagatggatctcatatcgcctctgctgctgccggttctcctgttgcaccctcaggagaaacccagtgacctggtgttctcccaggagctcatactgggccctaactcagagaccccaaatctctacctggagcgccagtgggaaaaactggaggaacagctcgccacctctgcagcacagcttaagctgtcgcctcacttggccagatgccatagcatggcccagcacgtcgcacgactggttcgggttttggccaggccaaggcagcacggcctattgctatcgggagcactcgggacagggagacacaccgcgatcaccttggcaagcagcatctgccaagcacactttttccatctgccatctggaagtgaggaggccatcctgcagtgcctacgcgacgcttcttggcacgccggcatgctgtcacagcctgttgctctgctggtgccctcaggcgttgacttgaccactctgcaccgcctgctggcactggctaccagtggatctttccctgggcagtacactgaagcagacctcgatcgcataggggagcacttgcctagagaaaaccttggcgtgaaacaaaatatcaagaaggaaatggtgctccaacggtttcatcaacaagtgtgcagccatctccacctgtttttcctaataggcgataaacaggctcataaacagcttccaagcactctgttcttgcgactcctgcaactggccaccgcgagtattgataggtatgagccttgggaccaggccgccctggccaaggttgcacaacatcatctagagggagcacagtcagtgccactggatgacggctcttggaaatatccagatctgcaagcatcgattccttccgtggccaaagcaatggccttaattcaccttagcgctacacactatcacgagcatctctgcccagcactcccattagtgacgcccaaaactttcctggatttcctggataccttcttgatgctgcagcagcagacaattctgaaaattaagaataaggcccagcgtgtgcaaaacgccctggagaatctgaggatgctgataaaggaacacggaacacacgccaatttgatttttgatctggaacaacagctgaaagattcagggaagagcctctcaatgtttcaacagcagctggagcaatcaaagttgctgtataaacagcagctggaggaatgccggcaccaggaaaatctgatcgagaatctggctagacagcgcgacgctcttcaagcccaacgtgaggcttttcttgagcagatgtccaaggcttttctggaacccctctctcaactgcaagtggctgactttgaggagattaggtcttaccgggctcctcccgagtcagtagtgcgggtgactgacgctatgtgtgatctcttccatcatgaaacagggtgggcctcagctaaacagctcctctgcaccgaagatttttaccaggagctggtttttttcccaaaagaaaaaattactgattctgagcttatcaagctacatctgatcctcaaggccccaggaatggacgatgctgctctgcgagccgtgagtcgccctgccgcttcattagctgcctggctgtgggctgtgcttcattacggtctcgcgcactgccgcggtctgccaacggatttactcctacaacaggttgaggccactttgacccgcgaacaggctagattaggatattaccagtttcaggcgcaggagacccttgagcataatcttgctctagctaagatggttgaagacgctcaagcgagtcacaattgcgtggccaagactctgagtcaggcacagtgtggccagtatcataagtggcccatgaaagccgcacttcttacacccatgagggcctggacaacccagctccaaaagctgaaaggccggtgtatgacagtgtttggagatacgttgctttgctcagccgcaattatttacctaggaccctttccacccctaaggcggcaagagttactggatgagtggctggcgttgtgcaggggttttcaggaggctctcggacctgatgacgttgcccaggccctgaaacgtaaacaaaagtccgtgagtatcccacccaagaatcctctcctcgcaacccacagccccttttcaattctctccctgctgagttctgagtctgagcagtatcagtgggatggcaatctaaaaccccaggccaaatctgcgcaccttgccggcttacttctgcgcagccccacccactattccagttgtcgatggcccctgctcctggacccaagcaacgaggcgcttatctggctggacccactccctctggaagagaataggagcttcgcccctgcactaacagagggcagaggtaaaggtcttatgagaaaccagaaacgcgaatccaaaacggacatgaaagaggaggacgacgaaagtgaagagtctaacgaggccgaagatcagacaaaggagcagaaggcagaagagcggaagaacgaacaggaaaaggagcaagaagagaatgaagagaaggaggaagaaaagacagagagccaggggagcaaaccagcgtatgaaacacagctccccagtctgccttacttgagtgttctgagcggggccgatcccgagcttggctcacaactacaggaagccgctgcctgcggacttcccgtattgcttacaaatgtggaattgggcctcgggtgtgaagaactgcaatggctccttcagagagagcagctgtctccgccacaggtgcagcctgggttttgtctgtatctaagcacaacccttagcctctgcgcaatggagaaagtgctggggtgcgaactgctgaagggcttgaacgttctcgatttaggacttaacatggagatactggaagaacaaatgctgcatgagattttgtgcagggagtatcccgaactagagacccgctggcaagatctcaaaatccgggcgttggatacatgcaaggctgtggaggccgcggaggagcggctcttgacaatgctacttttccaaaacccgaagcggcaaaagccagccaagttcctgcgcaacatcgtcagagctcaagggaaactgtgccagctgcgggcacactgcgaggagttagaggggcaaaagttacaagagatggtgctgtgggcaccctatcggcctgtggtctggcacggcatggccatggtcaaagcactcagccagctgcagaacctgctccccctgttttgcatgtcaccagagaactggttagctgtcacaaagcaagccctggactccatgaagccccgcgagattaatcacggggaggatctggcttctcacttactccagttgagagcccatttgactaggcaactcctcgggtccacagtgactgcattgggattaactcaggtgcccttggtgggcgccctcggcgccctcgcactcctgcaagccactggaaaggcaagcgagctggaacgactcgcactatggccgggactcgcagcttccccatctacagtccactctaagccggtttcggacgttgctcgccccgcctggctgggaccaaaggcctggcatgagtgtgaaatgctcgagttgctacccccatttgtggggctgtgcgcatccctggctgggcattccagtgcctggcaggcatatctgagcctttcttccaccgtgctcgggccggcacccggccccggccctgagccactgtctctactgcaaaaattaatcctgtggcgagtgctcaggcctgagtgccttgccggagcattggcggactttacaactagccttcttggcagaccattggatgagaatacctatgctcctactatgccctttaaacatagccaagcgacgcagcccatgcttattctcttacctccccctggacacccgagcgctactctgcacccactgactgttattcagaaactcgctgcaaaataccagcaagggcagaaacaactgcaggtgattgccctgggtagtgaggcatgggaccctgtgtccgtagtcgttagtaccctttctcaggctatgtatgaaggccactggttggtactcgacaactgccatttgatgccacactggcccaaggagctgctgcagcttctcttggagctcctgggtcgagccaaggttgttgctgaccttgaaagcgaacagctgctggaccagccagaatcccggaatgtttccacagtacaccgcgatttccggctctggttgatcgttcctgctgaatccagcgcttcactcccagccgtcctgacacagcactctatgcctgttttttggaatcaatcactggagctgggtcatgtgcttatcgatagcgtggaattagctcagcaagtactatatatgcagcctccgacccaggccctgcccctgctgctgcttcacggtctgctgcttcataggcaactctacggaacccgcctgcaggcacataggggccggtggagccaggtgacattaacacaggtcctgcagacacaggaccagttatgggccagcctgtctaaccctagagccgcgatgcaggaacttgctgcctccgtgttttatgggggcccgctgggagacactgaggatagagaagccctcatttcactgacgcaggcatgcctgtccccaagcagcggctcctgggtgcagcctcataccccacagtctctattggcaacactgatgcccctgcctgaactcagggagctcgacgctatggcggagtgtaaggcccagatgcaccttctgccatcaccgcctgaacccaggctctgtggcctgtcagagggcccccaggcatggctcctcaggaggcagagccgcgcactgctcagcgccctacagcgcagctctcccgtgtgggtgccggaaagccggcgaggagcccaactcgccgaacggcgactccggcagcgacttgtccaggtaaaccggcgactggagtctctgcaggaccttctgacccatgtgattagacaggatgagtccgatgctccatggagcgttctcgggcccaatgctcgccgcccccttgagggcgtcctagagacagaggccctagagctttctcagctcgtcggcaccttgcaaagggacctcgattgtcttctgcaacagctaaagggggctcctccttgcccctctaggcgatgcgctgccgtggcccacgctctgtggacgggaagactaccactcccctggagaccccatgcgcctgccgggccccagccaccctggcattggttgcgccaactgagcaggaggggacagctgctagtccgctacctcggggtgggcgcggatgccagttctgacgtccctgagcgtgtgtttcatctgtcagccttcaggcacccaaggcggctgcttctggccctgaggggcgaggctgcactcgaccagaatgtcccctcttcaaatttccctggctcaagggggagcgtgtcatctcagttacagtacaagagactggagatgaatagcaatcctctgcacttccgcgtggagaatggccctaaccctactgtccccgagcgtgggctgttactcatcggtctccaggtcttgcatgccgagtgggaccccatcgccggcgctctgcaggatagcccttcatctcagcccagcccacttccacccgtaagtatcagtacccaggcaccagggacctctgacctgcccgctccagccgatctgaccgtctatagctgcccggtctatatgggtggtccgttgggtaccgccaagctgcaatcccggaatatcgtaatgcaccttccgctgcctactaaactgacccccaacacgtgcgtccagagacgggtgcatgtctgtagtcctcccctgtcgtag

SEQ ID NO: 239418 - DNA, 1893 bp, Artificial Sequence
  derived and/or modified sequence
atggagaaggtgctgggctgcgagctcctgaaaggactgaacgtcctggacctgggactgaatatggagattctggaagaacagatgctgcacgagatactctgccgagaataccccgagttggagacccgctggcaggatctcaagatcagagccttggacacttgcaaggccgtggaggcagccgaggaaaggctgctgacgatgctcctattccagaatcctaaaagacagaaaccagcaaagtttctccggaatatcgttcgggcacaaggcaagctctgtcaattgagagcccactgcgaggaactggaggggcagaagctccaggagatggtgctgtgggcaccctatcggcctgttgtatggcacgggatggctatggtgaaagcgctgtcacagctgcaaaacctcctgcctctattttgcatgtcccccgagaactggttggcggtaactaagcaggccctggacagcatgaagcctagagaaataaatcacggcgaggacctagctagccacctgctgcagctacgggcccacctcaccagacagctgttaggcagcacggtgacagccctcggcctcactcaggttccgctcgtgggggcactgggcgccctggcccttctacaggcaactgggaaggcctcagagctcgagcgtttagccctgtggcctggtctagctgccagtccctcgacggtccacagtaagccagtgtctgacgtggcaagaccagcatggctggggcctaaggcttggcatgaatgcgaaatgctagaattactgcctccattcgtgggcttgtgcgcctcgctggctggccatagtagtgcgtggcaggcgtatcttagcctgagcagcacagtgctgggcccagcacccggccctggtccagaacctttgagtctgctccaaaagctgattctgtggcgtgtgctcaggcccgaatgcctggctggcgccttagctgacttcacaacctcgctcttaggaagacccttggatgagaacacatatgctccaaccatgccattcaaacattctcaagctacacagcccatgttgatcctgcttccgccaccaggccacccttcagccacactacatccattaaccgtgattcaaaaattagcggctaagtatcagcagggacagaaacagttacaggtgatcgccttgggatcagaagcatgggatcctgtttctgtggtggtgtctaccctgagccaagctatgtatgagggccactggctagtgctggacaactgtcatctaatgccccactggcctaaagaactccttcagctgcttctagagctcctcgggagggcaaaagtggtcgcagatctcgagtctgagcaattgctcgatcaacccgagagccggaatgtgtcgaccgtgcatcgagacttccggttgtggctgattgtccccgctgagtcttcagcctctctcccagctgtgctgacccagcatagcatgcccgtattctggaaccagtctctcgagctgggtcacgttctgatcgactccgtcgagctcgcccagcaggtgctgtacatgcagccacccacacaagctctgcccttgctccttctgcacgggctgctcttacaccgacagttgtatgggacccgcttacaggcacatcgaggacggtggtctcaggtgactcttacacaagtccttcagacacaggatcagctgtgggccagtctttccaatccccgcgccgctatgcaggaactagcaggcgaaacacttcctctgccattaggggtcatttcaccccaagaaagtctggaggaaggcggtggaggcattcaattcacagcactggtcctggccgtagttgaaactgagggaactgggaccgaacgactatag

SEQ ID NO: 239419 - DNA, 14262 bp, Artificial Sequence
  derived and/or modified sequence
atggtgcctgaagagcggagagtgggcctttcctccgacgagacctcctccgattccttaaagtcatggcattcaatctgcgtattggacagcaaggagcagccactggcctgtcaacagaagcagcgacagtttgtgaagcctgtgacggagtctgagcagccaaccgttctggagctacttctagccgaacttcgaacattgtttagcgccgttctgcaagacagctcccctgcagcctggaggtatttacatgctgtgctgggtttactacctccttacagggagctcctggttgggcatctggatttacttccttttctggaacagttgtactgctgggccccctgggtgcaaactcacctgcacttagacctgctgggcgctatcgttcaggccttccctccagactccagtctgctcgacagcgcttcacacgcagattgctgtcctcagaaaagacgattacaccatagacccccatgcccagcctgccccttcgtgcaagcccagtggtctcgccagcaggttaaagaggaactcgctacctggctcaggcccctaacattgccggaattgcaacgatgtctgggcatcgtgggggcacaggtcgccctcgaggaagccgtctggcttgacggacttagcttgctcccgcttgcgttggcggctgacatcccagttagatatgaaagctctgacactgataacgccgaagtggaacccgtaggccggaaggagactaggagccagctggactatgaagtgcccagagagaaggcattccaaaagtcctccaccggattctcacccgaaaccagctttcttgattctcaggtgatgacagccctcaagatggaacggtacctgaagaaaatccatttcctgtacctgaacgtcgctccctcccgttattttaggccctacagcctcatggtggtgccacctgacaaggttaaccccgaacactatatcttcagcccgttcggaattttgcacgtacatccagtcgaaggaagcgagactatgactctcggaacgtggcatcaccactgcgtgctgtggcagcagctgcagtttatcccattttttaagtactgcctgctgcgcaaaagtttcacttgctggaaaaagaatgtgcgcttgcagggcctgcaccgactccaaaagttcctggagaaccacctgctgcttgcagtgccccatttcggtgccgggctgctgcatataagtcgacttctgcaggaactccatagtgtgtcctggctgccacaggagctggaccggtgctatgaactgctggatctccaaactgccctcgccgaagagaagcacaaggcccttagactacttcacagatgcctgaatttatgcacctcaattctgaggctggtgcacgaagacacttaccatatgcaacagtgcttacaagaacgggtacagaactgtgaccgcatacgcactggacaggggagcatctacttgcaaagagtgcagcacaaacaactcgaacaaaagctcaagcaggcggaggcatggtggctccagctagggaagttcgccaggctcgttgattacatgatctgtcagtcacttataagcgtcttagaggaacagatcacgtctttcgtggcaaatattttacaggctccccgccagaaacctttcctgtccagtcagctcgtgttcgacgatcacggacagctgtcccacgtgccatgtgtggagaatatgattcagacgttgaccgggggtctgcaaagcgtcaaaacttcagctctacaggtcgtacagtccgcggacttgaaaacctcatcagattccctttattcagaggaggaggacgaggaagaggactccaaggatgagtttctgatgcccaaattccaaggtcaaccttcagacgcagtgtccatcttctgcggccctaatgttggactagtgtggccatggaagagccatcccatcgccggcattcttgaggtgagggggtgccgcctgagagggcaatacttcccacataactacaagcaattggaagaggacctggacaataatccgaagatccagcaggctctgaacatacagcaggtcttactggaaggggttctgtgcaaggtgcaggagttctgcagggagcaccactggatcaccggcatctatgaattcctccagtcctgggggccacaaaagctggaggatatgaggggcggtcctataaaaaactatgtgaccttggtgagtaggctgaacgtgtggcaggcaagagttagctccatgcccattgagttgctaacgaagggggggcttttgctgcttagctgtcatgatgtgcaggcggagatggagtccaagctcaattccattcggaaggacattctggcgcacgtgcaaaacgagtgctggaacctgagccaacagcttatgactgaattgaccgactttatgcatatcttcagaaccattaattcagatattcatgcaattgcacaatgtactcaaaaactaaatgaggctaatgagcagtacgtggaattagaggaacggatggagtacgtcagagctctgcacgagctgattaggaaccatttctccctgttcagcgcggaaaacgaagccctggacatctcagtgaggaggcagtttggcgaatctcccatccctccctgccccccacctcctcagcctcacctgcttcattgcccactgctggccccccaattgctcgacatgtgggaggccttccagtttgagaaatcacaggcatccgagtttcttctcagcaagcgacacgcaatcatgcctaagctgcagcagctgatggcggcagctctcgcggaattggaggggctactcgccaaggcactgagcgggccttttatggatcctacacaggatcagcgctccactgagcatcaactggtcagtctggagcgccagtttcaaaatactgtctccgacctgagcgaactccatcacgcttacgctatattcaccgaagacgagactccggtccctttgccgatttgcggaacccgcccaattgtccaacagcagaggatttggcacctctacagggtgatttccgaaaatatcagcgaatggaagtgtatggccttcgctaaattctcacccgccatggcccaagaaaagacagaaggatggctgacagaggctgctaggatgtctacaaccctagagttgcatagcccagttctacaacattgcatgcgaatccttggtgagttcagaagctatctgcctctgctgacaaagctcggctcccttcacccccagtcacttaattgtcagtgtttgttgagagctctgggcttgggatccctacagactatcgagctgttgaccctgggccaattgcttacataccctctcttggagttcgccgatcgaattaatcaagtgtggcagaatgagaatgagagaattcacgctcaggagactatccgcaggttgcagagatactgggaggctcgccagctccggctgctcaactttatcctccacgtcccctacgaacctcctgccagtgagcgtagtaaaagacaggttctgaggtcaccccagtgggaggtggtcgacaaagattctggcaccttcatcctatctgattactcaaacttgcaagactctattcaggagtccctccaggtcctcagcaagattctcgccatagagaaaagcggcgatctgaataagattgccctcgagtgggtggccatcatgcacgggttgggtgccctactggaagtgtggctgacattccagcaaaagtggatttttctgaataaggtactgcatgagatgaagatccagtttccaaatgccgacctgaacagtcgcttcaaagtgatggatgaccagtacaggaccctcatgcggatctctgtggccgaccctatggtgctctctctcgtggtccctagcgcagaaaggtcaccgtattttcaaggccaacagctgcagcaactgctgcaagcaggttctgtcgaactggagggtataattatgagtctggaatccgtgctctatggcgtgtgtgctcacttcccgcgcctgtttttcctcagcgactcagagcttgtcgctttgctggccgctagactggagagttgcgaagctcagttatgggttcggcgttgttttcctcacgtacatgctgtttccttccggtcttgcccaaccggcgagaagaacacagatgactgggagtccagcccaaatactcagacacaagtagaagctctcgcagtcctgggcgccggaggcgaagaagtcaagctgcaggggccattgccattgcatccggatctgcccaaatggctggctagccttgagaagtgccttcgcctcgccctggttcacatgctgcagggctgtgtggctgcccgcttggcccgtgggcccagtctcggggaagcccttaagcaactgcctaagcaaaacaagctgtacctccagttatacgtccaacactggattgatctggtacaagccttcccgtggcaatgcgtgttggttgctgaggaagtagtttggagggctgagatggaggaggctctcctggagtggggaaccctggcaatggtatcaatgcacatgaggaaactcgaggtcttagtaaactttatgcgtgcccaacgcgcttcccagggaggtcaatccctgcccagcgtgaggcaaacttccctgttgtctgccctgctggttatggctgttacccacagggacattgcccaactcctggaacagcaccaggtgagtgacttgaccgatttccactgggtcagacagctgaaatatcacctggggtcccctcatatcattccaaaatctcccctgcaaagccttaagacgatagcatcatctgagccctctctgtccccagccgcctgctggatagacgtactcgggagatctttcctgtacaactacgagtatctgggcccacgcctcggtccattgccatctttactccctgaaaggcccgctctggttctgctcctggccttagaggaagtagcctgtggaacagttctcggccccaacggtgttggcaaaagggccatcgtgaacagccttgcacaagctctggggcggcagctggttatgctgccctgctctcctcagattgaagcccagtgtctgtcaaattatctcaatggcgccctgcagggtggagcctggctccttctggaaaaggtgcaccagctaccacccgggctactgagtgcactgggccagagactcggtgagttgcaccacctgtatgctcctttgtatcaagaagcttcgcggaatacgtcaacaatcgaccctacccagccccaactactcggctctagtttcttcgaaaagcaccacgtgtccgtgcgtctgggctacggttgtctcctggtattgagagccctcagttcagctgtccccgccaacctgcatctgctgctgagaccagtggcactggcactccctgacctgcggcaggttgcggaacttacgctgctcggggccggcatgcgggacgcctttcaaatggcgactaggctgagcaaatttttctccctggagagagagttggtgtcaggcccgctcccctgcaggctgccgttgttgaaacaaatactcgaggacaccatcagaacactgaatgtcaccaaggaagaacccaagtgtcagaagccacgatctctcgcggctatagaggaggccgccttattgagaagtccccttttctcgatattgaacggactacacctccataacttgagggggcttctttgcgcccttttcccatctgctagtcaggtgctggccgagccaatgacctataagctgatgaaacccttggttgtggaggagctgcaacaagtcggactggatccatcccctgatattcttggatccctggagcagttatctcaggcactcagccgcgctagcggcatactgttgctgggccctgcgggttctgggaaaaccacctgctggcacagcttgtttaagattcagaatcgccttgcagcaatggaagacacaagcactcagggctgccagcctgtggaaattacgcatctctaccccagcggcctgtcaccccaggaattcctcggttggttggaggggtcctgctggcaccacggcatattccccaaagtcctgcgcgcagccgggcagtgtaataacatgggccagaagcgacaaaccgaggaatcaattggtattcagcactggatcatttgcgatggggcctccaatggagcgtggctggactcaatcacttgccttctatctgagctcccacaacttagtttgccctctgggcagcagattgctcgaccccctggcacctttctactcatggaggtggctgatacaaccggcatttcacccactgttgtcggctgttgcgcccttgtgtggtgcggaggcgagcaaacttggcagtgcatcctttctgctctgatggcatctctgccctacgagtatcggcttcagcataggacggtagctgagttaaatcacatggcagaagtattggttcctgcgacacttcgattcctgacctgtcaaggggttagctcactgctccaggtccatggtcagcaagcagtctgcgccggtgtggccgaggtaactagcatggctaggattctccactcactgctggatcttcacctgagactcaaagaagaaaaagcccccggcccagaggacctgagctatagcgaccctgtggcccagtcattccggtcctccaagagtagcttcttgaatcgaagtcaggtagattccgacgacgtacctgacaagtgtagagaacatctcctggccgtgtcttcttttttattcgctcttatctggggctttggggcacaccttccaagtcgcttttggccaatttttgacaccttcataagggactccattagcaggctctctaattaccctgagccacccccatctgcgctcgtgtttgaccttcacgtttctccagaggacggaacactggtgcccttcactggccagtacctcagcagccatataaaaggcactttggggacatttcatccatcaattcagaccgaaaggcttttatatgtcgtcgacttgcttctttccggcggccagcccgtcctcctcgctggcgaagcggcaaccggtaaatccgctttcgtggaagtgctggtagagccgcatcatccctatatttatagcccaattcatcccgctttttcgtcctcacacttgcgactcttgctttcgaggggtatccagggacagactcaagcgtccccccagcctggtcaccaccaagatagtaaacctagcctgttgtttcttctcgaagaccttcatctagccaccagcgacccagagaaatcctgccaaccagtgctcgagactttaaggcaggccatggatggaacagtgtacgcccactccactctagagctgcagaccctccagcccacggtgaatttcctcgccaccgtgaccgttccaggctattgtgaaagacccctgtgcccacgactcttccgcttgttcactgtgctggcactcgagagcatgacacaggccaccctcctagaacgccatgttcctataatccaggcctggctggagcggtttcccagtgtcgagcgagaacgcgcccttgccaggggattagtccgtgcctctgtcgaggcctgggaggcagtttgtaattgttttatgccatctcccctccatccacactatcactttagcctacactctgtctcacatctgctgtcatcactgcaactgctcccaaaccgaacaggaagtcgggggttcgtcgattacccgaaccatcaagagcatttacgcagagttagtggcctgcgaggcacctgtctgaccgtgatgatggccacacgcaacgtcgtgaggctgtggctgcatgaggcccagagaaccttttgcgatcggctcgacagccccagggaaagatcatactgcgcgaaattactgctggtcgtcgcacagtctgtattttgttgcgggcccggccctcagcacttgggcaaggaccatcaggagtcggaggaagaggaagaggaggagcgggtgccagaagtggaaagcgaaggagagcttgctcagtgggaggacttcagtaacagtaactccgaaaccgaggaagaggaggagccctacggcctgcaggtggccagggtctctaatagtcgggatcccagtcttacaccttctataggacccgtgagtaggggaatgaaggaaagtatttcgcacaagatcaggcaggaaaaagggacaagagcaagtaactataggctccaagtgaggcggagctttaaaacatggtggcagaagaagcctcaaatggatctgatcagccccctcctgttacccgttctgcttcttcacccccaggaaaagccgtccgatttggtcttttcacaggaactgattctgggcccgaactcagagactccaaatctctacctggaacgccagtgggagaaattggaagagcagctggctacaagcgcagcccagttaaagctgtctccccatttagcccgttgccattcaatggcgcagcatgtagctcggttagtgcgtgtcctcgctcggccgagacagcacgggctacttctgagcggtgccctgggaacaggtaggcatactgctataaccttggctagctccatctgtcaagcccattttttccacctgccctccgggtccgaagaggccatcctgcagtgcctgcgtgatgccagctggcatgccggcatgctcagccaacctgtcgcacttctagtaccatccggcgttgatctgaccacacttcaccgcttattagccttagcgactagcggctcattccccggtcagtacactgaggcagacttggaccgcatcggagagcacttgcccagagagaacctgggggtgaagcagaatatcaaaaaggaaatggtcctgcaacgttttcatcagcaggtgtgtagccatctacatctctttttcttgataggtgataaacaggcccataaacaattgccatccactctgttcctgaggctcctccagctggccaccgcatcaatcgatcgttatgagccctgggatcaagctgctctcgcgaaggttgcccagcatcacctggaaggtgcccaaagtgtacctctggacgatggaagctggaagtaccctgatttacaggcatccatacccagcgttgccaaggctatggctttgattcacttatccgctacacactaccacgaacacttgtgtccggcattgcccctggttacccctaagacattcctcgacttcctggacactttcttgatgctgcagcaacagacaatcctgaagatcaaaaataaagcacagcgggtacagaatgccctcgagaatctacgaatgctgatcaaggagcacggcactcacgccaatctgatcttcgaccttgaacaacaactgaaggactctggcaaatctctgagcatgtttcaacagcaattagagcagagcaaattgctgtataaacagcagctggaagagtgtcgtcatcaggaaaatttgatcgaaaatctagcccgtcagcgggacgctctgcaggctcagcgcgaagcatttctggagcagatgtctaaggcttttctcgaacccctgtcccagttacaggtggctgacttcgaggaaatccgctcctatcgggccccccctgaatctgtggtgcgggtcacagacgctatgtgcgacctgttccaccatgagactgggtgggcttctgctaagcagttactatgcaccgaggatttttaccaagaattagtgttcttccctaaagagaagatcaccgattccgaattgatcaagctgcacttgatcctgaaggcacccgggatggatgacgctgctctcagagcagtgagcagaccagcggcctcactggcagcatggctgtgggctgtgcttcattacggactggcccactgccgtggattgcctactgacctcctcttacagcaggtcgaagccactctgacccgagaacaagcccgtttagggtattatcaatttcaggcccaggagactttggagcataatcttgccttagcaaagatggtggaggatgcccaggcaagccacaattgcgtggcaaagacgctctcccaggcccagtgtgggcagtaccataaatggcccatgaaggctgcactgctgacacccatgagagcttggaccacacaactacagaagctcaagggcaggtgcatgaccgtctttggcgatactctcctgtgttcggccgctatcatttaccttgggccattcccccctcttcgcagacaggaactgctcgatgaatggctggctctctgtaggggcttccaggaggctctcgggccagacgacgttgctcaagctttgaaaagaaagcaaaaaagcgtctcaattcctccgaaaaaccctttgctggccacacattccccgttcagcatcctctcgctcctcagtagcgagtcagagcaataccagtgggacggaaacctaaaaccacaagctaaaagcgcacatctggcgggtctcctgctgcgtagcccaacacattatagttcctgcagatggccactacttcttgatccatctaatgaggcattgatttggctggatcccctccccctcgaggagaataggtccttcgctccagctctgaccgagggccgggggaaggggcttatgagaaaccagaagagggaatctaagactgacatgaaggaggaggatgatgagagtgaggaatctaacgaagccgaagatcagacgaaggaacagaaagccgaggaacggaaaaatgagcaagaaaaggaacaagaggaaaacgaagaaaaagaggaagaaaaaactgagagtcaaggctccaaacctgcctacgagacccagttgccgagtttgccatacctttcagttctttcgggtgccgaccccgaactgggttctcagttgcaggaggccgcagcgtgtgggctgccagtgctgctcactaacgtcgagctgggattgggctgtgaggaattgcaatggctcttgcaaagagagcagctcagccctcctcaagtccagcctgggttttgtctctatctgtctacaacactgagtctgtgcgccatggaaaaggtcctaggctgtgagcttcttaaggggctgaacgtgcttgacttaggcctgaacatggaaattctggaggagcagatgctccacgagattctgtgtcgggaatacccagagctcgagaccaggtggcaagatctgaagattcgggctctggacacttgtaaggcagtggaagcagccgaggaaaggctgttgaccatgctcctctttcagaaccctaagaggcaaaaacccgcaaagtttctccgcaatattgtgcgggcccagggtaagctgtgccaactgcgcgcccattgtgaggagctcgaaggtcagaaattacaggaaatggtgctctgggcaccgtaccggccagtggtgtggcatggcatggccatggtgaaagccctgtcccagctgcagaacctccttcccctgttttgtatgtccccggagaactggttggctgtcacaaagcaggctctcgacagtatgaagccgcgggagattaatcacggggaggacctcgctagtcatctcctccagctcagagcacatctgacgaggcagttactgggttccacagtgaccgcgctcgggcttacacaggtgccccttgtcggagcgctgggagctcttgcactactgcaagcaacagggaaggcctctgaactggagaggctggcactgtggcccggtctcgctgcaagtccaagcacagttcattccaaacctgtctccgacgtcgctagacccgcctggctgggtcccaaagcgtggcatgagtgcgagatgctggagctgttgcccccatttgttggtctgtgtgcaagcttggccggtcattcttccgcttggcaggcgtacctgagtctgtcctccactgtgctgggccccgctccaggcccaggtcccgagcctctctctctgctgcaaaagctgatactttggagggtattgaggcccgaatgtttagctggcgcattagcagactttactacaagccttcttggacgccctctggatgagaacacatatgcccccactatgcccttcaagcattcccaggctacgcagcccatgctgatcctgttgcctcccccaggccatcctagtgcgacactacatcccttgacggttattcagaagctcgccgccaaatatcagcagggccaaaagcagctgcaggttatcgcattgggtagtgaggcctgggaccctgtgtcggtggttgtgagtaccctttctcaagctatgtatgagggccactggctagtcctcgacaattgtcacctcatgcctcactggcctaaggagctgttgcaactactcctcgaactactcggacgggccaaagtcgttgccgacctggaatccgaacagctgctagatcaaccggagagccgtaatgtcagcactgttcacagggacttccgactctggctcattgtgcccgctgaatcaagtgcttcgcttcccgcagtcctgactcagcattcaatgcctgtcttctggaaccagtccttggagttgggtcacgtgctaatcgatagcgtagagctagcgcagcaggtgctctacatgcaacctcccacccaggcattaccactcctgctactccacggactgctgcttcaccgccagttatatggcaccaggctacaggcacatcgcggcaggtggtcacaagtcacacttacccaggtcctgcagactcaggaccagttatgggcttcactatctaaccccagagccgctatgcaggagttagctgccagcgtgttttacggaggaccactgggtgacactgaggatagagaggcgctgatatccctcactcaggcctgtctgagtccatcttccgggagttgggtccagcctcataccccgcagagcctgctggctacactaatgcctctgccagaactgagggagctggacgctatggctgagtgcaaggcacagatgcatctgctacctagtccacccgaaccccgtttgtgcggtctgtccgaggggccccaagcatggctgctgcggagacaatcgagagccctgttgtctgccctgcagcggtcttctccagtctgggttccagagtccaggaggggtgcccaactggcagagcgccggctcagacagcgcttggttcaggtcaacaggaggctggagtccctccaggacttgctaacccatgttatacggcaggatgagagtgatgcaccatggtcggtgctgggtcccaacgcccgccgccccctagaaggagtgctggagactgaggcgctggaactgtcacagctggtgggaaccttgcagagggatctggattgcttacttcagcaacttaagggggcccccccttgtcccagccgccgctgtgctgccgtggctcacgctctgtggacaggaaggctcccgctgccatggaggccccatgctccggcaggtccacagcccccatggcattggctcagacagcttagtagacggggtcagctgctcgtacggtacctgggcgtcggtgcagacgcaagtagcgacgtcccagaaagggtgtttcatctttcagcgttccgccatccccgccgtttactcctcgcactaaggggggaagccgccttagatcagaacgttcctagttccaactttccgggaagtcgagggtccgtgtcgtcacagctgcagtataagaggcttgagatgaattcaaatcctttacattttcgggtggagaacggtcccaatcctaccgtgccagagcgcggattgcttctgatcgggcttcaggtacttcacgcagagtgggatccaatcgctggtgctctgcaggatagtccatcctcacagccttccccactgccgcccgtgtctattagtacccaggctcccggaacatccgatctacctgcccccgccgacttgaccgtgtatagctgtccggtctacatggggggccctctgggcacagctaaactacagtccagaaacatcgtcatgcatttaccgcttcccaccaagctgacccccaatacctgcgtccagagaagagttcacgtctgctcgcctcctctgtcttag

SEQ ID NO: 239420 - DNA, 14262 bp, Artificial Sequence
  derived and/or modified sequence
atggtgcctgaggagcggcgggtgggcctgagcagtgatgagaccagcagtgacagcctgaagtcctggcacagcatctgtgtgctggacagcaaggagcagcccctggcctgccagcagaagcagaggcagtttgtgaagcctgtgacagagagcgagcagcccaccgtgctggagctgctgctggccgagctgcggaccctcttctctgctgtgctgcaggacagcagccctgctgcctggagatacctgcatgctgtgctgggcctgctgcccccctaccgggagctgctggtgggccacctggacctgctgcccttcctggagcagctgtactgctgggccccctgggtgcagacccacctgcacctggacctgctgggcgccatcgtgcaggccttccccccagacagcagcctgctggacagcgccagccatgctgactgctgcccccagaagaggcggctgcaccaccggcccccctgcccagcctgcccctttgtgcaggcccagtggagccggcagcaggtgaaggaggagctggccacctggctgcggcccctgaccctgcctgagctgcagcgctgcctgggcatcgtgggcgcccaggtggccctggaggaggccgtgtggctggatggcctgagcctgctgcccctggccctggccgctgacatccctgtgcgctatgagagcagtgacacagacaatgctgaggtggagcctgtgggcaggaaggagaccaggagccagctggactatgaggtgccccgggagaaggccttccagaagagcagcacaggcttcagccctgagaccagcttcctggacagccaggtgatgacagccctgaagatggagcgctacctgaagaagatccacttcctgtacctgaatgtggcccccagccgctacttccggccctacagcctgatggtggtgcccccagacaaggtgaaccctgagcactacatcttcagccccttcggcatcctgcacgtgcaccctgtggagggcagcgagaccatgaccctgggcacctggcaccaccactgtgtgctgtggcagcagctgcagttcatccccttcttcaagtactgcctgctgaggaagagcttcacctgctggaagaagaatgtgcggctgcagggcctgcaccggctgcagaagttcctggagaaccacctgctgctggccgtgccccactttggagctggcctgctgcacatcagccggctgctgcaggagctgcacagcgtgtcctggctgccccaggagctggaccgctgctatgagctgctggacctgcagacagccctggccgaggagaagcacaaggccctgcggctgctgcaccgctgcctgaacctgtgcaccagcatcctgcggctggtgcatgaggacacctaccacatgcagcagtgcctgcaggagcgggtgcagaactgtgaccgcatcagaacaggccagggcagcatctacctgcagagggtgcagcacaagcagctggagcagaagctgaagcaggccgaggcctggtggctgcagctgggcaagtttgcccggctggtggactacatgatctgccagagcctcatctctgtgctggaggagcagatcaccagctttgtggccaacatcctgcaggccccccggcagaagcccttcctgagcagccagctggtgtttgatgaccacggccagctgagccacgtgccctgtgtggagaacatgatccagaccctgactggaggcctgcagagcgtgaagaccagcgccctgcaggtggtgcagagcgctgacctgaagaccagcagtgacagcctgtacagcgaggaggaggatgaggaggaggacagcaaggatgagttcctgatgcccaagttccagggccagcccagtgatgctgtgtccatcttctgtggccccaacgtgggcctggtgtggccctggaagagccaccccatcgccggcatcctggaggtgcggggctgccgcctgcggggccagtacttcccccacaactacaagcagctggaggaggacctggacaacaaccccaagatccagcaggccctgaacatccagcaggtgctgctggagggcgtgctgtgcaaggtgcaggagttctgccgggagcaccactggatcaccggcatctatgagttcctgcagagctggggcccccagaagctggaggacatgagaggaggccccatcaagaactacgtgaccctggtgtcccggctgaatgtgtggcaggcccgggtgtcctccatgcccatcgagctgctgaccaagggcggcctgctgctgctgagctgccatgatgtgcaggccgagatggagagcaagctgaacagcatcaggaaggacatcctggcccacgtgcagaatgaatgctggaacctgagccagcagctgatgacagagctgacagacttcatgcacatcttccgcaccatcaacagcgacatccacgccatcgcccagtgcacccagaagctgaatgaggccaatgagcagtatgtggagctggaggagaggatggagtatgtgcgggccctgcacgagctgatccggaaccacttcagcctcttcagcgcagaaaatgaggccctggacatctctgtgcggcggcagtttggagagagccccatccccccctgccccccaccaccccagccccacctgctgcactgccccctgctggccccccagctgctggacatgtgggaggccttccagtttgagaagagccaggccagcgagttcctgctgagcaagagacatgccatcatgcccaagctgcagcagctgatggctgctgccctggccgagctggagggcctgctggccaaggccctgagcggccccttcatggaccccacccaggaccagaggagcacagagcaccagctggtgtccctggagcggcagttccagaacacagtgtctgacctgtctgagctgcaccacgcctatgccatcttcacagaagatgagacccctgtgcccctgcccatctgtggcacccggcccatcgtgcagcagcagaggatctggcacctgtacagagtcatcagcgagaacatcagcgagtggaagtgcatggcctttgccaagttctccccagccatggcccaggagaagacagagggctggctgacagaagctgccaggatgagcaccaccctggagctgcacagccctgtgctgcagcactgcatgaggatcctgggggagttccgcagctacctgcccctgctgaccaagctgggcagcctgcacccccagagcctgaactgccagtgcctgctgcgggccctgggcctgggcagcctgcagaccatcgagctgctgaccctgggccagctgctgacctaccccctgctggagtttgctgaccgcatcaaccaggtgtggcagaatgaaaatgaaagaatccacgcccaggagaccatccggcggctgcagcgctactgggaggcccggcagctgcggctgctgaacttcatcctgcacgtgccctatgagcccccagccagcgagaggagcaagaggcaggtgctgcggagcccccagtgggaggtggtggacaaggacagcggcaccttcatcctgagtgactacagcaacctgcaggacagcatccaggagagcctgcaggtgctgagcaagatcctggccatcgagaagagcggggacctgaacaagatcgccctggagtgggtggccatcatgcacggcctgggcgccctgctggaggtgtggctgaccttccagcagaagtggatcttcctgaacaaggtgctgcacgagatgaagatccagttccccaatgctgacctgaacagccgcttcaaggtgatggatgaccagtaccgcaccctgatgaggatctctgtggccgaccccatggtgctgagcctggtggtgcccagcgctgagaggagcccctacttccagggccagcagctgcagcagctgctgcaggccggctctgtggagctggagggcatcatcatgagcctggagagcgtgctgtatggagtgtgtgcccacttccccaggctcttcttcctgagtgacagcgagctggtggccctgctggccgcccggctggagagctgtgaggcccagctgtgggtgcggcgctgcttcccccacgtgcatgctgtgtccttccgcagctgccccactggagagaagaacacagatgactgggagagcagccccaacacccagacccaggtggaggccctggccgtgctgggcgccggcggggaggaggtgaagctgcagggccccctgcccctgcacccagacctgcccaagtggctggccagcctggagaagtgcctgcggctggccctggtgcacatgctgcagggctgtgtggccgcccggctggcccggggccccagcctgggggaggccctgaagcagctgcccaagcagaacaagctgtacctgcagctgtatgtgcagcactggattgacctggtgcaggccttcccctggcagtgtgtgctggtggccgaggaggtggtgtggagggctgagatggaggaggccctgctggagtggggcaccctggccatggtgtccatgcacatgaggaagctggaggtgctggtgaacttcatgagggcccagagggccagccagggcggccagagcctgcccagcgtgcggcagaccagcctgctgagcgccctgctggtgatggctgtgacccaccgggacatcgcccagctgctggagcagcaccaggtgtctgacctgacagacttccactgggtgcggcagctgaagtaccacctgggcagcccccacatcatccccaagagccccctgcagagcctgaagaccatcgccagcagcgagcccagcctgagccctgctgcctgctggattgatgtgctgggccgctccttcctgtacaactatgagtacctgggcccccggctgggccccctgcccagcctgctgcctgagaggcctgccctggtgctgctgctggccctggaggaggtggcctgtggcaccgtgctgggccccaatggagtgggcaagagggccatcgtgaacagcctggcccaggccctgggccggcagctggtgatgctgccctgcagcccccagatcgaggcccagtgcctgagcaactacctgaatggagccctgcagggcggggcctggctgctgctggagaaggtgcaccagctgcccccaggcctgctgagcgccctgggccagaggctgggggagctgcaccacctgtatgcccccctgtaccaggaggccagcaggaacaccagcaccatcgaccccacccagccccagctgctgggcagcagcttctttgagaagcaccacgtgtctgtgcggctgggctacggctgcctgctggtgctgcgggccctgagcagcgctgtgcctgccaacctgcacctgctgctgcggcctgtggccctggccctgcctgacctgcggcaggtggccgagctgaccctgctgggcgccggcatgagagatgccttccagatggccacccggctgagcaagttcttcagcctggagcgggagctggtgtctggccccctgccctgccgcctgcccctgctgaagcagatcctggaggacaccatccgcaccctgaatgtgaccaaggaggagcccaagtgccagaagcccaggagcctggccgccatcgaggaggccgccctgctgcggagccccctcttcagcatcctgaatggcctgcacctgcacaacctgcggggcctgctgtgtgccctcttccccagcgccagccaggtgctggccgagcccatgacctacaagctgatgaagcccctggtggtggaggagctgcagcaggtgggcctggaccccagcccagacatcctgggcagcctggagcagctgagccaggccctgagccgggccagcggcatcctgctgctgggccctgctggcagcggcaagaccacctgctggcacagcctcttcaagatccagaaccggctggccgccatggaggacaccagcacccagggctgccagcctgtggagatcacccacctgtaccccagcggcctgagcccccaggagttcctgggctggctggagggcagctgctggcaccacggcatcttccccaaggtgctgcgggccgccggccagtgcaacaacatgggccagaagaggcagacagaggagagcatcggcatccagcactggatcatctgtgatggagccagcaatggagcctggctggacagcatcacctgcctgctgtctgagctgccccagctgagcctgcccagcggccagcagatcgcccggcccccaggcaccttcctgctgatggaggtggccgacaccaccggcatcagccccaccgtggtgggctgctgtgccctggtgtggtgtggcggggagcagacctggcagtgcatcctgagcgccctgatggccagcctgccctatgagtaccgcctgcagcacaggacagtggccgagctgaaccacatggccgaggtgctggtgcctgccaccctgcgcttcctgacctgccagggcgtgagcagcctgctgcaggtgcacggccagcaggccgtgtgtgccggcgtggccgaggtgacctccatggcccgcatcctgcacagcctgctggacctgcacctgcggctgaaggaggagaaggcccctggccctgaggacctgagctacagcgaccctgtggcccagagcttccgcagcagcaagagcagcttcctgaacagaagccaggtggacagtgatgatgtgcctgacaagtgccgggagcacctgctggccgtgagcagcttcctgtttgccctgatctggggctttggagcccacctgcccagccgcttctggcccatctttgacaccttcatccgggacagcatcagccggctgagcaactacccagagcccccaccttctgccctggtgtttgacctgcacgtgtccccagaagatggcaccctggtgcccttcaccggccagtacctgagcagccacatcaagggcaccctgggcaccttccaccccagcatccagacagagcggctgctgtatgtggtggacctgctgctgagcggcggccagcctgtgctgctggccggggaggccgccaccgggaagagcgcctttgtggaggtgctggtggagccccaccacccctacatctacagccccatccacccagccttcagcagcagccacctgcggctgctgctgagccggggcatccagggccagacccaggccagcccccagcccggccaccaccaggacagcaagcccagcctgctcttcctgctggaggacctgcacctggccaccagtgaccctgagaagagctgccagcctgtgctggagaccctgcggcaggccatggatggcaccgtgtatgcccacagcaccctggagctgcagaccctgcagcccaccgtgaacttcctggccaccgtgacagtgcccggctactgtgagcggcccctgtgccccaggctcttccgcctcttcaccgtgctggccctggagagcatgacccaggccaccctgctggagagacatgtgcccatcatccaggcctggctggagcgcttccccagcgtggagcgggagcgggccctggcccggggcctggtgcgggcctctgtggaggcctgggaggccgtgtgcaactgcttcatgcccagccccctgcacccccactaccacttcagcctgcacagcgtgagccacctgctgagcagcctgcagctgctgcccaacagaacaggcagccggggctttgtggactaccccaaccaccaggagcacctgcggcgggtgtctggcctgcggggcacctgcctgactgtgatgatggccaccagaaatgtggtgcggctgtggctgcacgaggcccagaggaccttctgtgaccggctggacagcccccgggagaggagctactgtgccaagctgctgctggtggtggcccagagcgtcttctgctgcggccctggcccccagcacctgggcaaggaccaccaggagagcgaggaggaggaggaggaggagcgggtgcctgaggtggagagcgagggggagctggcccagtgggaggacttcagcaacagcaacagcgagacagaggaggaggaggagccctacggcctgcaggtggcccgggtgagcaacagccgggaccccagcctgacccccagcatcggccctgtgtcccggggcatgaaggagagcatcagccacaagatccggcaggagaagggcacccgggccagcaactaccgcctgcaggtgcggcgctccttcaagacctggtggcagaagaagccccagatggacctgatcagccccctgctgctgcctgtgctgctgctgcacccccaggagaagcccagcgacctggtgttcagccaggagctgatcctgggccccaacagcgagacccccaacctgtacctggagcggcagtgggagaagctggaggagcagctggccaccagcgctgcccagctgaagctgagcccccacctggcccgctgccacagcatggcccagcacgtggcccggctggtgcgggtgctggcccggccccggcagcacggcctgctgctgagcggggccctgggcaccggccgccacacagccatcaccctggccagcagcatctgccaggcccacttcttccacctgcccagcggcagcgaggaggccatcctgcagtgcctgagagatgcctcctggcacgccggcatgctgagccagcctgtggccctgctggtgcccagcggcgtggacctgaccaccctgcaccggctgctggccctggccaccagcggcagcttccctggccagtacacagaagctgacctggaccgcatcggggagcacctgccccgggagaacctgggcgtgaagcagaacatcaagaaggagatggtgctgcagcgcttccaccagcaggtgtgcagccacctgcacctgttcttcctgattggagacaagcaggcccacaagcagctgcccagcaccctcttcctgcggctgctgcagctggccacagccagcattgacagatatgagccctgggaccaggccgccctggccaaggtggcccagcaccacctggagggcgcccagagcgtgcccctggatgatggctcctggaagtacccagacctgcaggccagcatccccagcgtggccaaggccatggccctgatccacctgagcgccacccactaccacgagcacctgtgcccagccctgcccctggtgacccccaagaccttcctggacttcctggacaccttcctgatgctgcagcagcagaccatcctgaagatcaagaacaaggcccagagggtgcagaatgccctggagaacctgaggatgctgatcaaggagcacggcacccacgccaacctgatctttgacctggagcagcagctgaaggacagcggcaagagcctgtccatgttccagcagcagctggagcagagcaagctgctgtacaagcagcagctggaggagtgccgccaccaggagaacctgattgagaacctggcccggcagagagatgccctgcaggcccagcgggaggccttcctggagcagatgagcaaggccttcctggagcccctgagccagctgcaggtggccgactttgaggagatccgcagctaccgggcccctcctgagagcgtggtgcgggtgacagatgccatgtgtgacctcttccaccacgagaccggctgggccagcgccaagcagctgctgtgcacagaggacttctaccaggagctggtgttcttccccaaggagaagatcacagattctgagctgatcaagctgcacctgatcctgaaggcccctggcatggatgatgctgccctgcgggctgtgtccaggcctgctgccagcctggccgcctggctgtgggccgtgctgcactacggcctggcccactgccggggcctgcccacagacctgctgctgcagcaggtggaggccaccctgacccgggagcaggcccggctgggctactaccagttccaggcccaggagaccctggagcacaacctggccctggccaagatggtggaggatgcccaggccagccacaactgtgtggccaagaccctgagccaggcccagtgtggccagtaccacaagtggcccatgaaggccgccctgctgacccccatgagggcctggaccacccagctgcagaagctgaagggccgctgcatgacagtgtttggagacaccctgctgtgcagcgctgccatcatctacctgggccccttcccccccctgcggcggcaggagctgctggatgagtggctggccctgtgccggggcttccaggaggccctgggcccagatgatgtggcccaggccctgaagaggaagcagaagtctgtgtccatcccccccaagaaccccctgctggccacccacagccccttcagcatcctgagcctgctgagcagcgagagcgagcagtaccagtgggatggcaacctgaagccccaggccaagagcgcccacctggccggcctgctgctgcggagccccacccactacagcagctgccgctggcccctgctgctggaccccagcaatgaggccctgatctggctggaccccctgcccctggaggagaacagaagctttgccccagccctgacagagggccggggcaagggcctgatgaggaaccagaagcgggagagcaagacagacatgaaggaggaggatgatgagagcgaggagagcaatgaagctgaggaccagaccaaggagcagaaggccgaggagaggaagaatgagcaggagaaggagcaggaggagaatgaggagaaggaggaggagaagacagagagccagggcagcaagccagcctatgagacccagctgcccagcctgccctacctgtctgtgctgagcggggctgaccctgagctgggcagccagctgcaggaggccgccgcctgtggcctgcctgtgctgctgaccaacgtggagctgggcctgggctgtgaggagctgcagtggctgctgcagcgggagcagctgagccccccccaggtgcagcccggcttctgcctgtacctgagcaccaccctgagcctgtgtgccatggagaaggtgctgggctgtgagctgctgaagggcctgaatgtgctggacctgggcctgaacatggagatcctggaggagcagatgctgcacgagatcctgtgccgggagtacccagagctggagacccgctggcaggacctgaagatccgggccctggacacctgcaaggctgtggaggccgctgaggagcggctgctgaccatgctgctcttccagaaccccaagaggcagaagccagccaagttcctgagaaatattgtgcgggcccagggcaagctgtgccagctgcgggcccactgtgaggagctggagggccagaagctgcaggagatggtgctgtgggccccctacagacctgtggtgtggcacggcatggccatggtgaaggccctgagccagctgcagaacctgctgcccctcttctgcatgagccctgagaactggctggccgtgaccaagcaggccctggacagcatgaagccccgggagatcaaccacggggaggacctggccagccacctgctgcagctgcgggcccacctgacccggcagctgctgggcagcacagtgacagccctgggcctgacccaggtgcccctggtgggcgccctgggcgccctggccctgctgcaggccaccgggaaggccagcgagctggagcggctggccctgtggccaggcctggccgccagccccagcacagtgcacagcaagcctgtgtctgatgtggcccggcctgcctggctgggccccaaggcctggcatgaatgtgagatgctggagctgctgcccccatttgtgggcctgtgtgccagcctggccggccacagcagcgcctggcaggcctacctgagcctgagcagcacagtgctgggccctgcccctggccctggccctgagcccctgagcctgctgcagaagctgatcctgtggagggtgctgcggcctgagtgcctggccggggccctggccgacttcaccaccagcctgctgggccggcccctggatgagaacacctacgcccccaccatgcccttcaagcacagccaggccacccagcccatgctgatcctgctgcccccacctggccaccccagcgccaccctgcaccccctgaccgtcatccagaagctggccgccaagtaccagcagggccagaagcagctgcaggtgattgccctgggcagcgaggcctgggaccctgtgtctgtggtggtgtccaccctgagccaggccatgtatgagggccactggctggtgctggacaactgccacctgatgccccactggcccaaggagctgctgcagctgctgctggagctgctgggccgggccaaggtggtggccgacctggagagcgagcagctgctggaccagcctgagagcagaaatgtgtccacagtgcaccgggacttccggctgtggctgattgtgcctgctgagagcagcgccagcctgcctgctgtgctgacccagcacagcatgcctgtgttctggaaccagagcctggagctgggccacgtgctgattgattctgtggagctggcccagcaggtgctgtacatgcagccccccacccaggccctgcccctgctgctgctgcacggcctgctgctgcaccggcagctgtatggcacccggctgcaggcccaccggggccgctggagccaggtgaccctgacccaggtgctgcagacccaggaccagctgtgggccagcctgagcaacccccgggccgccatgcaggagctggccgccagcgtcttctatggaggccccctgggggacacagaagatcgggaggccctgatcagcctgacccaggcctgcctgagccccagcagcggctcctgggtgcagccccacaccccccagagcctgctggccaccctgatgcccctgcctgagctgcgggagctggatgccatggccgagtgcaaggcccagatgcacctgctgcccagccccccagagccccggctgtgtggcctgtctgagggcccccaggcctggctgctgcggcggcagagccgggccctgctgagcgccctgcagaggagcagccctgtgtgggtgcctgagagcagaagaggagcccagctggccgagcggcggctgcggcagaggctggtgcaggtgaacagaaggctggagagcctgcaggacctgctgacccacgtgatccggcaggatgaaagtgatgccccctggagcgtgctgggccccaatgcccggcggcccctggagggcgtgctggagacagaggccctggagctgagccagctggtgggcaccctgcagagggacctggactgcctgctgcagcagctgaagggggccccaccctgccccagcagaagatgtgccgctgtggcccacgccctgtggacaggccgcctgcccctgccctggaggccccacgccccagctggcccccagcccccctggcactggctgcggcagctgagcagaagaggccagctgctggtgcgctacctgggcgtgggcgcagatgccagcagtgatgtgcctgagagggtcttccacctgagcgccttccgccacccccggcggctgctgctggccctgcggggggaggccgccctggaccagaatgtgcccagcagcaacttccctggcagccggggctctgtgagcagccagctgcagtacaagaggctggagatgaacagcaaccccctgcacttccgggtggagaatggccccaaccccaccgtgcctgagcggggcctgctgctgattggcctgcaggtgctgcatgctgagtgggaccccatcgccggggccctgcaggacagccccagcagccagcccagccccctgccccctgtgtccatcagcacccaggcccctggcaccagtgacctgcctgccccagctgacctgactgtgtacagctgccctgtgtacatgggcggccccctgggcacagccaagctgcagagcagaaatattgtgatgcacctgcccctgcccaccaagctgacccccaacacctgtgtgcagaggagagtgcacgtgtgcagcccccccctgtcctag

SEQ ID NO: 239421 - DNA, 1893 bp, Artificial Sequence
  derived and/or modified sequence
atggagaaggtgctgggctgtgagctgctgaagggcctgaatgtgctggacctgggcctgaacatggagatcctggaggagcagatgctgcacgagatcctgtgccgggagtacccagagctggagacccgctggcaggacctgaagatccgggccctggacacctgcaaggctgtggaggccgctgaggagcggctgctgaccatgctgctcttccagaaccccaagaggcagaagccagccaagttcctgagaaatattgtgcgggcccagggcaagctgtgccagctgcgggcccactgtgaggagctggagggccagaagctgcaggagatggtgctgtgggccccctacagacctgtggtgtggcacggcatggccatggtgaaggccctgagccagctgcagaacctgctgcccctcttctgcatgagccctgagaactggctggccgtgaccaagcaggccctggacagcatgaagccccgggagatcaaccacggggaggacctggccagccacctgctgcagctgcgggcccacctgacccggcagctgctgggcagcacagtgacagccctgggcctgacccaggtgcccctggtgggcgccctgggcgccctggccctgctgcaggccaccgggaaggccagcgagctggagcggctggccctgtggccaggcctggccgccagccccagcacagtgcacagcaagcctgtgtctgatgtggcccggcctgcctggctgggccccaaggcctggcatgaatgtgagatgctggagctgctgcccccatttgtgggcctgtgtgccagcctggccggccacagcagcgcctggcaggcctacctgagcctgagcagcacagtgctgggccctgcccctggccctggccctgagcccctgagcctgctgcagaagctgatcctgtggagggtgctgcggcctgagtgcctggccggggccctggccgacttcaccaccagcctgctgggccggcccctggatgagaacacctacgcccccaccatgcccttcaagcacagccaggccacccagcccatgctgatcctgctgcccccacctggccaccccagcgccaccctgcaccccctgaccgtcatccagaagctggccgccaagtaccagcagggccagaagcagctgcaggtgattgccctgggcagcgaggcctgggaccctgtgtctgtggtggtgtccaccctgagccaggccatgtatgagggccactggctggtgctggacaactgccacctgatgccccactggcccaaggagctgctgcagctgctgctggagctgctgggccgggccaaggtggtggccgacctggagagcgagcagctgctggaccagcctgagagcagaaatgtgtccacagtgcaccgggacttccggctgtggctgattgtgcctgctgagagcagcgccagcctgcctgctgtgctgacccagcacagcatgcctgtgttctggaaccagagcctggagctgggccacgtgctgattgattctgtggagctggcccagcaggtgctgtacatgcagccccccacccaggccctgcccctgctgctgctgcacggcctgctgctgcaccggcagctgtatggcacccggctgcaggcccaccggggccgctggagccaggtgaccctgacccaggtgctgcagacccaggaccagctgtgggccagcctgagcaacccccgggccgccatgcaggagctggccggggagaccctgcccctgcccctgggcgtcatcagcccccaggagagcctggaggagggcggcggcggcatccagttcaccgccctggtgctggccgtggtggagacagagggcactggaacagagcggctgtag

SEQ ID NO: 239422 - DNA, 14262 bp, Artificial Sequence
  derived and/or modified sequence
atggtgcccgaggagcggcgggtgggcctgagcagcgacgagaccagctccgacagccttaaaagctggcacagcatctgcgtgctggacagtaaagagcaaccactcgcttgtcagcagaaacaacgacagtttgtaaaacctgtaactgagtccgaacaaccaaccgtgctggaattgctgctggctgaacttcgaactctgttttcagctgtgctccaggattcaagcccagccgcctggcgttatctgcatgcagttctggggctgctcccgccataccgcgaactgttggtaggacacttggatctgctcccatttcttgaacagctatactgctgggcgccttgggttcagactcaccttcacctcgaccttctaggtgctatcgtacaggcatttcctcccgacagctctctgctggacagtgcatcccatgccgattgctgtccacaaaaaagacggctccatcaccggccgccatgtcccgcctgccctttcgtacaagcccagtggtcacgtcagcaggtgaaagaggaactggccacttggctaaggcctcttaccctgccagagctgcagaggtgcttaggtatcgtgggagctcaggtcgcgctggaagaagccgtctggctcgacggcctgagcttactgccgttagccctggccgctgacatcccagtgaggtacgaaagttctgatacagataatgcagaggtggaacccgttggaaggaaagagacacgcagtcagttggactacgaggtgcccagggagaaggctttccagaaatctagcaccgggttctccccagagaccagttttctggatagccaggtgatgactgccctgaagatggaacggtacctcaaaaagattcattttctatatcttaacgtagcgccttccaggtattttcgcccttactcgctcatggtggttccacccgacaaggttaatcccgaacactatattttctccccctttgggatacttcacgttcatccagtcgaggggagcgaaaccatgaccctgggcacatggcatcaccactgtgtgctttggcagcaactacaatttatcccgtttttcaaatattgtctcctccggaaatcatttacctgctggaaaaagaacgtgcggctgcagggacttcatcggctacagaagtttctagagaatcacctgctgctggccgtgccccactttggcgcgggccttctgcacatttctagattgttacaggagctccatagtgtatcatggttgccccaggaactggaccgctgctatgagctgctggatttgcagaccgccctggcggaggaaaagcacaaggctctgcgactgcttcaccgctgcctaaacctatgcacctcaatcctgcggctcgtgcacgaggatacctaccacatgcaacagtgtctgcaagaaagagtccagaactgtgacagaattcggactggacagggatccatctatcttcagcgagtgcagcataaacaactggagcagaaactcaagcaggctgaggcatggtggctccagctgggtaagttcgccagactagtggactatatgatatgtcaatcactgatcagcgttctggaagagcagatcactagcttcgtagctaacattctgcaggctccccgtcagaagccgtttctgtcctcccaactggtatttgatgatcatggacagttatctcacgttccgtgcgtcgaaaacatgattcaaaccctgaccggggggctgcaatcagtgaagacttcagcgcttcaggtggtgcagagtgcagaccttaagacgtccagtgacagtctctattctgaggaggaagacgaggaagaagatagtaaggatgagtttcttatgcctaagttccagggccagccgtcagacgcagtgagcattttctgtggtccaaatgtgggactggtgtggccttggaagtcccatccaattgcagggatcttggaggtgagaggctgccgcctcagaggccagtattttcctcacaactacaaacagttggaagaggatctcgacaacaaccccaagattcaacaagctttgaacatccagcaagtactcttggagggagtgctgtgtaaggtccaggagttctgccgtgaacatcactggatcacaggcatttatgagttcctgcagtcctggggtccgcagaagctcgaggacatgagaggcggccctattaagaattacgtaacgcttgtctccaggctcaacgtgtggcaagctcgggttagttcgatgccaatcgaacttttgacaaaaggtggcctgctgctgctgtcatgccatgatgtccaggctgaaatggaatcaaaactcaacagtataaggaaagatatccttgcgcatgtacagaacgaatgttggaacttgtcacagcaactcatgaccgagctgacagattttatgcatattttccgcactatcaatagtgacattcacgcgatagcccagtgtacgcagaagctcaatgaggcaaacgagcaatacgtcgaactggaagaacggatggaatacgtgagagccttgcatgaactgattcgcaatcatttctccctgttctccgccgaaaacgaagcgttggatatcagcgttaggcgccagttcggggaatcacctatccctccttgccccccacctccccaaccgcacctgctccactgtcccctgctcgccccacagttgcttgacatgtgggaagccttccaatttgaaaagtcacaggccagcgagttcctcttaagcaaacgccacgcaatcatgcctaagctgcagcagctcatggccgctgccctcgctgaattggaggggctgctcgctaaggctctatcaggacccttcatggacccgacacaagatcagcgttcaactgagcatcagctggttagtttggaacgccaattccaaaacactgtttccgatctctctgagctgcaccacgcgtacgccatatttactgaggatgagactcctgtccccctgcccatttgcggaaccaggcctatagtccagcagcaaaggatctggcatctgtatagagtgatatcagagaatattagcgaatggaaatgtatggcctttgccaaattttcccccgccatggctcaggaaaaaacagaaggttggctcactgaggcagcacgtatgagcacaacactcgaattgcactctcctgtgctacagcattgtatgcggatcctcggcgaatttcgctcgtacctgcctctactcacaaagctgggatccctgcacccacagtctcttaattgccagtgccttctcagagccctggggctggggagcctgcagacgattgagctgctcacacttgggcagctcctgacttacccgctgttggagtttgctgaccggatcaaccaggtgtggcagaatgaaaacgagcgtattcacgcccaagagactattaggcgacttcagcggtattgggaggctaggcaattacgcttgttgaactttatcttgcacgtaccctacgagccgccggcttcggagaggagtaaacgccaggttctgagatcaccccaatgggaggtggtggataaagatagcgggacttttattctaagcgactactccaatctacaggattccattcaggagtctttacaggtcctaagtaagatcctggccattgaaaaatctggcgacctaaacaaaattgctctggagtgggtcgcaatcatgcacgggctgggggcgctgttggaagtctggttaaccttccagcagaaatggattttcctgaataaggtgctgcatgagatgaaaatccagtttcctaacgctgatttgaactcgaggttcaaggtaatggacgaccagtataggacactgatgaggatctccgttgccgaccccatggtgcttagcctggtggtgcccagcgccgagaggagcccttatttccagggacagcagctgcaacagttattgcaggccggttcagtggaattggaaggaatcatcatgtccttagaatccgtactatatggcgtctgcgcgcattttccccggctcttcttcctgtcggattctgaacttgtggcactgctcgccgcccgattggagtcttgtgaagcccagctgtgggtccgccgatgttttcctcacgtccacgctgtatcatttcggagttgtcccacaggggagaagaacacggacgactgggagtcgtctcctaacacacagacacaagtggaagcactggctgttctaggtgcaggtggcgaggaggttaagctgcaggggccattaccactgcatccagatctgcccaaatggctggccagtctcgaaaaatgtctccggttagccctcgtgcacatgctccaaggttgtgtcgccgctcggctagctcggggccctagccttggggaggccctaaagcagcttcctaaacagaataaattgtacctacagctgtacgtccaacactggattgatttggtccaagcatttccctggcagtgtgtgcttgtcgctgaggaggtcgtttggcgagcagagatggaagaggcactgctggaatggggcacactcgctatggtgtcgatgcacatgaggaagttggaggtgttagttaatttcatgcgcgcacagcgggctagccagggaggacaatcccttccgtccgtgcgccagacatccttgctctctgccctgctggtgatggccgtgacgcatagggacatcgctcaactgcttgagcaacatcaagtgtccgatctcacagattttcactgggttcgccaattaaagtaccatctgggatctccacacatcattccaaaatccccactccaaagtcttaagacaatcgcttcaagtgaacccagcctgtcacccgccgcctgctggatagacgtgcttggaagaagttttctctacaattacgaataccttgggccaagattgggcccgctgccatctttgctgcctgagaggcccgccttagtactgctgctagccctggaagaagtagcctgcgggaccgtattaggccccaatggggtgggcaagcgtgccattgttaatagcctcgcgcaggcacttggcaggcagctggtgatgctaccatgcagcccacaaatcgaggcccaatgtcttagcaattatctgaatggcgctctccaaggaggggcatggttgttgctggaaaaggtccaccagcttccgcccgggctcctctctgctttggggcagcgtcttggggagctgcaccatctgtacgcccccctttatcaagaggccagtaggaacaccagtactattgaccccactcagccccagctgctcggaagttccttcttcgaaaaacatcacgtgagcgtgcggctcggctacggatgcctactagttcttcgcgcccttagttctgctgtcccagccaacctccatttactcctcaggcctgtggcccttgccttgcccgacctgagacaggtggcagagctgactctgttgggggctggcatgagagacgcctttcagatggccactcgtctgagcaagtttttcagcctagaacgggagctcgtgtccggtcctctgccatgccgtctgcccctcttgaagcagatcctggaagatacaattagaacactcaacgtgaccaaggaggaaccaaagtgtcagaagcccaggagtctcgcggcaatagaggaggccgcattgctgcgtagccctttgtttagcatccttaatggcctccacctccataatctgcgcggtttgctgtgcgctctgtttcccagcgcttctcaagttctggccgaaccaatgacatacaagctgatgaaaccacttgtagttgaagaactccaacaggtgggcctggatcccagcccagacattctgggatccttagaacagctgtcacaagctctctcccgggcgtctggaatcctgctccttgggccagcgggctctggtaaaacaacttgctggcatagtctattcaaaatccagaaccgacttgcggccatggaagacacgagtacacagggttgccaaccggtggagattactcatctctacccgtccggcctgagccctcaagagttcttgggctggctggaaggcagttgctggcatcacgggatcttccccaaggttttaagagcagcgggccaatgcaacaacatgggccaaaagcgacagacggaggagtccattgggattcaacattggatcatctgcgacggggcctccaacggagcctggctggactctatcacctgcttgctgagtgaattgccgcaactgtccctccctagcggccagcagatcgctcgccctcccggtacctttttactgatggaagttgccgatactaccgggatcagtccaaccgtggtcggctgctgtgcccttgtgtggtgcggcggcgagcaaacgtggcagtgtattctaagtgctctgatggcttccctgccatacgaatatcgattgcagcaccgaacggtggccgagctcaatcacatggccgaggtgctggtgccagcaacattgagattcttaacttgccagggagttagctcattgttacaagtccatggccagcaggctgtgtgcgctggcgtcgccgaggtgacctccatggctagaatcctgcactccctgcttgatctgcacctgcgcctgaaggaggagaaagctcccggccccgaagatctaagttattctgaccccgtggctcaatcattcaggtccagcaaaagctctttcctcaatcggagccaggttgactcggacgacgtgcccgacaaatgcagagagcatctgctcgctgtgtcgagctttctctttgctcttatatggggctttggcgcgcacttgccttccaggttttggcctatcttcgacacattcatccgggatagcatctctcggctgtccaattatcccgaaccccctcccagtgccttagtgtttgacctgcacgtgtctcccgaggacgggacactggtcccctttactggacaatatctgtcctctcatattaaagggaccctgggaacctttcaccctagcattcagaccgaacgcctgctgtatgttgtggacctgctcctgtccgggggccagcctgtgctcctcgcgggagaggccgctaccggaaagtctgcatttgtggaggtactggtagagccgcaccacccctacatatactcacctattcatcccgctttttctagctcccatctacggctactcctgtcccgggggattcaaggccagacccaggcaagcccgcagcccgggcatcaccaagacagcaaaccgagcctgctgttcctgctcgaggaccttcacctagcgactagcgaccctgagaaatcctgtcaaccagtccttgaaacactcagacaagccatggatggaaccgtctatgcccatagcacgctcgaattacagactctgcaacctacggtgaactttctggccaccgtaaccgttccagggtattgcgaacgaccgctgtgcccaaggctgttcagactgtttacggtgcttgcccttgagtccatgactcaggcgactctgctggagcggcacgtccccatcatccaggcatggttagagagatttccttccgtggaacgggagcgggcactcgcccggggcttagtgcgagcttccgtagaggcatgggaagcagtgtgtaactgctttatgccctcacctcttcatcctcactaccattttagcctgcatagtgtgagccatctgctaagtagtctgcagctcttaccaaaccgaaccggcagtcgaggcttcgtcgactacccaaaccatcaggagcacctgaggagagtctcaggtctgaggggaacgtgcctgaccgttatgatggccactcgtaacgtggtaaggttgtggttgcacgaggcacagcggacattctgtgataggttggattcgcccagggagcgcagctactgtgccaagctactgctggtcgttgcccagagcgtcttttgctgtggacccggtccacagcaccttggtaaagatcaccaagagtctgaggaggaggaggaagaggagcgggtaccagaagttgagtccgagggcgaactggcacagtgggaagatttttcaaactctaatagcgagacggaggaggaggaagaaccctacggcctgcaagtcgctcgggtttctaacagccgggatccttccctcacacctagcataggccctgtgtcgaggggcatgaaggaatctatcagccacaagatccgccaggagaagggaactagggctagcaactaccgtcttcaggtgagacggtcgtttaagacgtggtggcaaaaaaagcctcaaatggatctgatctcacccttgctactcccagtactgctgcttcacccacaggaaaagccttccgacctggtgttttctcaggaattgatcttgggacccaattctgaaacgcccaatctatacttggaacggcagtgggaaaagttggaggagcaacttgctaccagcgcagctcaacttaaattaagtcctcacctagcgcgctgtcattccatggcgcagcacgtggctaggctggtccgagtgctagccaggccccgccagcatggcctgctgctgagtggcgccctgggcacaggtcgccacacagccattacgctggcaagcagcatatgccaggcccatttctttcacctcccatctggaagcgaggaagctattttacagtgcctccgcgatgcaagctggcacgcggggatgctctcccagccagtggcactgctggtcccctccggcgtagacttgaccaccctgcaccgactgctggccctggctaccagtggcagcttccctgggcagtacactgaggcagatctggaccgcatcggagagcatcttccacgggagaaccttggagtgaaacagaacatcaaaaaagagatggtgctgcagagattccatcagcaggtttgtagccatctgcatctttttttcttgatcggggacaagcaggcccacaaacagcttccttccacgctgttcctgagattgcttcaactggcaaccgcctccatcgataggtacgaaccctgggatcaggcagctctcgctaaagtggcccagcatcatctggaaggtgcccaaagcgtcccactggatgatgggagctggaagtacccggaccttcaggcatcgatcccgtccgtcgcaaaggcaatggccttaatccacctgtccgcaacccactatcatgagcacctttgccccgcacttcccctcgtcacgcccaagaccttcttagattttctcgacacattcttgatgctccagcaacaaactatcttgaaaatcaagaataaagcccagcgggttcagaatgccttggaaaatctgagaatgctgatcaaggaacatggaacacatgccaacctaatattcgatctggaacagcaattaaaggatagcggcaaatccctcagcatgttccagcaacagctggagcaaagcaagctgctgtacaagcaacagctcgaggaatgtagacatcaggaaaacctgatcgagaaccttgctaggcagagagatgcccttcaggcccagcgagaagctttcttggagcagatgagtaaggcatttttagagcccctaagtcagctgcaggtcgccgactttgaggagatccgaagctatagggccccgccagagtctgtggtgcgcgtgactgacgctatgtgtgacctatttcaccatgagacaggctgggcatctgcaaagcaattgttgtgcactgaggacttctaccaggagctggtgttcttcccaaaagagaaaatcacggacagcgagctcattaagctccacctgattctgaaggctcccggcatggacgacgccgcacttagagcggtatcacggcctgcagcttcgctggccgcctggctatgggccgttttgcactacggtctggcacattgccggggcttgcccacagaccttctgttgcagcaggtcgaggccaccctcacccgagagcaggcaaggctcggttactatcagttccaagcccaggagacgctggagcacaatcttgctttggccaaaatggtggaggatgctcaggcgagtcacaattgtgtcgctaagaccctcagtcaagcacagtgtggccagtatcacaaatggccgatgaaggccgcccttcttacacccatgagagcctggacaacccaactgcagaaactcaagggacgatgtatgactgtgttcggtgatactctactctgttccgcggcgataatctatttaggccctttccctcctctgcggcggcaggagctgctggacgagtggttagccctgtgcagagggtttcaggaggctctgggccccgatgatgtggcccaagctctaaagcggaagcaaaagagcgtgtccattcctcccaagaatcccttactagctacacatagtccatttagtattctaagtctccttagttcggagtccgagcagtaccagtgggatggaaacctcaagccgcaggccaagtccgctcatttggctggcttgcttctccggagcccgactcactacagttcttgcaggtggccactgcttttagaccccagcaacgaagcgcttatctggttggacccccttcctttggaagagaaccggtcgttcgctccagccttaacagaaggccggggcaagggcctaatgcgaaatcagaaacgcgaaagcaagacagacatgaaggaagaagacgacgagagtgaggagtcaaacgaggccgaggatcagactaaggaacagaaagctgaagagcgcaaaaatgagcaagaaaaagagcaagaagaaaacgaggagaaggaagaagagaaaacagagagccaggggtccaaacctgcttatgagacccagctcccatcccttccctacctgagtgttctgtccggcgccgaccctgagctgggctcccagctccaggaggcagctgcctgtggcctgccggtgctgctcacaaatgtggaactgggtctgggatgcgaggaactgcagtggctgttacagagagaacaactgtctcctccgcaggtgcaacccggattttgcctttatctttcgaccacgttgagcctgtgcgccatggaaaaagtgctaggatgcgaattactcaaaggcctcaatgtgttagacctcggactaaatatggagatcctggaggagcagatgttgcacgagatcttatgtagggagtatcctgaactggagactcggtggcaggacctcaaaattagggcacttgacacatgcaaagccgttgaggctgctgaagagcgcctgcttaccatgctgcttttccagaaccctaagcggcaaaagccggctaagtttctgagaaatattgttcgggctcagggcaaattgtgccagctgcgtgcccactgtgaagagctggagggacagaagctccaggaaatggtgctctgggctccatataggccagtggtgtggcatggcatggcaatggtgaaggctctgtctcagctacagaacctcctcccactattctgtatgagcccagagaattggcttgccgttacaaagcaggccctggatagcatgaagccacgggagatcaatcatggagaggacctcgcctcgcacttgcttcagctgagggcacatcttacccgacagttgctgggatctaccgtgactgccctgggactgacacaggttcctttagtaggggccttgggtgcactggccctgcttcaggccaccggcaaagcctctgaactggagcggctagcgctgtggcccggcttggcagcttctccatccactgttcacagcaagccagttagcgatgtggctcggcctgcttggttggggcctaaagcatggcacgaatgcgaaatgcttgaactccttccccctttcgtcggcctgtgcgcctcgctggctggccactcttctgcttggcaggcttacttgtccctcagctcaacagtcctgggtcccgcccccggccccggtccagagcctctctctttactgcagaaactgattctctggcgggtgctgcggcccgagtgcttagccggagccttagccgactttacgacatcccttctcggcagaccactcgatgaaaacacctacgccccaacaatgccatttaaacactcacaggctacccagccaatgctgatcttgttgcccccaccaggtcacccttctgcaaccctgcatcctctgaccgttatccaaaagctggcagctaaatatcagcagggacagaagcagttacaggtgattgctttgggaagcgaagcgtgggaccccgtgtctgttgtcgtaagtaccctgtctcaagctatgtatgaagggcactggctggtcttggataattgccacttaatgccacactggccaaaggagctgctgcagctcttactagaattacttggccgagccaaagtggtcgctgatttggaatctgagcagctccttgatcaacctgaatcaagaaatgtcagcaccgtgcatcgggactttcggctgtggctaattgttccagccgaaagttctgcctccctgccagctgtgttgacacagcacagtatgcccgtgttctggaaccagtctctcgaactgggccacgttttgatcgattcagtggaacttgctcaacaggtgttatacatgcagccccctactcaggccctgcctctactgctactccacggcctcctgcttcaccgacagctgtatgggacaaggctccaggctcacaggggcaggtggtcacaagtgacactgactcaggtgctgcagacccaggaccagctttgggccagcttgagcaacccccgggccgccatgcaagaactagccgcttccgtcttttatggcggaccactgggcgatacagaggacagagaagctctcattagtctcacacaggcctgcttatcaccttcctctggatcctgggttcagccccatacaccacaatccctgctggcaactctcatgcctctacccgagctgagagaactggacgcaatggccgaatgtaaggcccagatgcatctgctcccttctccacctgaaccccgactgtgtggcctgagtgaggggcctcaggcctggcttctaaggaggcagtctcgcgctcttctctctgccctccaacggagcagcccagtatgggtgccagaatctagaaggggtgcacagctcgccgagaggcgcctccgacagaggctggtgcaggttaaccgaagactggagagcttgcaggatctgttgacccacgttatccgacaggatgagtccgacgcaccctggagtgtattagggcctaatgcgcggagacctttagaaggtgttctggagaccgaggctctggaactgtcacaactggtcggcacactgcagcgcgatctggactgccttctccagcagttgaaaggggcgcccccctgtccctctagacgctgcgccgccgtcgcacatgcactctggacaggacgcctgcccctgccgtggcgacctcatgccccggccggaccccaacccccttggcactggttgaggcagttaagtagacgggggcaactgctggtgcggtatctgggggtcggagcagacgctagctctgatgtgcccgaacgggtgtttcacctaagcgcctttagacaccccagaagactattactagcgttgcgcggggaagcggcccttgaccagaatgtgccaagttcaaactttccgggatctcggggctctgtttccagccaactgcagtacaagagactcgagatgaatagcaatcccctccacttccgagtcgaaaacggcccaaatccaactgtgcccgagcgtgggctgctcctgatcggcctgcaggtactgcatgcggagtgggaccctatcgccggcgccctccaggatagtccatcttcgcagccctctccactgcccccagtatcaatctccacacaggcgccaggcaccagtgacttacccgcccccgctgatctaacagtgtattcatgtcctgtatatatgggtgggccattggggaccgctaaactccaatccagaaacatcgtgatgcaccttccactcccaacaaaattgactcccaacacctgtgttcaacgacgggtgcacgtgtgttccccaccgctgagttag

SEQ ID NO: 239423 - DNA, 1893 bp, Artificial Sequence
  derived and/or modified sequence
atggagaaggtgctgggctgcgagctgctgaagggcctgaacgtgctagaccttggtcttaacatggagatcctggaggagcagatgctacatgagatcctgtgtagagagtaccccgaactggaaacccgatggcaggatcttaagattagggcattggacacctgcaaggctgtggaagccgcggaggagcgactgcttactatgttgctgtttcagaaccccaagagacaaaagccagccaagtttctccggaatattgtgcgggcgcaggggaaactgtgccagttgcgtgcacattgtgaagagctggaggggcaaaagctccaggaaatggtgctctgggcaccctacagaccagtcgtgtggcatggaatggcaatggttaaagctctgtcacagcttcagaatctgttgcctctgttttgtatgtccccagaaaattggttggcggtaactaagcaggccctggactccatgaaaccgagggagataaatcacggcgaggatctggcgtctcacctcctgcagctgcgggctcacttgactcggcagctgctaggaagcacggtgactgctctgggcctgacacaggtaccacttgtgggcgcacttggtgcccttgctctgcttcaggccaccggcaaggcttctgagctcgaaagactggcgctttggccgggacttgcggctagcccatcaaccgtacattctaagcctgtgagcgacgtggcccggcccgcttggctgggaccaaaggcctggcacgaatgtgaaatgctggagttgttgcccccatttgtaggtctctgcgcctctcttgctggccactccagcgcttggcaagcctatctctccctctcctccacggtccttgggcccgcacccggccccggtcctgaaccgttaagtctgctgcagaagctgattctgtggcgggtgctgcggccagaatgcttagctggggcattggctgactttacgacctcactgttgggccggcccctggatgagaatacatatgccccgactatgccttttaaacattctcaagcaacccaaccaatgttaatcctgctaccccccccgggacatcccagcgccactctgcaccccttaacagtgatccagaagcttgctgcgaagtaccagcaggggcagaaacaattgcaagtgatcgccctgggatccgaagcatgggatcctgtgtccgtggtcgtgtctacactgtcccaagccatgtatgaaggacactggctcgtgttagataactgtcacctgatgccccattggccgaaagagctcctccaactacttctcgaactcctggggagagcaaaagtcgtagccgacctggagtcggaacagctgctagatcagcctgaaagtcggaatgtttccacagtgcacagggatttccgactctggctcattgtgcccgctgagagctcagcgtcactaccagccgttcttactcagcactccatgcctgtcttttggaaccaatctctggaacttgggcatgtgttaatagatagtgtggagctggcccaacaggttttgtatatgcagcctcctacccaggccctgccacttctgctgctccatggactactgctccatcgacaactctacggcacacggcttcaggcgcaccgtggcaggtggagccaggttaccctgacccaggtgttacagacacaggatcagctgtgggccagcttgtcaaatccacgggcagcaatgcaggaacttgctggtgaaacgttgcctctccctctgggagtgatctccccacaggagagcctggaagagggagggggagggattcagtttaccgccctagtgctcgcagtggtggaaactgaaggaacggggaccgagagattatag

SEQ ID NO: 239424 - DNA, 14262 bp, Artificial Sequence
  derived and/or modified sequence
atggtgcccgaggagcggcgggtgggcctgagcagcgacgagacctcgagcgattctctcaaatcttggcattcaatttgcgtactggattcaaaagaacagcctctggcctgccagcagaagcaacggcaattcgtcaaaccagtgaccgagtcggagcaacccacagtactggaactactcttggcagagctgaggactctgttcagtgcggtcctgcaggattcttccccggcggcttggaggtacctccacgcggtcctagggctgctgccaccgtaccgcgagctcctagtgggacatctcgatctgctgccttttttggagcagctgtattgctgggccccctgggtacagacgcacctccacctggacctgttgggagcaatagtgcaggcatttccacccgattccagtctcttggattcagcgagccatgctgactgttgcccacagaaaaggcgactgcatcaccgcccaccctgcccggcctgcccctttgtacaggcccagtggtctcggcaacaggtcaaggaagaattggccacatggctccgtcccctgacgctccccgagctgcagagatgcctgggaatcgtgggagcgcaggtggccttagaagaagcggtgtggctcgacggacttagcttgctgcctctggccctggccgcagatataccagtacgctacgaaagcagtgatacagacaacgctgaggtggagcccgtgggcagaaaggagaccagaagtcagttagattacgaagtaccccgcgagaaagcattccagaaaagctctactgggtttagtccggagacatccttcttggattcccaggtgatgacggccttaaagatggaaaggtatctcaagaaaatccactttctctatttgaatgttgcacctagtagatacttccggccatactcgttaatggttgttcctccagacaaagtgaatccggaacattacatcttttcgccattcggaattttgcacgttcaccccgtggaagggtccgagacgatgacactggggacgtggcatcatcattgtgttctctggcagcagctgcagttcataccattcttcaagtattgcttgctgcgcaaatctttcacatgttggaagaagaacgtgaggttgcaggggctccaccgtctgcaaaagttcctggagaaccatcttctactggcagtcccgcatttcggcgctgggcttctccatatctcccgtctgctgcaagaactacatagtgtcagctggttgcctcaggagctggatcggtgctatgaattgcttgatctccaaacagcactggcagaagaaaagcacaaagcattacggctgctacatcgatgcctgaatctgtgtacgtccatcctgagactcgtgcacgaagacacctaccatatgcagcagtgcttacaggaaagagtccagaactgcgaccgaatacggacaggacagggcagtatctatctacaacgagtgcagcacaaacaactggaacagaaactgaagcaggcagaagcttggtggctccagctgggaaagttcgcaaggctcgtggactacatgatttgccagtccctgatctcggttctcgaggaacagatcacatccttcgtggctaacatactgcaggctcctagacagaagcccttcctgtccagtcaactggtgttcgatgatcacggtcaactgtcccacgtgccatgtgtcgagaatatgatccaaactcttactggcgggctgcagtcagtaaagacaagcgctctgcaggtggtccagagcgccgacctgaagacaagttctgattctttatactccgaggaagaggacgaagaggaggactccaaagatgagtttctcatgcctaagtttcagggccagccttccgatgcagtctcaatcttttgcggtcccaacgtgggcttagtctggccatggaagtcccatcccattgctggcattctcgaggtgcgaggatgtaggctgcgagggcaatattttccccataattataagcaattggaggaggatctggataataatcccaagatccagcaggctctaaatatacagcaggtccttctggagggtgtgctgtgcaaggttcaagagttctgtcgggaacaccattggattacgggcatctacgaattcctgcagtcatggggcccccagaaattggaagacatgcgcggcggtcccattaaaaactacgtaaccctcgtgagccgcctgaatgtatggcaggctcgagtcagcagcatgcccattgaactgctgaccaaaggtggcctgctcctgttgagctgtcacgacgttcaggccgaaatggaaagcaagctaaacagtatcaggaaggacatcctagcccacgtccaaaatgaatgctggaatctaagccagcaacttatgaccgagcttaccgatttcatgcatatctttagaacgattaacagcgatattcatgccatagcgcagtgtactcagaagttaaatgaggccaacgaacagtacgtggaactcgaggagcggatggagtatgtgcgggcactgcacgagctgattaggaaccatttttctctcttctcggccgaaaatgaggccctcgacatcagcgtgcgcagacagtttggggaatcccctataccaccttgtccgcccccacctcagcctcatctgctgcactgtcctctgcttgcaccacagctcctggacatgtgggaagccttccagttcgagaagtctcaggcctctgagttcctgttgtccaagagacacgctatcatgcccaagttgcagcagcttatggcagccgccctggccgagttggagggcctcctagctaaggctctttctggacccttcatggatcccacacaagaccagcgatccactgaacatcagctggtcagcctggaaaggcagttccaaaacaccgtctctgatctgagtgaattacatcacgcatatgcgatattcactgaagatgagacacctgttccactgcctatctgcggcactcggcctatagttcaacagcaaaggatatggcatttataccgggttatttctgaaaatattagtgaatggaagtgcatggccttcgcaaagttctcccccgctatggcgcaggaaaagacagagggttggctgactgaggccgcccgaatgtctactacgcttgagctgcatagcccggtcctccagcactgcatgcggattctaggcgaatttcgttcatatctccctctgctgactaagctgggctcactgcatcctcagtccctgaactgccagtgcttactacgggctttaggcctgggctctcttcagactatagagctgctgaccttagggcaacttctgacttatcctctgctggagtttgcagacagaattaatcaggtgtggcagaacgagaacgagcgcattcacgcacaggagactatccgtcggctgcagcgttactgggaagcacgccaactccggcttctgaactttattctccacgtaccgtatgaaccacccgcatccgaaaggtcaaagaggcaggtccttcgaagcccccagtgggaggtggtagacaaagactccggaacgttcatactgtctgactattccaacctgcaggatagcatccaggagtctttgcaggtgctctctaagattctcgctatcgaaaaaagcggggacctcaataagattgccctagaatgggtcgccattatgcatggtctgggagctctccttgaagtatggctaactttccagcagaaatggatctttttgaataaggttcttcatgaaatgaagattcagttcccaaatgccgatctgaacagtcggttcaaggtgatggacgatcagtacaggactctcatgcgcatctccgttgcagatccgatggtactgtctctggtggtcccgtccgccgaacggagcccttacttccagggtcaacagctccagcagttacttcaggccgggtctgtggaactcgagggtattatcatgtctctggagtcagtgctgtacggcgtgtgtgctcactttccgagactatttttcttgagcgactccgagcttgttgccctgctggccgccaggctggagtcttgcgaggcacaactttgggttaggcgttgctttccgcacgtccacgccgtttcctttcggtcttgcccaaccggtgaaaaaaatacagatgattgggagagctcccctaatactcagacacaggtggaggctctcgccgtcttgggggctggtggagaagaagtgaaactccagggccccctcccactgcaccccgatctgccgaagtggctcgctagcctggagaaatgtcttcggctcgctctggtgcatatgctgcagggatgtgtcgctgccagactcgctagaggcccaagcttgggggaggctctgaagcagctacctaagcaaaataaactgtacctgcagctgtacgtccaacactggatcgatctcgtgcaggccttcccttggcagtgtgtgctggtggccgaagaggtcgtgtggagggcagagatggaggaagccctgctggagtggggcacgctggccatggtatctatgcatatgaggaagttagaggttctggtgaatttcatgagagcacagcgcgcctcccaggggggtcagtccttgccatctgttcgccagacaagtttgctgagcgctctgctggtgatggcagtaactcacagggacatcgcccaactcctggagcaacaccaggtgtccgatctgaccgactttcattgggtgcgccagctcaaataccatctgggatctccacatatcatcccaaaaagcccgctgcaatccctgaaaactattgcttcgagcgagccctccctcagtcccgccgcgtgctggatcgatgttcttggtcggtctttcctgtacaactatgagtacctcgggccaagactaggtccccttcccagtctactgccagagagacctgctttggttctcctgttggcactcgaggaggtggcatgcggcaccgtgttagggccgaatggggtgggcaagagggctattgtaaattcgctcgcacaggcgctcggacggcagctcgtgatgttgccttgttctccccagatagaagcgcaatgcttaagcaattacctgaatggagcactgcaaggcggagcttggctactgctggagaaggtacatcagctgccaccggggttgctgagcgccctaggccagcgccttggagagctacaccacctatatgcccctctttaccaggaagccagtcgcaacacgtccaccattgacccaacgcagccacagctgctcgggtcgtcgttcttcgaaaagcaccatgtgtctgtcagactggggtacggctgtctgctcgtgttgagagccttatccagtgctgtgcccgctaacctccacctgctgctcagacccgtcgccctcgctttacctgatctcaggcaggtagccgagcttaccctcctcggcgcgggcatgagagacgcctttcagatggcaactcgactcagtaaattctttagtcttgagcgggagttggtgtcaggacccctgccttgtagactgccactgcttaaacagattcttgaggacacgatacgaacacttaacgtcacaaaggaagaaccaaagtgccagaaacctcgtagcctggcagcgatcgaggaagccgctctgttaagatctcctctctttagcatcctcaacggcctgcatctgcacaacctgcggggcctgctatgcgccctctttccttccgcttcccaggtgttggccgagcccatgacatataaactgatgaaacccctggtggtcgaggagctgcaacaagtgggtctggatccctcccctgatatcctagggtcattggaacaactgtctcaggcgttgtcacgagctagcgggatcttgttgttgggacctgccgggagtggcaaaacaacatgctggcacagcctgttcaagatccagaataggttggccgctatggaggatacttcgacacagggttgtcaaccagttgaaattacccatctgtacccatctgggcttagccctcaggagttcctgggctggctcgaagggtcctgttggcaccacgggatcttccctaaagtgctccgagccgcggggcaatgcaacaatatgggccagaaaagacagactgaggagagcatcggaatacagcattggattatatgcgatggggcatccaatggtgcctggctggatagcatcacctgcctcctgtcagagctgccgcaactgtcccttccttctggccagcagatagcccgcccgcccggaacctttctactgatggaggttgctgataccaccgggatttcgcctaccgtggttggctgttgcgctctggtgtggtgtggcggagagcagacgtggcagtgtatcttgtccgccctgatggcctcgctcccatatgagtaccgcctgcaacatcggaccgtagctgaactgaaccacatggcagaggtgttagtcccagccacactacgtttcctgacatgtcaaggcgtgagctccctcctgcaggttcatggtcaacaggctgtttgcgccggggtggctgaggtgacgagcatggctaggatcctgcacagccttctcgacctgcatctccgtctgaaggaggaaaaggctccgggacctgaagatctgagctattctgaccccgtggcacaatcctttcggtcctctaagagcagcttcctgaaccggagccaagtcgacagcgatgatgtccccgacaaatgtcgagagcacttgctggccgttagtagctttttattcgcattaatttgggggtttggggcacacctgccctctagattctggcctatcttcgatactttcataagggactcaatttcgcgcctcagcaactatcccgaacccccgccctctgcgcttgtgtttgatctccacgtgagccctgaagacggtaccctggtgccatttacggggcagtacttgagcagtcacataaagggcactcttggtacctttcaccccagcattcaaactgaacgtttactttacgtggttgaccttttgttgtccggcggtcaaccagtgctcctagccggcgaagccgcgaccggaaagtccgcgttcgtggaagtgctggtagagccccaccacccctacatatactcgcctatccacccagcattctcctcctcgcacctccgtctgcttctgtctcgcgggattcaaggacagacacaggcatcccctcagccaggacatcaccaggattcaaaaccgtctctgctgtttctactggaagacctgcacctggcaacaagcgaccccgaaaagtcctgtcagccagttttagaaacgctgagacaggccatggatggtaccgtctacgcccactctaccctagaactacagaccctgcaacctaccgtgaacttcttagccactgtgactgtgcccggttactgtgagcggcctctctgtccccgcctgttcagattgtttactgtgctggcccttgaatccatgacccaggcaacactgctggagcggcacgttcccattatccaggcctggctggagagattcccatcggtggaacgagaaagagctttagccagaggtctcgtccgggcttccgtcgaggcctgggaggcggtatgcaactgctttatgccttcgccgttacatccccattaccactttagcctccactccgtctctcacctgctctcaagcctgcagcttctgccaaaccggacaggctctagagggtttgtcgattaccctaatcaccaggaacatcttagaagggtctcaggactccgtggtacgtgtctgaccgtcatgatggccactcgcaacgtcgtgaggctgtggcttcatgaggctcagaggactttctgcgatagactggactcaccgagggaacgttcgtattgcgctaaactgctcctggtcgtggcccagtctgtcttctgttgtggccccgggccacaacacttgggtaaggaccaccaagagtcagaagaggaagaagaggaggagcgcgttcctgaggtggaaagtgaaggggaactagctcagtgggaagacttctccaatagcaattccgaaacggaagaggaagaagagccatatggcctacaggttgccagagtgagtaactccagagatccctcactaacaccttccatcgggcctgtgtcccggggcatgaaggagagcatcagccataagataagacaagaaaaagggacccgcgcttccaactacaggctgcaggtgagacgtagctttaagacatggtggcagaaaaagccacagatggacctcattagtcccctgctgttgccggtgctgttgcttcacccccaggaaaagccatccgacttggtgttctcccaggaattgatccttggccctaatagcgagaccccaaatctctacctggagcgccagtgggaaaagctggaggagcagctcgccacaagtgcagcccagctcaaactaagcccacatcttgcccgctgtcacagcatggctcaacacgtcgctcggcttgtacgtgtcctcgctcgtcctaggcagcacggcctgctactatccggggcgctcgggactgggcgccacacggctattaccttggcaagttcaatatgtcaagcccatttcttccatctgccctctggtagtgaagaagccatcctccagtgcctgagggacgcatcctggcatgctggtatgctgagccagcctgtggctctcctggtacccagcggggtcgacttaaccacgcttcaccggctcctcgccctggctacctcggggagtttcccggggcagtataccgaagcagatttagatcgtatcggcgagcatctccctagagaaaacctgggcgtgaaacagaacattaagaaggagatggtcttacagcggtttcatcagcaggtttgtagccaccttcacttgttctttctcatcggggacaagcaagcacacaagcaacttccctctaccttgttcctgcgcctgctccagttggctactgctagcatcgatagatatgaaccttgggatcaggccgcactcgcgaaagtggcacagcaccacctcgagggagcccagtccgtgcctttggacgacggatcatggaagtatcctgacctgcaggccagcattccgagcgtcgctaaagcgatggcactaattcacctgagcgctactcactaccacgaacacttatgccctgcactgcctctggtcactcctaagactttccttgatttcctagacacgtttttgatgctgcagcagcagacaatacttaagattaagaacaaggcacagagggtgcagaatgcactggagaacttaaggatgctgatcaaagaacacgggacccacgcgaatttgatattcgaccttgaacagcagctgaaagactctgggaagtctctgtcgatgttccagcagcagctggaacagtcgaaactcctgtacaagcaacaattggaagaatgcaggcatcaagaaaaccttatcgagaacctggctaggcagagagatgcactgcaggctcagcgggaggcctttctggagcagatgagtaaagccttcttggagcctctgagtcaattgcaagttgcagactttgaagagataaggagctaccgcgcccctcccgagtcagtcgtgagggtgacagacgctatgtgcgacctttttcaccatgaaaccggctgggcctccgccaaacaactgttgtgtacagaagacttttaccaggaactcgtattcttccctaaggagaagatcacagatagcgaattaattaaactccacctgattcttaaggcacctggcatggacgacgctgctcttcgtgcagttagccgacccgcagcaagcctggcagcatggttgtgggccgttcttcactacggcctggctcactgcaggggtttgcccacagatctgctattacagcaagtggaagctactctcacaagggagcaggcccgtctcggctattaccaatttcaggctcaggaaactctcgagcataatttggcccttgctaagatggtagaagacgcccaagcctcgcacaactgtgtagctaagactctgtctcaggctcagtgtgggcaatatcataagtggcccatgaaggcagcccttttgacccccatgcgggcttggaccacccaactgcagaagttgaaaggacggtgcatgaccgtctttggggacactctcttatgctctgccgccattatatacctgggtcccttcccaccacttaggcggcaggaactccttgatgagtggctggccctgtgcaggggcttccaggaggcactgggtcctgacgacgtggcccaggcactgaagagaaagcagaagagcgtgagtatacctcccaaaaaccctcttctagccacccactcccctttctctatcttatcgctactttcaagcgagtccgaacagtatcagtgggatggaaaccttaagccacaggccaaaagcgcacacttggccggtttactgctgcggtctcctacccactacagcagttgtagatggccacttctcctcgacccaagcaatgaagcactgatttggctggaccctttgcccctggaggagaatcgtagtttcgcccctgctctaaccgaaggccgcgggaagggtctaatgcgaaatcaaaagcgcgaaagcaagaccgacatgaaggaagaggacgatgagtccgaagaatctaatgaagctgaggatcagaccaaagaacagaaagcggaagagagaaagaatgagcaggaaaaagagcaggaggagaatgaagagaaggaggaagagaaaacagagtcacaggggtctaaacccgcatacgagactcaactgccaagcctgccctatctgtcggtgttaagtggcgccgaccccgagctcggttctcagttacaggaagcggcagcttgcggactaccagtgctgttaaccaatgtagaactggggctgggctgcgaagaactgcagtggttactacagagggagcagctgagcccgccacaagtgcagccggggttctgcctctacttaagcactacccttagcctctgcgctatggaaaaggttctggggtgtgagttgttaaaaggactaaacgtcctcgacctgggattaaatatggagattctggaggaacagatgttgcacgaaattctgtgtcgcgagtatccagaactggaaacgcggtggcaggacctgaagattcgagccctagacacatgcaaggctgtggaagcagcagaggagcgccttttaactatgctgctcttccagaatccaaagcgccagaagcctgccaagtttctgcggaatattgtcagggcacagggaaaactctgtcagctgcgcgcacactgcgaagagctcgagggccagaagttgcaggaaatggtgctgtgggcgccctatagaccggttgtgtggcatggaatggcaatggtgaaggccctctctcaattgcaaaatctacttcccctgttttgtatgtcccccgagaattggcttgctgtgactaaacaagcactggattccatgaagcccagagagatcaatcacggcgaggacctagcctcgcatctgctgcagctgcgtgcccacttaacccggcaattgttgggctcgacagtcacagcgctcggactgacacaagtgcctctggtgggtgctctgggcgccctggcacttcttcaagcgacaggcaaagcctccgaactggaacgcctagctctttggcccggcctggctgcaagcccctctactgtgcactcaaaaccagtttccgatgtggcccggccagcctggttgggccccaaagcttggcacgaatgtgaaatgctagagctgttgcccccttttgtgggtctctgtgctagtttggcagggcactcttctgcttggcaggcctacttgtcccttagctccacggtgctcggccccgcacccggccccggtccagagcctctcagcttacttcagaaactcatcttgtggcgtgtactgcgtccggaatgcctggcaggcgcactggctgactttacaacatcgctcctgggccgacccttggacgaaaatacatacgcacccacaatgccattcaagcatagtcaggccactcaacctatgctgatcctgctgcctccacccggccatccgtctgctaccttgcatccccttaccgtcattcaaaagctcgctgctaaatatcagcagggacaaaaacagctgcaggtgatcgctctgggatcagaggcgtgggaccccgtcagcgtagtagtctcgaccctttctcaggcgatgtacgaggggcactggctggtcctcgacaactgccacctgatgccacattggcctaaagaattgctacagctgctcctggaactgctaggacgagccaaggtggtcgccgaccttgagtctgagcagctgctcgaccagccggaaagtcggaacgtgtctactgtgcatagggactttaggctgtggctgatcgtgccagctgagtcatctgcaagcctgccagccgtgctgacacaacactctatgcctgtgttctggaatcagtccttagaactcggacacgtcctcattgactcagtggaacttgctcagcaggtgttatacatgcagccacccactcaggccttgccactgctcctcctgcacgggctcctgcttcataggcaactctacggaacccgactgcaggcccatcgggggcgatggagtcaggtgacactcactcaagtgctgcagactcaggatcagctgtgggcctccctcagtaatccccgggctgccatgcaagagctggccgctagtgtcttttacggaggtccactgggagatactgaggacagggaggcactgatttcgctgactcaggcttgcctctctccctcatctggcagctgggtgcagcctcacactcctcaatccctgcttgccacactgatgcccctcccggaattaagagaattagacgctatggcagagtgcaaggcacaaatgcacttactgccaagtcctccagagcctaggctatgcgggctgtccgaagggcctcaggcctggctcctgcggaggcagagtagagctttattgtccgccctgcagcgcagctccccagtgtgggtgccggaatcgagacggggtgctcagctggcagagaggcggttgcggcaacgactcgttcaggtcaatcgcagactggaaagtcttcaagaccttctaactcacgtaataagacaggacgaatctgatgcaccatggtctgtactggggcctaacgccagaaggcctctggagggagtgctggaaaccgaggccttggagctgtcacagctcgtcggaactcttcagagagacctcgactgtctactgcaacaactgaagggcgcacctccttgtccaagcaggagatgcgccgccgtggcgcatgctctctggaccgggcggttgccgctcccatggaggccgcacgcgcctgctgggccacagcccccttggcattggctgaggcagctgtcacgccgcggccagctgcttgttcggtatttaggtgttggagccgatgcatcttcagacgtaccagaacgcgtgttccacctgagtgctttccgccaccccagacgactcttactcgctctgagaggagaggccgctctggaccagaatgtgccgtcttcaaatttcccagggtccagggggtctgtgagtagtcaactacagtataagagactggaaatgaacagcaatcccctccatttccgcgttgaaaatggaccaaatccaactgtgcccgaacgaggcctcctcctcatcggcctacaggttctgcatgccgaatgggatccaatcgcaggcgcccttcaggacagccctagctcacagccctctcccttacctcctgtatccatatccacacaggctcctggaacttcagacctgcccgcccctgctgatctgactgtgtattcctgtccggtttacatgggcggccccctcgggacggcaaaactgcagtcaagaaatatcgtgatgcacctccccctgccgacgaagctgacacccaacacttgtgttcagaggagggtacatgtttgcagtccccccctgagctag

SEQ ID NO: 239425 - DNA, 14262 bp, Artificial Sequence
  derived and/or modified sequence
atggtgccagaagagagacgtgtcggcttgagcagtgacgagacatcttccgatagcctgaagtcgtggcattctatctgcgtccttgacagcaaagagcagcctcttgcatgccagcagaagcagagacagtttgtgaagcctgtcaccgagagtgagcagcccactgtgctggagctgctccttgccgagctgaggactttgttttctgcggtcctccaagattcttcaccagccgcttggagatacctgcacgctgtattagggcttctgccaccatacagggagctgttggtcggccacctcgatcttttgccttttctggagcagctctactgttgggccccatgggtgcagacccatctccacctggatttgctgggggctatcgtgcaggcctttccccctgattcctcactgctggattccgccagtcacgctgactgctgtccgcaaaagcgacgactgcatcatcgccctccgtgtccagcctgtccttttgtgcaggcacagtggagccggcaacaggtcaaggaagaactggcaacctggctgcggcctctaaccctacccgagttacaaagatgccttggtatagtgggggctcaagtggccctcgaagaagcggtttggttggacgggctgagtttgctccctctggccttggccgcagatatccccgtccgatatgaatcttccgacactgacaatgcggaagtagagccagtgggcaggaaggagacaagatcccagttggactatgaagtgcccagagaaaaagcattccagaagtcctctaccgggttttcgccggaaacctccttcctggacagccaggtgatgaccgcgttgaaaatggaacggtacctcaaaaaaattcattttctctatctgaatgtggcgccatcaagatactttagaccttactcactgatggtagtgcctcccgacaaggtgaaccccgagcattacatatttagcccgttcggcattctgcatgttcatcctgtcgaaggctccgagacaatgaccctaggaacatggcatcatcattgtgtgctgtggcagcagctccagtttatcccgtttttcaagtattgtctcttgcgtaagagcttcacatgctggaagaagaatgtgcgcctccagggactgcatagactccagaaattcctcgagaaccacttactgctggccgttccacatttcggcgcagggcttctgcatatttctaggctcttacaggagctccacagtgtttcctggctgcctcaggaactagacagatgctatgaattgttagaccttcaaacagccttggcagaggaaaaacacaaggcattgcgcctccttcacaggtgcctcaatctgtgcacaagtatcctgaggctcgtccacgaagacacataccacatgcagcaatgcttgcaagaacgggtgcagaactgtgatcgaatcagaacaggccaaggctctatctatctgcagagagtgcagcataaacagcttgaacaaaaacttaaacaggccgaagcctggtggctccagctcgggaagtttgccagactggtcgactacatgatctgtcagagtctgatctccgtcctggaagagcaaattacatcctttgtcgcaaatatcctgcaagcccctcgccagaaaccctttctatcctcccagttggtgttcgacgatcatggccagctatctcatgtaccttgcgtggagaatatgatccaaaccctgactggcggacttcagagtgtcaagacatctgcactacaggtagtgcagtccgcagatttgaagacatccagtgatagcctctattccgaagaggaggatgaagaagaagattcgaaggacgagtttctcatgccaaaatttcagggtcaaccctctgatgcagttagtattttctgtgggcctaacgtcggcctcgtgtggccttggaagagccaccctattgcaggcatcctggaggttagggggtgcaggctcaggggccagtatttccctcacaactacaaacagctagaggaggatctggacaacaatcccaaaattcaacaggccttgaatatccagcaggttctgcttgaaggtgtactgtgtaaagtgcaggaattctgccgagagcatcactggatcacaggcatatatgaattcttgcagtcatggggcccacagaaactcgaagatatgaggggtggccctattaagaattatgtgactctagtgtccaggctgaatgtgtggcaggcaagggtttccagcatgccgattgagctgttaaccaaaggcggtctgctgctgctctcttgtcacgatgttcaagcagaaatggagtctaagctaaattcgattcgcaaagatatattggcgcacgtccagaatgagtgctggaatctatctcagcagctcatgacggaactaaccgatttcatgcacatctttagaacaattaattccgatatccacgcaattgcacagtgcacccaaaagctgaacgaagctaatgaacaatacgttgagcttgaggagcggatggaatacgtcagggctctccacgaactgatacgcaaccacttttctttgtttagcgctgaaaatgaagccctggatatttccgttagaagacagtttggagagagccccataccaccctgccccccacccccacaaccccatctattacactgtccactgcttgctccacaactgctcgatatgtgggaggcctttcagtttgagaaaagccaagcatcagaattcctactgtccaagaggcacgccattatgcccaaactccaacagctgatggcggcagctttggctgagctagaaggactccttgctaaggcgctctctggcccatttatggatcctacgcaggatcaacgcagtaccgagcaccagttggtctccctggagcggcaatttcagaatactgtgtctgacctctccgagctgcaccacgcttatgcaatctttacagaagatgagacgcctgtgcctctgccaatctgtggtacgcgcccaattgtgcaacagcagagaatatggcatctgtatagggtgatttccgagaacattagtgaatggaaatgcatggcttttgccaaattttcacctgctatggcacaggagaaaactgaggggtggttgaccgaggccgctcgcatgtccacaaccctcgaactccattcacccgttctccagcattgtatgcgcattttaggagaatttagatcctaccttcccttactgacaaagctcggatccctgcacccccagtcccttaactgccagtgcctcctgcgggctctggggctgggctctttgcagacgattgaactgctgacactcggacagctcctcacctaccctctactcgagtttgcggatcgaatcaatcaagtctggcagaatgaaaatgagagaattcatgcccaggagacaatccgcagactgcagaggtattgggaggccaggcagctcaggttgctgaactttatcctgcacgttccttacgaacccccagcatcggagcggtcaaagagacaggtgctaaggtctcctcaatgggaggtagtcgataaagattctggcactttcattctgtctgattactccaatctacaggattcaatacaggagtcactccaggtcctatccaagatactggcgattgagaagtctggcgatctgaacaagatagcccttgaatgggtagccattatgcacggcctgggagccctactcgaagtgtggctaacctttcagcagaaatggatctttttaaataaagttcttcacgagatgaaaatacagtttcccaacgctgacctgaactccaggttcaaggtcatggacgatcagtacagaaccctgatgagaattagcgtggcagatcctatggttctgtcattggtggtgcccagtgctgagaggagcccttacttccagggtcaacaactgcaacagcttctgcaggccggaagtgtcgagctagaaggcataatcatgagcctagagagcgtgctgtacggggtgtgcgcgcactttcctcgcttgttctttctttccgacagcgagttagttgcacttctggcagccagactggaatcttgcgaagctcagctgtgggtgaggcgatgcttcccacatgtgcatgctgtctcctttcgttcttgtcccactggggagaagaacactgatgattgggagtcatcccctaacacacaaacacaggtcgaggcgttagctgtcttgggggctggaggagaagaggtgaagcttcagggaccgttacctctgcatccagacctgcccaaatggctcgcaagcctggagaaatgcctgcgcctcgcacttgtccacatgctgcagggttgtgtggcagcacggctggccagagggccttccctgggagaggccttgaagcagctgcccaaacaaaacaaactgtatttgcagctgtatgtgcagcactggattgatctggtgcaggcattcccctggcagtgcgttctggtggccgaggaagtggtatggcgggcagaaatggaagaagctttgctggaatggggaacactggccatggtatccatgcacatgaggaagctggaagtactcgtcaatttcatgagggcccagcgagccagtcaaggcggacagtctctgccctctgtgcgtcagacttccttactctccgcattgttggttatggcagtgacacaccgtgacatcgcccagctgcttgaacaacaccaggtttccgacctgacagatttccattgggtccggcagttgaagtatcacctgggctcacctcatataattccaaagtccccgctccaatcactcaagactattgcctcaagtgaaccctccttaagccccgcagcgtgttggatcgatgttttaggaaggagtttcttgtacaattacgaatacctggggccaagacttgggcctctacccagtctgctgcccgaaagaccagccctggtcctactgctcgctctggaggaggtcgcttgtggtaccgtgctgggtcctaatggggtgggtaagagggccattgtgaactccctggcacaagccctgggtcggcagctagtcatgcttccatgtagccctcagattgaggcccagtgtctctccaactacctgaatggcgctcttcaagggggagcttggttactcctggagaaggtccaccaacttcctccaggcctcctcagtgcccttggccaacggcttggcgagcttcatcatttgtacgcccctctgtatcaggaagcgtcacgcaatacaagtaccattgatccgacacagccacagctactgggcagttccttctttgaaaagcaccacgtgagcgtccgactgggatacggctgcttgctggtcctcagggccctgagtagcgccgtccctgccaatctgcatctgcttctcaggccagtggctctcgcgctcccagacttacgacaggtggccgagctgacactcctcggagccggaatgagagatgcgttccagatggcgacccggcttagcaaattcttctctctggagagggaactggtcagcgggcctctgccgtgtaggttgcccctgctgaaacaaatcctggaggatacaatccggactttgaatgtgaccaaagaagagccgaagtgtcaaaagcccaggtctctggctgcaattgaggaggccgctctccttcggtccccattgttcagtatcttgaacgggttgcaccttcacaatctgagagggctcctctgtgctttattccccagtgcatcccaggttttggcagaacctatgacttataaactcatgaagccactggtagtggaggagttacagcaggttggattggatccttctcctgatatcttggggagcctggagcagctttcacaggccctgagccgcgcttccggaatcctactgctaggcccagccggatctggaaaaacaacatgttggcactctctattcaaaatacagaaccggttggcagcaatggaggacactagcactcaaggatgtcaacccgtggagatcacgcacctttatccgtccggcctcagtcctcaagaattcctgggctggctcgaaggttcttgttggcaccacggcatattccctaaagtcctgcgggcagccggacagtgcaataacatgggacaaaaaaggcaaaccgaggagagcatcgggattcagcattggattatttgtgatggtgccagtaatggagcctggctcgactcaattacttgcctcctctctgagttgccccagctgagcttgcccagcggccagcaaatagctagaccacctggcacgtttctacttatggaggtggcagacaccaccgggatctctccaaccgtcgtcggttgttgcgcacttgtttggtgcggaggcgagcagacctggcaatgcatccttagtgcactgatggcctctttgccttacgagtatcgccttcagcatcgaaccgtggcagaattaaatcacatggccgaagtgttggttcctgcaacgctccgatttcttacatgccagggtgtgtcatcattgttacaggtgcacgggcagcaagcagtatgcgcgggtgtcgcggaagtgacctctatggccaggattttacacagccttctggacttgcacctgaggctgaaggaggaaaaagctcccggacccgaagacttgtcgtacagtgaccccgtggctcagtcattccgtagtagtaagtcatccttcctgaaccggtcccaggtggacagcgacgacgtcccagacaagtgcagggaacacctcctggctgtgtcctcctttctgtttgccctgatctggggttttggtgcccatctgccgtcaagattttggccgattttcgacacgtttattcgggactctatctcccgcttgagcaattacccggaacctcctccctcagctctcgtgttcgacctgcatgtgagccctgaagatggaaccctggtgccattcacggggcaatacttaagcagtcacatcaaaggcacgttggggacatttcatcccagcattcagactgagcgcctcctctatgtagtggatttgctgttaagtggaggtcagcctgtgctgttggcaggagaagctgctaccggaaaatctgcctttgtggaagtgctggtcgagccacatcacccctatatttactctcccatccatcccgctttttcctcaagccaccttaggttgctactgtcaagaggcatccagggccaaacacaagcaagcccacagccagggcatcatcaggattcgaagccatcactgcttttcctcctggaagacctgcacctggccacctccgatcctgaaaagtcctgccaaccggttctggaaactctccggcaagccatggatggaaccgtgtatgctcacagtacgctggagctacaaaccctccagccgacggtaaattttctagcaactgtgactgtccccggatattgtgaaaggcctctttgcccacggctgttcagactgttcacagttctggccctggagtccatgactcaggccacattactcgaacgccacgtgcctataatccaggcttggctcgaacgttttccatctgtcgagcgggagcgcgcactagcacggggtctggtgagagccagcgtggaggcttgggaggctgtgtgtaattgttttatgccctcacccctgcatcctcactatcattttagtcttcattcagtaagtcatcttttatcatcactacagctactccccaatcgaactggctcaaggggcttcgtcgattaccctaatcatcaggagcacctgcgccgagtgagtggccttaggggtacctgtctgaccgttatgatggctacacgaaatgttgtgaggctgtggcttcacgaggcccagagaactttttgtgataggctcgatagcccgcgtgaaagatcatactgcgcaaagcttcttcttgtagtcgcgcagagcgtgttctgttgcgggccagggccacagcacctgggtaaagatcaccaggaaagcgaggaggaggaagaggaggagcgggttccagaagtggagtctgagggagagctggcacagtgggaggacttctctaactctaactccgagactgaggaggaagaggaaccctacggcctgcaagtcgcaagggtgtcaaacagccgggatcctagtctaaccccttccataggtccggtgtcacgcggaatgaaggaatctatttcccacaaaattagacaggaaaagggaaccagagcctccaactatagactgcaggtgagacgatcattcaaaacctggtggcagaagaagccccagatggacctgatcagccctttactacttccagttctcctcctacatccacaggaaaagccttccgatctggtattttctcaagagctcatactcggacccaacagtgagacaccaaatctttacctggaaagacagtgggaaaagttggaggaacaattggccacctcggctgcccagttgaagctgagcccacacctggccaggtgccacagcatggctcaacatgtcgcccgacttgtccgcgtactggccaggcctcgtcagcacggcctgttgctgagtggtgccctgggaactgggcgacatacggcgataacgctggcttcttccatttgtcaggctcattttttccacctgccctccgggtcagaggaagccatattacagtgccttcgagatgcttcatggcatgctgggatgttaagtcagccagtcgctttacttgtgccttcgggagtggacttgacaacactccacaggctcctggccttagctacgtcagggtcctttcccggtcagtatacggaagccgatctagataggatcggcgagcatcttcctcgtgagaatctgggcgtgaagcagaacatcaagaaagaaatggttttacagcggttccatcagcaggtgtgctctcacctgcacctgttctttttaataggcgacaagcaggcacacaaacaactgccatcaaccctctttctcaggttactgcagctggccaccgcttccatagacaggtacgaaccgtgggaccaggccgcactggcaaaggtcgctcagcatcacctagaaggcgcacagagtgttccactcgacgatgggtcttggaaatatcccgatttgcaggcatccattccgtctgtggctaaagctatggccctcatacacctgagcgccacacattaccatgagcacctgtgcccagccctcccactcgtgacacctaagaccttcctcgatttcttagacactttcctgatgcttcaacaacagactatcttgaagatcaagaacaaagcgcagcgcgtacagaatgccctggaaaacttacgaatgctgataaaagagcatgggacccatgcaaacctgatttttgatttagaacagcagctgaaagacagcggcaagagtttatctatgttccagcagcagttggagcagtctaagctgctttacaaacagcagctcgaggagtgtagacaccaggaaaacctgattgaaaatcttgccagacaaagggatgccctgcaagcccaaagagaggccttcctggaacagatgtccaaggcttttctggagcccctctctcagctgcaggtagccgatttcgaggaaatcagatcataccgtgccccaccagaatcggtggtgcgggtgactgatgcaatgtgtgatcttttccatcacgaaactgggtgggcgtcagcgaagcagctgctttgtacagaagatttttaccaggaactggtgttctttcccaaagagaagattaccgattcagaactcataaagctgcacttgatcttaaaggcaccgggaatggacgacgccgcactcagagcagttagtcggccagctgcgagcttagccgcatggctgtgggcagtgctgcactatggacttgcacattgccgcggattacctaccgacctcttgcttcagcaggtagaggccacactcacacgcgaacaagccagacttggctattatcagtttcaggcacaggagacactcgaacacaatcttgccctggcgaagatggttgaggatgctcaggcatcacacaattgcgtcgctaaaaccttgagccaggctcagtgtggacagtatcacaaatggcccatgaaagcggcactattaaccccaatgcgcgcatggacaacccagttgcagaagttgaaaggcagatgcatgaccgttttcggagacaccctgctgtgctcagccgctatcatatatttgggcccttttcctcccttgcggcgacaggagctactggatgagtggttggctctgtgcagaggttttcaggaggcactgggcccagatgacgtggcacaggcactcaagcggaagcaaaagagtgtgtcaattccgccaaaaaaccctttactcgctacccactctcccttcagtatcctcagcctgctgagttcagaaagcgaacagtaccagtgggacggaaatctaaagcctcaggctaagtctgcacaccttgccggtctgcttttgagatctcctactcactactcatcttgtaggtggccccttctgctcgatccctccaatgaggctctgatctggctcgatccactgccactcgaggagaatcgcagcttcgcccctgccctaactgagggcagaggcaaaggtctgatgaggaaccagaagagggagagcaagactgacatgaaggaggaagacgacgagtcagaagagtccaatgaggcggaggatcagacgaaggagcagaaggccgaggaacgaaaaaatgaacaggagaaggaacaggaggagaatgaagaaaaagaagaggagaaaacggagtcgcagggtagcaaacccgcttatgaaacccagctgccctctctgccgtacttatccgttttgtctggcgcagaccctgagctaggatctcagttgcaagaagctgctgcttgtggactccccgtgttgcttacgaatgtggagctcgggttggggtgcgaggaactgcagtggttgcttcagagggagcaactgtctccgcctcaggtccaacctgggttctgtttatatctgagcacaaccctctcgctctgcgccatggaaaaagtgctaggctgtgaattgctgaagggactgaatgtgttagatcttggactcaacatggagatactggaggagcagatgctccatgagattttatgccgcgaatacccagagctggaaactcggtggcaggatctcaaaattcgggcactggacacttgtaaggcagtggaggccgctgaggagcgcttgcttacgatgcttctgtttcagaatccgaagaggcagaagcctgccaagtttctgcgcaatatcgtgcgtgcgcaagggaaactctgccagcttagggcccactgtgaggaattggagggccagaaactgcaggaaatggtgctgtgggcaccatacaggccagtagtgtggcatggaatggctatggtgaaggcactttctcagctgcagaatctgctgcccttattctgcatgagcccggagaactggttagccgtcactaaacaagcgctggactctatgaagccacgtgagattaatcacggcgaggacctcgcctcacacttattgcaactacgtgctcacctgacgcggcagctgttggggagcactgtgactgctctcgggttgacacaggtcccgctcgttggcgctctgggagctctagccctactgcaggcaacaggaaaagcatcagaattagagagactggctctctggcccggtttggccgcttccccatctacggttcactccaaacctgttagcgatgtcgctcgcccagcctggctggggcctaaggcctggcacgaatgcgagatgctggagctcctgcccccattcgtggggctttgtgcttctcttgccggtcactcctccgcctggcaagcctacctgagcctttcaagcaccgtcttgggacctgctcccggtcccggacctgagcccctctctctgttacagaagttaattctgtggagggtcttaaggcctgagtgtttggcaggcgcacttgcggactttactacttcattgctcggcaggccactggacgaaaacacttacgcaccaaccatgccctttaagcatagccaggctacacagcctatgttgatactgcttcccccacccggtcatccctctgcgaccctgcatcctttgacagtcattcagaaactcgcagctaagtatcagcaggggcagaagcagctgcaggtgattgctctaggctccgaggcatgggacccagtctccgttgtggtgtcaacgctaagtcaggccatgtatgagggccactggctggtgttggataactgccatctgatgccccactggcctaaggaactactgcagctgctgctggagctccttggtcgcgctaaggtcgtggccgacctcgaatcggaacagttactcgatcagcctgagagtcgcaacgtttcaaccgtgcatcgggacttcagactgtggctcattgttccagcggagtcctctgcgagtctgcccgcagtgctgacgcaacattcaatgccggtattctggaaccaatctctggaattaggccatgttctgattgactctgtggagctggcccaacaagttctgtatatgcaaccccctacccaggccctgccactgctgctacttcatggacttcttctccatagacagctttatggaaccagactacaggcgcaccggggtcgctggtcccaggtaactctgacacaagtactgcagacacaagatcagttatgggccagtctgagcaacccaagagctgccatgcaggaactggcggcttcagtgttttatggtggacctctgggtgatactgaggaccgggaggcgttaatttctctcacgcaagcctgcctgagcccgtcctctggctcttgggttcagccacatactccacagagcctgctcgccactcttatgcccctcccagaattaagagaattagatgcaatggctgagtgtaaggcccaaatgcacctgttaccctcgcctccggagcctcgtctctgcggcttgtctgaagggcctcaggcatggctgttgagaagacagagcagagctctgctgagtgccctccagaggtcttctccagtgtgggttcctgaatcccgcagaggcgctcagctggctgagcgcagactccgccagcggctggttcaggtcaatcggagactggaatctctgcaggatctccttactcatgtcattcgccaagatgaatcagatgctccttggtcagtactcggcccaaacgcacgtcgtcccctggagggcgtactggagacagaagccctggagttatcacagttggttggtaccctgcagcgggatcttgactgtctgcttcagcaattgaagggcgcacccccatgtccttctaggcggtgcgcagccgtggcccacgctctgtggaccggacgattgcctctgccttggcgccctcacgcccctgcagggcctcagccgccttggcattggctgcgccaacttagccggcgaggtcaattattggtgcggtacctgggggtcggagccgatgccagcagtgacgtccctgagagggtattccatctgtccgccttccggcatcccaggcgcctgttgctggctttacgtggcgaagcagccctggatcagaatgtgccatcttctaacttccccggtagccgtggcagcgtcagttcacagctgcagtacaagaggttggaaatgaattctaaccctcttcactttagggttgagaacgggcctaatccaactgtgccagagcggggtctgctgctgataggtctgcaggtccttcacgccgagtgggatcccattgccggtgcactacaggattcaccctcatctcagcctagtcctcttcctccggtttcaatcagtacacaggcccctgggaccagcgacctgcctgccccagcggatctgactgtttacagctgccctgtgtacatggggggacctctgggcacagctaaactccagagccggaatatcgtgatgcacctaccattacccactaaactaaccccaaatacctgtgttcaaaggagagtgcacgtctgctctccgccactttcataa

SEQ ID NO: 239426 - DNA, 1893 bp, Artificial Sequence
  derived and/or modified sequence
atggaaaaggtgctgggctgtgaactgctgaagggcttaaacgtgctggatctgggtctgaatatggagatcctcgaagaacaaatgctgcacgagattctttgcagggagtatcccgaactggaaacaagatggcaggacctcaagatacgggctctggacacttgcaaggctgtggaggccgctgaggagagactgctcacaatgctcctctttcaaaatcccaagagacagaagcccgcaaaatttttaaggaacatcgttcgagctcaaggaaagctgtgtcaattgagggcacattgtgaagagctggaggggcagaagctacaggagatggtgctttgggccccataccgacctgtggtgtggcacggtatggctatggtgaaggcactgagtcagcttcaaaaccttttacccctgttctgtatgagcccagagaactggcttgcagtgaccaagcaggcgttggatagcatgaaaccgcgtgagatcaaccacggagaggatcttgcttcacatctcttgcagctgcgagctcatttgacaagacagctgctgggctctaccgtcactgccctgggactcacacaagtaccactggttggtgctctcggcgctctagcccttctgcaggcaacgggtaaagctagtgagctcgaaaggcttgcactgtggcccggactggccgcttccccatccacggtccattcgaagcctgtgagcgatgtggcccgacccgcatggcttggacctaaggcatggcacgagtgcgagatgttggaacttctgcctccattcgtgggcctctgcgctagtctggcaggccattcatcggcttggcaggcctacctctccctgtcttcaacggtattggggcctgcccctggtccaggccctgaaccactgagcctactccagaaacttatcctgtggagagtgctgcgcccagagtgcctcgctggggctctggccgacttcacaacgagtctgttagggaggcccttggatgagaatacatacgcacccacaatgcccttcaagcactcccaggctacacagcctatgctgatcctcctccctcccccaggacaccccagcgccacactgcaccccctgacagtgatacagaagcttgcagccaagtatcagcagggccagaaacagttgcaggtgattgcgctgggcagtgaggcttgggaccccgtttcagtggtagtctctacactttctcaagccatgtacgaaggacactggctcgtcctggacaattgtcacctgatgccacactggcctaaggaactgctccagctcctactggaactgctcggacgcgcaaaggtcgtggccgatctcgaatccgagcagctgcttgatcagcctgagagccgaaatgtgagcaccgtccatcgggacttcaggctgtggctcattgtcccggctgaatcctctgcctctttaccggctgtgcttacgcagcactccatgccggttttctggaaccagtcactggaacttggacacgttcttatcgactcagtagaactagcacagcaggtgctttatatgcagcccccaacacaggccctgcctctgctgctactgcacggcctcctcttgcatcggcagttgtacggaacccgcttacaggctcatcggggacgttggagccaggtgactctcacccaggtactgcaaacccaggatcagctgtgggcatccctgtcaaatccccgtgctgcaatgcaggagctggctggggagaccctccctcttcctctaggagtgatttcgccccaggagtcccttgaagaaggagggggaggcatccagttcacagccttagttcttgctgtggttgagactgaagggactggcaccgaacgcctctag

SEQ ID NO: 239427 - DNA, 14262 bp, Artificial Sequence
  derived and/or modified sequence
atggtgcctgaagagcgtagagtaggcctgtcttcagatgagacgtcttccgactccttaaagtcatggcactctatttgcgttctcgacagcaaggaacagcctttagcatgccagcagaaacagcgtcagtttgtaaaacctgtgacagagtccgagcagcctaccgtattagagttattactggcggaacttaggacactcttcagcgcagtgttgcaggacagctcccccgcagcctggcgctacctgcatgcggtactcggacttttgccaccatatcgggaactgctggtggggcacttagatctactgccttttctcgagcaactctattgttgggccccttgggtccagactcaccttcatctggacctgttgggggcaattgtccaagcctttcctcctgatagctcattgctggatagtgccagtcacgctgattgttgcccacagaaacgccgacttcaccacaggcccccatgccccgcttgcccctttgtccaggcccagtggagccgtcagcaagtaaaagaggaactggctacctggctcaggccccttactttaccagagctgcagcgctgtcttggcattgtcggcgcacaggtcgctctcgaagaggcagtttggctggatggccttagccttctgccactcgccctggcagccgacattcccgtccgctacgaatcatccgatacagataacgctgaggtagagcctgtcggacgcaaggagacacgttcccagttggattacgaggtgccaagggagaaagctttccagaaaagcagcaccggtttcagtccagaaaccagttttttggactcacaggtgatgaccgctcttaagatggagcggtacttgaaaaagattcactttttgtatcttaatgtcgctccatcccgttacttccggccttatagcctgatggtggtaccacccgacaaagtgaatcctgaacattatattttctctccttttggcatcctacacgtgcatcctgttgaggggtctgaaacgatgaccttgggcacatggcaccaccattgtgtgctgtggcagcaactacaatttatccccttttttaagtattgcttgttacggaagtcgtttacctgctggaaaaagaatgtacgtctccagggcctgcaccgcctgcagaagtttctcgagaaccacttactgttagccgtgccacactttggcgcagggttgttgcatatctctcgacttctacaggaactgcattctgtttcctggcttccacaggaactcgatcggtgctacgagctactggatctgcagactgccctagcagaggagaagcataaagcactgcgcctgcttcacagatgcctgaacctgtgcacatcaatactacggctcgtccacgaagacacctaccacatgcagcagtgcctacaggaacgagtgcaaaactgcgaccgcatcagaaccggccagggatccatttatttgcagcgagtgcagcataagcagctggagcaaaaacttaagcaggccgaagcatggtggctccagctgggcaagttcgcgagacttgtggattacatgatctgccagtctctaatcagcgtcttggaagagcagatcaccagtttcgtggcgaacattctccaagctcctaggcaaaagccttttctgtcctcccagctggtatttgatgatcacgggcagctttctcacgtgccttgcgtcgaaaatatgatccagaccttgactggagggttgcagtctgtcaagacatcagcattgcaggtggttcaatccgctgacctcaagaccagttccgactccttgtattcggaagaggaggacgaggaagaagacagcaaagacgagtttctgatgcccaagtttcagggccaaccttcggacgctgttagtattttctgtggcccaaatgtgggcttagtgtggccttggaaatcacatcctattgcaggaattctcgaggtccgtggctgtagacttaggggccaatattttccgcacaattataaacagctcgaagaggacctagacaataaccctaagattcagcaggcattaaacatacagcaagtcctgctggagggcgtactgtgcaaggtgcaggagttttgtcgcgagcatcattggattacaggcatttatgagtttttacagtcgtggggcccacaaaagcttgaagatatgcgcggaggcccaataaagaactacgtgaccctcgtgtcgcgtctcaatgtgtggcaagcccgagtgtctagtatgcctatcgagttactaacaaaaggcggtttgctccttctgtcatgtcacgacgtccaggcagaaatggaatccaagctgaattcaatacggaaagacattctggcccacgttcagaatgagtgttggaatttaagccagcaactaatgacagaactgacagatttcatgcacatttttcgaacgataaattcagatattcacgcaatcgcgcagtgcacccagaaattgaacgaagccaatgagcagtatgtggagctggaagagcggatggaatacgttcgtgcgctccacgagctgattcgcaatcacttctctctgttctccgcagagaacgaagccttggatattagcgtgaggaggcagtttggagagtcacctattccaccctgccccccaccaccccagcctcacctcctacactgtcccctgctcgccccacaattactggatatgtgggaagccttccagtttgagaagagccaagcttcagagtttctgctgagtaaacgtcacgctatcatgccaaagctgcagcagctgatggctgccgctcttgctgaactggaaggcctcctggccaaggccctgtccggacctttcatggatccaacccaggaccagcgcagcactgaacaccagctcgtgtcccttgagcgccagttccagaatacggtctctgacctgagcgaactgcatcacgcctacgcgattttcaccgaggacgagacacctgtccctctccctatttgtggtaccaggccaatcgtacagcagcagaggatatggcacctgtaccgcgtcataagtgagaatatctccgaatggaagtgcatggccttcgcgaaattttccccagccatggcccaagagaagacagaaggctggctcaccgaggcagccaggatgtcaaccaccctcgaactccactccccagtgctgcagcattgtatgcggatcctgggtgagttccggtcctatctcccgctcttaactaaactaggcagtctgcaccctcaatctctaaattgtcagtgcctactgcgggcacttggcctggggtccttgcaaacaatcgagctgctgactttaggacaattgctaacatatccgctgttggaatttgcagaccgaattaatcaagtttggcaaaacgaaaacgagcgtatccacgctcaggagactatcaggagattgcagaggtattgggaggctagacaactgagactgctgaacttcatactgcatgtgccatatgagccccctgcttcagaaagatccaagagacaggtattgagaagcccgcagtgggaggttgtggacaaggactccggcacgttcattctgtctgattattctaatcttcaggattctatccaggagagcctgcaggttctaagcaagattttggccattgaaaaaagcggcgatcttaacaagatagctcttgaatgggtggcaattatgcacggactaggagcgcttttggaagtgtggttaacatttcaacaaaagtggatcttcctgaataaggtcctgcatgagatgaagatccagtttccaaacgccgatctcaattctcgtttcaaggtgatggacgaccagtaccgcacacttatgcggatttctgtggccgatccaatggtgctgtccttggtagtaccgtccgccgaaaggagcccttacttccaggggcagcagttacaacagctgctccaggccggttccgttgagctcgagggaataattatgtcactggagtctgtgctgtacggcgtgtgtgcgcatttccccagactgttttttctatccgacagcgagctcgtcgcactgcttgctgcacgcttggaatcgtgtgaggcgcagctctgggttagaaggtgttttccacacgtccacgctgtttcctttcggagctgtcccaccggagagaagaacacagatgattgggagtccagcccgaacacccagactcaagtcgaggcactggctgtgctgggtgccggtggcgaagaggtgaaactccagggtcccctaccactgcatcctgacctccccaagtggcttgcgtccctggaaaagtgcttgaggttggctctggtccacatgttgcagggatgcgtcgctgctcggctggcgagaggtccctcactcggggaggcgctaaagcagttgccgaaacagaacaagttatacctccaactctacgtgcagcactggatcgacctcgtgcaagcctttccgtggcagtgcgtccttgtggctgaagaagtcgtgtggagggccgaaatggaggaagcacttctggagtgggggacactcgccatggtctccatgcacatgcgaaaacttgaagtgttggtcaactttatgagagcacagagagcgagccagggcggtcagtcactgccatctgttcggcaaactagcctgttgtcagccctgttggtaatggccgtgacacatagagacatcgcccagttgctggaacagcaccaggtgtcagacctgaccgatttccactgggttcggcagctaaagtaccacctaggcagtcctcacatcattccgaagtcacctctccagtcactgaaaaccatcgctagtagtgagccatctctgagcccagcggcatgttggattgatgtcctcggtcgatccttcctgtacaactatgaatatctcggcccaaggcttggccctctgccctccctgcttcccgagaggccagcattggtgctccttctagctctggaggaggttgcttgcggaacggtgttggggcctaacggcgtcggcaaacgggcaatcgtcaatagcctagctcaggccctggggaggcagttagtcatgctcccgtgctctcctcagatcgaggcccaatgtttaagcaattaccttaacggcgctttacaggggggtgcttggctcctgttagagaaggtgcatcagctgccgcctgggttattgtctgctctcgggcagaggctgggggagctgcatcacctttatgccccactgtatcaagaagccagtcggaacacttcaacgatcgatccaactcagccccagcttctgggctcgtcattcttcgaaaaacaccacgtaagtgtgaggctgggatacggctgtttgcttgtgctccgagccctatccagtgctgtgcccgcaaatttgcacctgttgctacgtcccgttgccttagcactccctgaccttagacaggtcgccgaattaacccttctcggagctggcatgcgtgacgcctttcaaatggctaccaggttgtctaagttcttctctcttgaaagagagctagtgtccggacccttaccttgcaggctcccactccttaaacagattcttgaggatactatcagaactctcaatgttacaaaggaggaaccaaagtgtcagaagcctaggtcactggccgctatagaggaggcagctctgctgcggagccctctgttcagcatcctcaatgggctgcacctgcacaatttgcgagggctgctctgcgcgctcttcccatcagctagccaggtactcgcagagcccatgacgtacaaactgatgaaacccctggtcgttgaagagctgcagcaggtaggcctcgatccctctcctgacattctgggttctctcgaacagctgtcccaggctctgtctcgggcttctggaatattacttctggggccagcgggatccggtaaaacaacctgctggcacagcctgttcaaaattcagaatcggttggccgcaatggaggacaccagcacccagggatgtcagcctgtcgaaatcactcacctctacccctccggcctgtccccacaggagttccttgggtggctggaaggaagctgctggcaccatggaatttttccaaaggtactgcgagccgctggtcaatgtaataacatgggccaaaaacgccaaacagaggagagcatcggcatccaacattggatcatctgcgacggcgcttccaatggcgcttggctggactcaatcacctgtcttctcagcgagcttcctcaactaagtttaccttctggccagcaaatagcccgaccccctggaacatttctcctgatggaggttgccgatactaccgggatctcaccgaccgtggtagggtgttgcgctttggtctggtgcggtggcgagcaaacatggcaatgcattctatcagctcttatggcatcactgccttacgaatatagactgcagcacaggaccgttgccgaactgaatcacatggccgaagtgctcgtgcctgcaaccctgagattcctgacctgccaaggcgtgtcatctcttctgcaggtccatggtcagcaggcagtgtgcgcaggtgtggctgaggttaccagtatggccagaattctgcactccttgttggacttgcacctgaggctcaaggaagaaaaggccccaggccctgaagacctcagctactccgaccccgttgcccagtcattccggtcgagcaaatctagttttctcaaccggtctcaggtggacagcgatgacgtgccagataagtgtcgcgagcatctcttggctgttagttctttcttgttcgctttaatttggggcttcggtgcccatttgccatctaggttttggcccatcttcgataccttcattcgagatagcataagccgcctgtctaattaccctgagccccctccctcagctctggtttttgacttacatgtgtcccctgaggatgggaccttggtacccttcaccggccagtacttaagctctcatatcaaggggaccttgggaacctttcacccaagtatacagactgaacgcctgctgtatgtcgtcgatctgctcctaagtggtggacagcccgttcttctcgcaggagaggcggctacgggaaaaagtgccttcgtggaagtcctggtcgagccccaccacccatatatctatagccctatccacccagcctttagcagctcgcacctgagactgcttctgtcaagaggcattcagggtcagacccaagcatcccctcagcctggacatcaccaagactctaaaccatcacttctgttcttgctcgaagatctgcacctggccacgtccgatcccgagaagtcctgccaacccgtgctggagacgctcaggcaggcaatggatgggaccgtctacgcacacagcaccttggagttacagaccctgcagcctaccgtaaatttcctggctactgttacagtcccagggtattgtgagaggccattatgtcccaggctgtttcgccttttcacggtactggcactggagtccatgactcaagccacactcttggagcgccacgtcccgattatacaggcgtggctggagagatttccctcggtggagcgggagcgagccctggctcgcggtttagttagggcaagtgtcgaggcatgggaagcggtttgcaactgctttatgcccagccccttgcatccacactaccatttctctttacatagcgtttctcacctgctgagctccctccagctgttgccgaacagaaccggctcgagggggttcgtggactacccaaaccaccaggagcacctcagaagagtgtctggcttgagaggaacatgtctaaccgttatgatggccacacggaacgtggtccggctttggctgcacgaagcccagaggactttctgtgaccggctcgactctcctagggaaaggtcctactgcgccaagttgctgttggtggtggcgcagtctgtcttttgttgtggtcccggaccgcagcatctcggcaaagatcaccaggagtccgaagaggaggaggaagaggagcgggtacctgaggtagaatcggagggagaactggcacagtgggaagacttctcgaacagtaacagcgagacagaagaggaagaagagccctacgggctgcaggtggctagggtatcgaattcacgagaccctagcttaacacccagtattggacctgtcagtagaggcatgaaggagtccatttcacataaaatacggcaggagaagggtacacgcgcttctaactatcggctgcaggtgcgccgttcctttaaaacatggtggcaaaaaaaacctcaaatggacctgatcagtcccctgctgttacccgtgctgctgctgcacccacaagagaagccaagtgacctggttttctcacaggagctcattctgggacctaattcagagacgccgaatctctatttggaaagacagtgggaaaaattggaggaacagctggctaccagtgccgcacaactcaaactttccccccacctggccaggtgtcattctatggcacagcatgtcgctaggttagtcagagttctggccaggccacgccagcatggactgcttctgtctggcgctctgggcactggaagacacactgccataaccctcgcatcaagcatttgtcaggctcacttctttcatttgcctagtggttctgaggaggcaatcctacagtgtcttcgcgacgcatcctggcacgcaggaatgctgtcacaacctgtagctctactcgttccttcaggagttgatctaaccactctacatcgcctgctggcactggccacgagcggcagtttccctgggcagtacaccgaggctgatttagaccggattggcgaacacctccctagagaaaacctcggagtgaagcagaacatcaagaaagagatggtactgcagagattccatcagcaggtctgcagccatcttcacctctttttcctgattggcgacaaacaggctcacaagcagctacccagcaccctcttcctccgactcctgcagttggccacagcttcaatcgacagatatgagccttgggaccaggctgccctggccaaagtggcccagcaccacctcgagggggctcaatcagtacccctggacgatggtagttggaagtaccctgatctccaggcctctatccctagcgtcgccaaagcaatggcacttatccatctgtcagctacccattaccatgaacacctgtgcccggcactcccactagtcacccccaagaccttcctcgacttcctggacacttttctcatgctccagcagcaaaccattctgaagatcaagaacaaggcccagcgcgtgcagaacgcactggagaacctgcgaatgttgatcaaagagcacggaacccacgcaaatctaatcttcgacctggaacagcaactgaaggacagcggaaagtctttatcaatgttccagcagcaacttgaacagtccaagctcctctacaaacaacagttggaggagtgcagacatcaggagaatctgatcgagaatctggctagacagcgagacgccctccaagctcaaagagaagcatttctcgaacagatgagcaaggcttttctggagcccctgtctcaactgcaggtcgcagacttcgaagaaatccgcagctaccgggctcctcctgaatcagtggttcgggtcactgatgccatgtgcgacctgttccaccacgaaaccggctgggcttcagcgaaacagctcctgtgtaccgaagatttctaccaggaactggtcttcttccccaaagagaaaattacagactccgaacttattaaacttcacctcatcctgaaggcgcctggaatggatgacgctgctctgcgggctgtgagccgtcccgctgctagtctcgccgcttggctgtgggcagtgcttcactacggtctggctcactgtcgcggtctgcctaccgatctgctcctccaacaggtcgaggcgacattgacgcgcgaacaggctaggctgggatattaccaattccaggcccaggaaacattggagcacaatctggccttggcgaagatggtagaggacgcacaggcctcacataactgcgtggccaagactttgtcccaagctcagtgtggacagtatcacaaatggcctatgaaggctgctctgctgacccctatgagggcatggactacacagctgcagaaactgaaggggagatgcatgaccgttttcggagacacactgctgtgtagcgcagcgattatctacctaggacctttcccacctctgcgtcgtcaagagctgctcgatgagtggctcgctctgtgccgtgggtttcaagaggctctcggccctgacgacgtggctcaggccttgaaacgcaagcagaagtccgtctcaataccccctaaaaatcctctgctggcaacgcatagtcctttcagcattctctcactcctttcatcggaatctgagcagtatcagtgggatgggaatctcaaacctcaggccaagtccgctcaccttgcgggactgctgctacgtagtccaacccattacagcagctgccgatggcctctgttactggatcctagcaatgaagctctgatttggctcgatccactgccactggaggagaatagaagctttgctccagcacttacagaaggtcggggaaaaggccttatgcgaaatcaaaaacgtgagtcaaagacagacatgaaagaggaagatgacgaatcagaggagtccaatgaggccgaagatcaaacgaaagagcaaaaagctgaggagagaaaaaatgaacaggagaaggagcaggaggagaatgaagaaaaggaggaagagaagacagagtcccagggatctaaacctgcctacgagacacagctgcctagcctgccgtatctgtctgtacttagcggggctgaccccgaactgggatcccagctacaagaggctgcggcatgtggccttccagtgctattgacaaacgtggaactgggactcggatgtgaagaactgcaatggctcctccagcgggagcaactctccccgcctcaggtccagccaggcttttgcttgtacctctctacaaccctgagcctatgtgcaatggaaaaggtcctcggatgcgagctcctgaagggcctcaatgttctggaccttgggttgaatatggagatcctggaagaacagatgcttcacgaaatactgtgtagagaatatcctgagttggagacacgttggcaggatcttaaaattcgagcgctggacacctgtaaagctgtagaagccgctgaagaaagactgctgacaatgctgctgtttcagaatccaaagcggcagaagccagccaaatttctgagaaatatagttcgcgctcagggtaaactttgtcagttacgggcacattgcgaggagctcgaggggcagaagctacaggagatggttctctgggccccttaccggccagtagtgtggcacggtatggcaatggtgaaggcactctctcaacttcagaatctgctgcccctcttctgcatgagtcccgagaattggctcgccgtgacaaaacaggcactggattcaatgaagccccgtgaaattaaccatggtgaggacttggcatcccacctgctccagctgcgggctcacctaacccgacagctgcttggatctaccgtaaccgccttgggtctaactcaagtgcctctagtgggcgcactcggcgcactagcacttctgcaggcaacaggcaaagctagtgagctcgagcggctggctttatggccaggactggccgcttccccgtctaccgtacattcaaagccagtgtctgatgtggcccgtccagcctggttaggaccaaaagcctggcacgagtgtgaaatgctggaactacttcctccctttgtcggtctgtgcgctagcctcgcgggacactcctctgcctggcaggcctatctaagccttagctcaaccgttcttgggcctgccccagggcctgggccagaaccactgagtcttctgcaaaaacttattctctggcgcgtactcaggccggaatgtttggccggagccctcgccgacttcacaacctcactacttggtaggcccctggacgagaatacctacgcccctaccatgccttttaaacactcccaggccactcaaccgatgttaatcttgttgcctccgccagggcatccttcggccaccctgcaccctctgaccgtaatccaaaaattagcagccaaatatcagcaaggccaaaagcagctccaagtgatcgctttagggtctgaagcctgggatccagtgtcagtggttgtatcaacgctttcccaggctatgtatgaggggcattggttggtgcttgacaattgtcatctcatgccgcactggccaaaagagttgttgcagctgttactcgagctcctggggcgagctaaagtggtggccgatctcgaatccgagcagctgttagaccagccagagtctcgaaatgtgtcaacagtccatcgcgatttccgtctatggctaattgtcccagccgagagcagcgcttctttgccagctgtgctcactcagcacagtatgcccgtgttctggaaccaatcactggagctgggtcatgttctcatagactccgtcgagctggcccagcaggtcctgtatatgcagccacccacccaagccctgcccctgctgctgcttcacgggttgttactacaccgccagttgtacggcacacgcctgcaggcccaccggggaagatggagtcaagtgacactgacccaggtactgcagacacaggatcagttgtgggccagtctgtccaacccaagggccgctatgcaggaactggccgcatccgtgttttatgggggacctctgggggatactgaggatagagaagccctcatttccctgacgcaagcctgtctctcccctagttccggatcatgggtgcaaccacataccccacaaagcctgctggccacactgatgccgttgcccgaacttcgggagctcgacgccatggcagagtgcaaggcccaaatgcatttgttgccgagccccccagaacccaggctctgcggtttatccgagggccctcaggcttggctgttgaggagacaaagcagggccttgctgagtgctcttcagaggtcgtccccagtgtgggtcccggagtctagacggggagcccagctagccgaacgcagactgagacaaaggttggtacaagtgaatcgccgattagagagcctccaggatctcttaacacatgtgattcgtcaagatgagagcgatgctccatggagcgttctcgggcctaatgctagaagacccctagaaggggtattggagactgaggcccttgagctgtcacagctcgtcggcactctgcaaagggatctggactgtctgctccaacaactcaagggagcccctccctgcccaagccggcgatgcgcagctgtggcgcatgccctgtggactggtagactccctttaccatggagaccacatgccccagcaggaccccagccaccttggcactggctgcgacagctctcaagacgtggtcaactcctggtacggtatcttggggtcggcgctgatgcctcctccgacgtacctgaaagggtgttccacttgagtgcttttcgccacccacggaggctgttactggcgctgcgtggtgaggccgcactggatcagaatgtcccttcttctaacttcccaggcagcaggggttctgtctcatcacaactacagtataaacgattggaaatgaactccaaccctcttcatttcagagtggagaacggtccgaacccaactgtcccggagcgcggtctactactgatcgggctacaagtgctccatgctgaatgggaccccatagccggagcactgcaggatagccccagttcgcagccctctcctcttcctccagtaagcatctcaacccaggcacctggcactagcgacttacccgctcccgcagacctcaccgtttattcatgtccagtctatatgggtgggcctctcggcaccgccaagttacaaagtagaaatatcgtgatgcacctgccactacccacaaagctcaccccaaacacttgcgttcaaagacgagtgcatgtgtgcagcccacccctaagctaa

SEQ ID NO: 239428 - DNA, 14862 bp, Artificial Sequence
  derived and/or modified sequence
aacggttctaacagctgggtgcgggtggagctgcgggcgatcgccagctcgagtgcagattccttgctgtgaccgaggttcagagtgagctctgtcggtgtgtcagtttgcctcttcaggcactcttcaatgaaacctcatcagcagatcgggctctcttcccttgccttgcctcctaacccccctaggccaggtgagggggacagggtactgggaggtaagaaggaactcttctgcaaggagggctctcacgtctgtcttaggcctgctccttaccagagtctttggggaagcagtagggagggcctgagggtctcaggaaaggctctctgctggtctggctctgctctgtagctccatctatttccctgtcccaggtcctttcttcctcctaaccccattgactctgaccatcccctgcccagagcctgaggtcccttctctggcccctctgctgggctggcccatgcaggtgaggccccgcatctggcatcctggaactggcagttggagcctgagctatgggcaaggtcacttcgacagcagttgaatgcccagctcctcatggtcccggaggagaggagggtaggtttgtcttctgatgagacatcatctgattcccttaagtcttggcactccatatgtgtcttggacagcaaagaacagcccttggcctgccagcagaaacagaggcagttcgtgaagccagtgactgagtcagagcagcccacagtgctggaactcctgctagctgagctccgaactctgttctcagctgtgttgcaggacagtagccctgcagcttggcgctatcttcatgcagtactgggtctactgcctccatatcgtgagttgctagttggccaccttgatttgctgcccttcctggagcagctgtactgctgggcaccctgggtccaaacccacctccatctggacctgctaggtgccattgtccaggcctttcctccagacagctctttgttagacagtgcttcccatgctgactgctgtccccagaagcggaggctccatcacaggcccccatgcccagcttgcccttttgtgcaggcccagtggagcaggcagcaagtaaaggaggagctggccacctggctgcgaccattgacactgcctgagctacagcgctgcctgggcattgttggtgctcaggtggccctagaagaggctgtgtggctggatggacttagtctccttcccttggcactggcagcggacatccctgtacggtatgaaagcagtgacactgacaatgcagaggtggagcctgttggaagaaaagagaccaggtctcagcttgactatgaagttcccagggaaaaggccttccaaaagagcagcaccggcttttcacctgagacttccttcctggatagccaggtgatgactgctctgaagatggagagatacctgaagaagatccacttcctctatctcaatgtggctcccagccggtactttaggccttacagcctgatggtggtgccacccgacaaggtgaatcccgagcactacatcttctctccctttgggatcttgcatgtacatcctgtggaaggtagcgagacgatgacactgggtacctggcaccatcactgtgttctctggcagcagctccagttcattccattctttaagtattgcctcttacgcaagtcctttacctgttggaagaagaatgtgagattacaggggctgcatcgactccagaaattcctagagaatcatctgctcttggctgtgccccactttggagctgggctactccatattagcaggcttctgcaggagctacactctgtgtcctggctaccccaggaactggatcggtgctatgagctgctggacctgcagacggctctagccgaggagaagcataaggctctacggctgctccatcgttgcctaaacctctgcacatccattcttcgactggttcacgaggacacataccacatgcaacagtgcctacaggagcgagtacaaaactgtgacaggatcaggacaggccaaggctccatataccttcagagggtacagcacaagcaactggagcagaagctgaagcaagcagaggcctggtggctgcagctgggaaagtttgcccgcctggttgactacatgatttgtcagagcctcatttctgtcttggaagagcagataacctcttttgtggccaacatccttcaagccccaaggcagaaaccctttctctcatcacagctggtctttgatgatcatggtcaactgtctcatgtgccctgtgttgaaaatatgatccagactctaactggaggcctacagtctgtcaagacctctgccttgcaggtagtgcagtctgcagacctgaagacctcctcggattccctgtattctgaagaagaagatgaagaggaggactcaaaagacgaatttctgatgcccaagttccagggccagcccagcgatgctgtgagcatcttctgtggcccgaatgtgggattggtgtggccctggaagtctcacccaattgctggtatcttggaggtccgtggatgtcggctgcggggccaatacttcccccacaattataagcagctggaggaagacctggacaacaaccctaagatccagcaggcactgaatatacaacaggtgctgctggagggcgtgctgtgcaaggtgcaggaattctgcagggaacatcattggataacaggcatttatgaattcctgcaatcctgggggcctcagaagctggaagacatgagaggtggtcccatcaagaactacgtgacgctggtgagccgcctgaatgtttggcaggcccgtgtctccagtatgcctatcgagttgctcacaaaaggcgggttgctgctacttagctgccatgatgtacaggcagagatggaatccaagctgaacagcataaggaaggacattcttgcacacgtgcaaaatgagtgctggaacctcagtcaacaactcatgacagagctcacagatttcatgcatatcttccgaaccatcaactcagatattcatgccattgcacagtgcacccagaagttgaatgaagccaatgaacagtacgtcgagctggaggagcgaatggaatacgtacgggcactccacgaactcatccgcaaccactttagcctctttagtgctgagaatgaagcactggacatctcggtgagaaggcaattcggggagtcacccatccctccctgccctcctcccccacaaccacatctactccactgccctctgcttgccccacagcttctggatatgtgggaggcatttcagtttgagaaaagccaggcttcagagttcctgctcagcaagcgacatgccattatgcccaagctgcagcagctgatggcagcagcattggcagagctggaaggcctgcttgcgaaggccctctccggtccctttatggaccccacacaagatcagaggagtactgagcaccagctcgtctccctagagcgtcagttccagaacacagtcagcgacctcagtgaactgcaccacgcctatgccatcttcactgaggatgagactcctgtgcccttgccaatctgtgggacacgtcctattgtgcagcagcagcgcatatggcacctgtaccgagtcatctccgaaaacatcagcgagtggaagtgcatggcttttgccaagttcagcccagctatggcccaggagaagacagagggctggctgacagaggcagcacggatgagcacaaccctggagctgcacagccccgtgctgcagcactgcatgcgcatcctgggggagtttcgcagctacctgcccctgctcactaagctgggcagcctccacccacagagcctcaactgccagtgtctcctgcgtgcccttgggctgggcagtctccaaactatagaactcctaacgctgggccagctgcttacttatccactgctggagtttgcagatcgaatcaaccaggtctggcagaatgaaaatgaacgaattcatgcccaagagactatacggcggttgcagcggtactgggaagcgcgccagctgcgcctgctcaacttcatcctgcatgtaccctacgagcccccagcctcagagcgctccaagaggcaggtgctccgcagcccccaatgggaggtagtggacaaagatagtggcaccttcatcctctcagattacagcaacctgcaggattccatccaggaaagtcttcaggtgttgtccaagatcttggccatcgaaaagtcaggagatttaaacaaaatagctttggagtgggtggccatcatgcatggcctgggtgccctgctggaggtgtggctgactttccagcagaagtggatttttctgaataaagttctgcatgagatgaagatccagtttcctaatgctgacctgaactctcgtttcaaggtcatggatgaccagtatcgaaccctgatgcgcatctctgtagctgaccccatggttctgtcacttgtagtgcccagtgccgagaggagcccttacttccaaggccagcagctgcaacaactgctgcaagcaggatcggtggagctggagggcatcatcatgagtctggagagcgtgctctatggggtgtgtgctcacttcccccgcctcttcttccttagtgacagtgagctggtagccctgctggctgctcgactggaatcatgcgaagcccagctatgggtacgacgctgctttcctcatgtgcatgctgtgagcttcaggtcttgcccaactggtgagaaaaacacagatgactgggagtcaagcccaaacacacagactcaggtggaggcacttgcagtgctaggggcaggtggggaggaggtgaagctgcagggtccccttcctctgcatccagatctccctaagtggctggcctctctggagaagtgtctgcgcttggcactggtgcacatgctgcagggctgtgtggctgctcgccttgctcgaggcccatctctaggtgaggccctcaagcaactgcccaagcaaaacaagttgtacctgcaactgtatgtccagcactggatcgacttagtccaggccttcccatggcagtgtgtgctggtggcagaggaggtggtatggcgggccgagatggaggaggctctgcttgagtggggtaccctggccatggtctccatgcatatgcgcaagcttgaggtactggtgaattttatgcgggcccagagggcttcccaaggtgggcagtccctgccttctgtccgccagaccagccttctcagtgccctgctggtcatggcagtgactcaccgggatatagcacagctgctggaacagcaccaggtcagtgatctcacagactttcactgggtccgccaactcaagtatcacttgggttcacctcacataatccccaaaagccccctacagagtcttaagactattgcatcttctgaaccctctctgtcaccagcggcatgctggatagatgtgctaggcaggtccttcctgtacaattacgagtatctgggacctagactagggcctctacccagcctactgcctgaacggccagccctggtactattattggccctagaggaggtggcctgtgggaccgtactgggtcctaatggtgtgggcaagagagctatagtgaacagcctggcacaggccctgggccgccagctggtgatgctaccctgctcacctcagatagaggctcaatgcctgagcaactatctgaatggtgccctgcagggtggtgcctggctgctgttggagaaagttcatcagctgccccctggcttgctctctgccctgggccagcgcctgggtgaactgcaccacttgtatgccccactgtaccaggaggcttcccgaaacacaagcaccatagaccccacccagccccagctccttggcagtagcttctttgaaaaacatcacgtgtctgtgcgccttggctatggctgtctcctggtactgcgtgccctgagctctgctgtgcctgccaacctgcacctgctgctgcggcctgtggcattggcattgcctgatctgcggcaagtggcagagctgactctgctgggtgcagggatgagggatgccttccagatggctacccgcctatccaaattcttctctctagagcgtgagctggtgtctgggcccctgccctgccgcctgccactgctcaagcagatactggaagacacaatacggacactaaatgtgaccaaggaggaaccgaagtgccagaagcctcgcagcctagctgccattgaggaggctgccctactgcgctcaccactgtttagcattctcaatgggctccacctgcacaacctccgagggctgttgtgtgcgcttttccctagcgccagccaagtgctggcagaacctatgacttacaagctgatgaagccattggtggtggaggaactgcaacaggtaggtctggatcccagccctgacattttggggtccttggaacagttgagccaggccctgagccgggcctcaggcattctgctcctgggccctgcgggcagcggcaagaccacttgttggcacagcttatttaagatccagaatcggctggcagccatggaggacacctcaacccaaggctgccagcctgtggaaattacccacctgtaccccagtggcctcagcccccaggagttcctgggatggctagagggctcctgctggcatcatggcatctttcccaaggtacttcgtgcagccggtcagtgtaacaacatgggccaaaagaggcagacagaggaatcaatcgggatccagcactggataatatgtgatggagcctccaatggtgcttggctggactccatcacttgcctcctgagtgagcttccccagcttagtctccccagtggacagcagatagcacgacccccaggcacctttctcttgatggaggtggctgacacaacaggcatatcccccacagtggtaggctgttgtgccctagtctggtgtggtggagagcagacttggcagtgtatacttagtgccctgatggcatcccttccttatgagtaccgcctgcagcaccggacagtcgctgagctcaaccacatggctgaggttctggtgcctgcaacattgcgattcctcacctgccaaggtgtcagctctctgctgcaggtacacgggcagcaggctgtttgtgcaggtgtggcagaagttaccagcatggcacgcatcttgcatagtctgcttgacctccaccttcgcctaaaggaggagaaggcccctggcccagaggacctcagctatagtgatcctgtggcccaaagcttcaggtcttcaaaaagcagctttctaaaccggtcccaggttgacagtgacgatgtgccagataagtgcagggaacacttgctggctgtcagcagttttctttttgccttgatctggggctttggagcccaccttccctccaggttctggcccatctttgataccttcataagggattctattagtcgcctctccaactaccctgagccaccaccctcagccttggtgtttgatctacatgtaagccctgaagatggaacactggtccccttcactggccaatacctgagcagccacatcaaaggaactttgggcacctttcacccttctatccagactgaacggctcttgtatgtggtggacctgcttctgtcagggggacagccagtgttgctggctggagaggcagcaacagggaagtcagcctttgtggaggtgctggtagagccacatcacccttacatatacagccccatccaccctgccttcagttcctcccacctccgtctcctgctgagcagaggaatccagggccaaacacaagccagcccacagcctgggcatcaccaggattctaaaccctccctcctcttcttgctggaggacctgcacctagccacttctgacccagagaagagctgccagccagtgttggagactctgcgccaggccatggatggcactgtgtatgcccacagcaccttggaactgcagacgctgcagcctacagtcaacttccttgccactgtcacagtgccaggatactgtgagcgcccactgtgtccacgcctctttcgactcttcacagtcctggccctggaaagcatgacccaggccaccctgctggaaagacatgtgcctatcattcaggcttggcttgagcgtttcccttctgtggaacgggagcgtgctctggcacgaggtctggttagggcctcagtagaggcctgggaggctgtgtgcaattgcttcatgccttcacccctccacccacactaccacttctccctacactctgtgagccacctactgagcagcctgcagctgctgcccaacagaacaggctcccgaggttttgtggactatcccaaccaccaggagcacttgcgccgggtgtcaggcctgcgaggcacttgtctgaccgttatgatggccacacgcaatgtggtgcgtctttggttgcatgaggcacagagaaccttttgcgaccggctggacagccccagggaacgctcctactgtgccaagctgctcctagtagtagctcaaagtgtcttctgctgtgggccagggccccagcacctgggcaaggaccatcaggagagtgaggaggaggaggaggaggagagggtgcccgaagtagaatctgaaggggagttggcccagtgggaggacttcagcaacagcaatagtgaaacagaggaggaagaggaaccttatggccttcaggtcgccagagtctcaaactccagagatccaagtctaacaccatccataggaccagtaagcagggggatgaaggaaagcataagtcacaagataaggcaagagaaaggcacaagggcatccaactataggctccaggtaaggagatcattcaagacttggtggcagaagaaaccccagatggacctgatctcacccttgttgttaccagtgttactactacatccccaggaaaagccctcagacctggtcttcagtcaggagctgatactggggcctaactctgagacccccaacttgtacctggaacgacagtgggagaagctagaggagcagttggccacctcagctgctcaactgaagttgagcccccacctggcccggtgtcattccatggcccagcacgtggcccgcctggtccgggtgctggccaggccccggcagcatggcctgctgctctcgggggctctgggtactgggcgccacactgccatcactctggcttctagcatttgtcaggcccatttctttcatctaccatctgggtcagaggaggccattctccaatgtctacgagatgccagctggcatgctggcatgttaagccagccagtggctctgttggtacccagtggtgtggatctcactacacttcatcgcctcctggccctggcaacctcaggcagtttccctggccagtacacagaagcagatttggaccgcattggagaacacctccccagggagaaccttggtgtcaaacagaacatcaagaaggaaatggtgttgcagaggttccaccagcaagtgtgcagccaccttcacctgttcttcctgattggagataaacaggcccacaagcagctgccctccacccttttcctgaggctccttcaactggccactgccagcattgaccgctatgaaccctgggaccaagctgccctggccaaggtggcccagcatcacctggagggtgctcagagtgtgccccttgatgacggctcctggaagtacccagacctccaggcctcaattcccagtgtggccaaagccatggctcttatccacctttcggccacccactaccatgagcacctgtgccctgcattgccactcgtcacccccaagaccttcctagacttcctggacactttcctgatgctgcagcaacagacaatcctgaagattaagaacaaggcccagcgggtccagaatgccttggagaatctgagaatgctgattaaggagcacggtacccatgccaatctgatctttgacttggaacagcagctgaaagactccggcaagagtctcagcatgtttcagcagcagctagagcaaagcaagctcctatacaagcagcagctggaagagtgtcggcatcaagagaacctcattgagaacctggccaggcaacgggatgccctgcaagctcagcgagaggctttcctggagcagatgagcaaggcatttctggagcctctgagccagctgcaggtggctgactttgaggagatacggagctatcgagcaccaccagaatctgtggtccgggtaactgatgcaatgtgtgacttgttccaccatgaaacaggctgggccagtgccaaacagctgttatgcactgaggatttttatcaggagctggtgttcttccccaaggagaagataacagactcagagctgataaagttacatctaattctgaaggctccaggtatggacgatgcagccctgcgggcagtgagccgacctgcagccagcctggcagcctggctctgggctgttctgcactatgggctggcgcattgccggggactgcccacggacctgctgctgcagcaagtggaggcaacactcactcgggagcaggcccgcctgggctactaccagtttcaggcccaggagaccctggagcataatttggccctggctaagatggtggaggatgcccaagcttcccacaactgcgtggcaaagaccctcagtcaagcacagtgtgggcagtatcacaaatggcccatgaaggctgcactgctcacgcctatgcgtgcctggactacacagctccagaagctgaagggacgctgcatgactgtgtttggagataccctcctatgttcagctgccatcatctacctgggtcccttcccaccattgcggcgccaagagctactggacgagtggttagctctgtgtaggggctttcaggaggctctgggcccagatgatgtggcacaggcactgaagcggaagcaaaaatctgtcagcataccaccaaagaaccccctgctggctacacactctcccttcagtattctgtccttgctgagctctgaatcggagcagtaccagtgggatggaaacctgaagccacaggcaaagtcggcccacctggcaggcttgcttctgcgaagccccacacactacagtagttgccgttggcctctgctgcttgaccccagcaacgaggccctcatctggttggacccgctgcctctggaagagaatcgatcttttgcgccagccctcactgagggtagagggaaaggcctcatgagaaatcaaaagagagagagtaaaacggacatgaaagaggaagatgatgagagtgaagagagtaatgaggctgaggaccagacaaaagagcagaaggcagaggaaagaaaaaatgagcaggagaaagagcaagaggaaaatgaagagaaagaggaggagaagacagagagccaggggtcaaagccagcctatgagactcagcttccatcccttccctaccttagtgttctttcaggtgctgacccagagctgggttctcagctccaggaggcagctgcttgtggcctgcctgtgttactgaccaatgtggagctgggtctagggtgcgaagaactgcaatggctgctgcaacgggagcagctgagtccaccccaggtgcagcctggcttctgtctgtatctcagcaccaccctctccctctgtgccatggaaaaagtgctaggttgtgaactgctaaaggggctgaatgtgttggatctgggcctgaacatggaaatactggaagaacagatgctgcatgaaatcttgtgcagagagtatcctgaactcgagacccgctggcaggacctaaagatcagagccctagatacctgcaaggctgtggaggctgctgaggagcggctgctgacgatgctgctgttccagaatccgaagcgtcagaagccagccaagtttctgcggaacatagtgagggcccaaggaaagctatgccagctgcgtgctcattgtgaagagttagaagggcagaaactacaggagatggtattgtgggcaccctatcgacctgtggtttggcatggaatggccatggtaaaggccctaagccaactgcagaacctgctgccacttttctgtatgagcccagagaactggctggcagtcactaagcaggctctggacagcatgaagccacgtgagattaatcacggggaggacctggccagccatctactgcaattgagagcacacctgacccgccagctgctgggcagcaccgtgactgcactgggccttacccaagtacccttggtgggtgcattgggcgctttggctctgctgcaagcaacagggaaagcatcagagctggaaagactggcactctggcctggactagcagcctctcccagcacagtccacagcaagccagtctcagatgtggctcgaccggcctggcttgggccaaaagcctggcatgaatgtgagatgttagagctgctgcccccatttgttggcctgtgtgcctccctggcaggccactccagtgcttggcaggcttacctgtcactgtcatccacagtgctgggtcctgcacctgggccagggcctgagccactcagcctcctccagaagctgatcctgtggcgcgttctgcgacctgagtgcctggcaggtgccctggcagacttcaccactagcctcctgggtcggcccctggatgaaaacacgtatgctcccaccatgccctttaaacatagtcaggctactcagcccatgctgatcttgttgccaccgcctggccacccctcagccactctgcatcctctgactgtcatccagaaactggctgccaagtatcagcaggggcagaagcaactgcaggtgatagccctgggctctgaagcctgggacccagtctcagttgtggtcagcactctatcccaggctatgtatgaggggcactggctggtgctggacaactgtcatctgatgccccattggccgaaagagctgctacagctcttgctggaactgttaggcagagccaaggtggttgcagacctggaatcagaacagcttttagaccaacctgaaagcaggaatgtaagcactgttcacagagattttcgtctttggcttattgtgcctgcagagtctagtgcttctttgccagctgtgctgactcagcactccatgcctgttttctggaaccagtccctggagctgggccatgttttgattgacagtgtggagctagcccagcaagtactctacatgcaaccccccacccaggcactacctctgctcctcctccatggcctcctgctacaccggcagctctatggaacaaggctgcaggcacacagggggcgctggagtcaagtgactctaacccaggttcttcagacccaagaccagctgtgggcaagtcttagcaatccccgtgctgccatgcaagagctggctgcttcagttttctacgggggtcctctgggggacactgaggacagggaggccctgattagcctcacacaagcctgcctgagccccagtagtgggagctgggtccagccacacacacctcagtctttgctggccacgctcatgcccctcccagagctaagggagctggatgcaatggcagagtgcaaggcccagatgcacctactgccctcaccacctgaaccccggctctgcggactgagtgagggcccccaagcctggctgttgcgacgccagagtcgcgctctcttgagtgcgctgcagcggagttcacccgtgtgggttcctgagtctcgaagaggcgcccagcttgcggaaaggcgactgcggcaacgcctagtgcaagtcaaccggaggctggagtcactgcaggatctgctgacccacgtgattcgccaagacgagtccgacgccccgtggtcagtgctggggccaaatgcacggcggcctctggagggcgtcttagagaccgaggctctagaactgagccagttggtgggcacgctacaacgcgaccttgattgcctgttgcagcagctgaagggcgcacccccgtgcccctcccgccgctgtgctgcggtggcccacgctctctggactggccgcctacccttgccttggcgacctcatgcgccggccggtccgcagccgccctggcactggctgcgacagttgtcgcgccgtgggcaactgttggttcgttacttgggcgtgggcgcggacgcgagcagtgatgtaccagagcgcgtcttccacctgtcagcctttcgccacccgcgccgcctgctgctggcattgcgtggggaagctgccctggaccagaatgtgcccagctcgaatttccctggtagccgaggctcggtctccagtcagctccagtataaacgtctggagatgaacagcaaccctctgcacttcagggtggagaatggtccaaatcccacggttccagagagagggctgctgctgatcgggctacaggtcctacatgcggagtgggacccaatagctggagccttgcaggacagtccttccagccaacccagccctctgcctcccgtcagcatcagcacacaggccccgggcaccagtgacctgccagccccagccgacctgactgtgtactcgtgtcctgtgtacatgggagggccccttggcaccgctaagctgcagagcaggaacatcgtgatgcatctgcctttacccaccaagctcacccccaacacctgtgtccaaaggagggtccatgtgtgcagcccacccctgtcttgagcccgtctaccaaaataaagttgtagtgattccatg

SEQ ID NO: 239429 - DNA, 4322 bp, Artificial Sequence
  derived and/or modified sequence
cccgctgcctctggaagagaatcgatcttttgcgccagccctcactgagggtagagggaaaggcctcatgagaaatcaaaagagagagagtaaaacggacatgaaagaggaagatgatgagagtgaagagagtaatgaggctgaggaccagacaaaagagcagaaggcagaggaaagaaaaaatgagcaggagaaagagcaagaggaaaatgaagagaaagaggaggagaagacagagagccaggggtcaaagccagcctatgagactcagcttccatcccttccctaccttagtgttctttcaggtgctgacccagagctgggttctcagctccaggaggcagctgcttgtggcactaactatattgaagcgtcttgtgggaaccctcctatcagccacagggaagctggtcagagccagacctcgtgcctggggaatggggatcatgggtgctggcattgtgggtagggtgcctttgcctccctctcacaggcctgcctgtgttactgaccaatgtggagctgggtctagggtgcgaagaactgcaatggctgctgcaacgggagcagctgagtccaccccaggtgcagcctggcttctgtctgtatctcagcaccaccctctccctctgtgccatggaaaaagtgctaggttgtgaactgctaaaggggctgaatgtgttggatctgggcctgaacatggaaatactggaagaacagatgctgcatgaaatcttgtgcagagagtatcctgaactcgagacccgctggcaggacctaaagatcagagccctagatacctgcaaggctgtggaggctgctgaggagcggctgctgacgatgctgctgttccagaatccgaagcgtcagaagccagccaagtttctgcggaacatagtgagggcccaaggaaagctatgccagctgcgtgctcattgtgaagagttagaagggcagaaactacaggagatggtattgtgggcaccctatcgacctgtggtttggcatggaatggccatggtaaaggccctaagccaactgcagaacctgctgccacttttctgtatgagcccagagaactggctggcagtcactaagcaggctctggacagcatgaagccacgtgagattaatcacggggaggacctggccagccatctactgcaattgagagcacacctgacccgccagctgctgggcagcaccgtgactgcactgggccttacccaagtacccttggtgggtgcattgggcgctttggctctgctgcaagcaacagggaaagcatcagagctggaaagactggcactctggcctggactagcagcctctcccagcacagtccacagcaagccagtctcagatgtggctcgaccggcctggcttgggccaaaagcctggcatgaatgtgagatgttagagctgctgcccccatttgttggcctgtgtgcctccctggcaggccactccagtgcttggcaggcttacctgtcactgtcatccacagtgctgggtcctgcacctgggccagggcctgagccactcagcctcctccagaagctgatcctgtggcgcgttctgcgacctgagtgcctggcaggtgccctggcagacttcaccactagcctcctgggtcggcccctggatgaaaacacgtatgctcccaccatgccctttaaacatagtcaggctactcagcccatgctgatcttgttgccaccgcctggccacccctcagccactctgcatcctctgactgtcatccagaaactggctgccaagtatcagcaggggcagaagcaactgcaggtgatagccctgggctctgaagcctgggacccagtctcagttgtggtcagcactctatcccaggctatgtatgaggggcactggctggtgctggacaactgtcatctgatgccccattggccgaaagagctgctacagctcttgctggaactgttaggcagagccaaggtggttgcagacctggaatcagaacagcttttagaccaacctgaaagcaggaatgtaagcactgttcacagagattttcgtctttggcttattgtgcctgcagagtctagtgcttctttgccagctgtgctgactcagcactccatgcctgttttctggaaccagtccctggagctgggccatgttttgattgacagtgtggagctagcccagcaagtactctacatgcaaccccccacccaggcactacctctgctcctcctccatggcctcctgctacaccggcagctctatggaacaaggctgcaggcacacagggggcgctggagtcaagtgactctaacccaggttcttcagacccaagaccagctgtgggcaagtcttagcaatccccgtgctgccatgcaagagctggctggtgagacccttcctctcccccttggagtcatcagcccccaggagagcctggaagagggtgggggtgggatacaattcacagctttggttttggcggtggtggaaactgaaggtactggaactgagagactctaacctcatcttcagcttcagttttctacgggggtcctctgggggacactgaggacagggaggccctgattagcctcacacaagcctgcctgagccccagtagtgggagctgggtccagccacacacacctcagtctttgctggccacgctcatgcccctcccaggtaagcctcactcaggtatctgttttggggtagggaatagtgcaatgcaatgccaccccccacagaaatgtggacagcagtctcaataaaggtatatgagggggtaatattcatactgttatgggggtgatggcagtaaaggctcagaggaaggcctactctctcgagtctagggtggggagagtccatcttgtccctcacccctcacctctatccccaagagctaagggagctggatgcaatggcagagtgcaaggcccagatgcacctactgccctcaccacctgaaccccggctctgcggactgagtgagggcccccaagcctggctgttgcgacgccagagtcgcgctctcttgagtgcgctgcagcggagttcacccgtgtgggttcctgagtctcgaagaggcgcccagcttgcggaaaggcgactgcggcaacgcctagtgcaagtcaaccggaggctggagtcactgcaggatctgctgacccacgtgattcgccaagacgagtccgacgccccgtggtcagtgctggggccaaatgcacggcggcctctggagggcgtcttagagaccgaggctctagaactgagccagttggtgggcacgctacaacgcgaccttgattgcctgttgcagcagctgaagggcgcacccccgtgcccctcccgccgctgtgctgcggtggcccacgctctctggactggccgcctacccttgccttggcgacctcatgcgccggccggtccgcagccgccctggcactggctgcgacagttgtcgcgccgtgggcaactgttggttcgttacttgggcgtgggcgcggacgcgagcagtgatgtaccagagcgcgtcttccacctgtcagcctttcgccacccgcgccgcctgctgctggcattgcgtggggaagctgccctggaccagaatgtgcccagctcgaatttccctggtagccgaggctcggtctccagtcagctccagtataaacgtctggagatgaacagcaaccctctgcacttcagggtatcttcgcgccgcccctcgttcgcggttccagtcccctcgaagtctctaattacacctcgcagttaccccttcttggtgatcttgcccccggtaaccctgctagcttctccgatctcgcttcaccacgacctcctacccgctaacccccacttcccacctgccacctcccagcttcctagccttgcctgaccagcttctgacgcccccaggtggagaatggtccaaatcccacggttccagagagagggctgctgctgatcgggctacaggtcctacatgcggagtgggacccaatagctggagccttgcaggacagtccttccagccaacccagccctctgcctcccgtcagcatcagcacacaggccccgggcaccagtgacctgccagccccagccgacctgactgtgtactcgtgtcctgtgtacatgggagggccccttggcaccgctaagctgcagagcaggaacatcgtgatgcatctgcctttacccaccaagctcacccccaacacctgtgtccaaaggagggtccatgtgtgcagcccacccctgtcttgagcccgtctaccaaaataaagttgtagtgattccatgaaaga

SEQ ID NO: 239430 - DNA, 14298 bp, Artificial Sequence
  derived and/or modified sequence
atggtcccggaggagaggagggtaggtttgtcttctgatgagacatcatctgattcccttaagtcttggcactccatatgtgtcttggacagcaaagaacagcccttggcctgccagcagaaacagaggcagttcgtgaagccagtgactgagtcagagcagcccacagtgctggaactcctgctagctgagctccgaactctgttctcagctgtgttgcaggacagtagccctgcagcttggcgctatcttcatgcagtactgggtctactgcctccatatcgtgagttgctagttggccaccttgatttgctgcccttcctggagcagctgtactgctgggcaccctgggtccaaacccacctccatctggacctgctaggtgccattgtccaggcctttcctccagacagctctttgttagacagtgcttcccatgctgactgctgtccccagaagcggaggctccatcacaggcccccatgcccagcttgcccttttgtgcaggcccagtggagcaggcagcaagtaaaggaggagctggccacctggctgcgaccattgacactgcctgagctacagcgctgcctgggcattgttggtgctcaggtggccctagaagaggctgtgtggctggatggacttagtctccttcccttggcactggcagcggacatccctgtacggtatgaaagcagtgacactgacaatgcagaggtggagcctgttggaagaaaagagaccaggtctcagcttgactatgaagttcccagggaaaaggccttccaaaagagcagcaccggcttttcacctgagacttccttcctggatagccaggtgatgactgctctgaagatggagagatacctgaagaagatccacttcctctatctcaatgtggctcccagccggtactttaggccttacagcctgatggtggtgccacccgacaaggtgaatcccgagcactacatcttctctccctttgggatcttgcatgtacatcctgtggaaggtagcgagacgatgacactgggtacctggcaccatcactgtgttctctggcagcagctccagttcattccattctttaagtattgcctcttacgcaagtcctttacctgttggaagaagaatgtgagattacaggggctgcatcgactccagaaattcctagagaatcatctgctcttggctgtgccccactttggagctgggctactccatattagcaggcttctgcaggagctacactctgtgtcctggctaccccaggaactggatcggtgctatgagctgctggacctgcagacggctctagccgaggagaagcataaggctctacggctgctccatcgttgcctaaacctctgcacatccattcttcgactggttcacgaggacacataccacatgcaacagtgcctacaggagcgagtacaaaactgtgacaggatcaggacaggccaaggctccatataccttcagagggtacagcacaagcaactggagcagaagctgaagcaagcagaggcctggtggctgcagctgggaaagtttgcccgcctggttgactacatgatttgtcagagcctcatttctgtcttggaagagcagataacctcttttgtggccaacatccttcaagccccaaggcagaaaccctttctctcatcacagctggtctttgatgatcatggtcaactgtctcatgtgccctgtgttgaaaatatgatccagactctaactggaggcctacagtctgtcaagacctctgccttgcaggtagtgcagtctgcagacctgaagacctcctcggattccctgtattctgaagaagaagatgaagaggaggactcaaaagacgaatttctgatgcccaagttccagggccagcccagcgatgctgtgagcatcttctgtggcccgaatgtgggattggtgtggccctggaagtctcacccaattgctggtatcttggaggtccgtggatgtcggctgcggggccaatacttcccccacaattataagcagctggaggaagacctggacaacaaccctaagatccagcaggcactgaatatacaacaggtgctgctggagggcgtgctgtgcaaggtgcaggaattctgcagggaacatcattggataacaggcatttatgaattcctgcaatcctgggggcctcagaagctggaagacatgagaggtggtcccatcaagaactacgtgacgctggtgagccgcctgaatgtttggcaggcccgtgtctccagtatgcctatcgagttgctcacaaaaggcgggttgctgctacttagctgccatgatgtacaggcagagatggaatccaagctgaacagcataaggaaggacattcttgcacacgtgcaaaatgagtgctggaacctcagtcaacaactcatgacagagctcacagatttcatgcatatcttccgaaccatcaactcagatattcatgccattgcacagtgcacccagaagttgaatgaagccaatgaacagtacgtcgagctggaggagcgaatggaatacgtacgggcactccacgaactcatccgcaaccactttagcctctttagtgctgagaatgaagcactggacatctcggtgagaaggcaattcggggagtcacccatccctccctgccctcctcccccacaaccacatctactccactgccctctgcttgccccacagcttctggatatgtgggaggcatttcagtttgagaaaagccaggcttcagagttcctgctcagcaagcgacatgccattatgcccaagctgcagcagctgatggcagcagcattggcagagctggaaggcctgcttgcgaaggccctctccggtccctttatggaccccacacaagatcagaggagtactgagcaccagctcgtctccctagagcgtcagttccagaacacagtcagcgacctcagtgaactgcaccacgcctatgccatcttcactgaggatgagactcctgtgcccttgccaatctgtgggacacgtcctattgtgcagcagcagcgcatatggcacctgtaccgagtcatctccgaaaacatcagcgagtggaagtgcatggcttttgccaagttcagcccagctatggcccaggagaagacagagggctggctgacagaggcagcacggatgagcacaaccctggagctgcacagccccgtgctgcagcactgcatgcgcatcctgggggagtttcgcagctacctgcccctgctcactaagctgggcagcctccacccacagagcctcaactgccagtgtctcctgcgtgcccttgggctgggcagtctccaaactatagaactcctaacgctgggccagctgcttacttatccactgctggagtttgcagatcgaatcaaccaggtctggcagaatgaaaatgaacgaattcatgcccaagagactatacggcggttgcagcggtactgggaagcgcgccagctgcgcctgctcaacttcatcctgcatgtaccctacgagcccccagcctcagagcgctccaagaggcaggtgctccgcagcccccaatgggaggtagtggacaaagatagtggcaccttcatcctctcagattacagcaacctgcaggattccatccaggaaagtcttcaggtgttgtccaagatcttggccatcgaaaagtcaggagatttaaacaaaatagctttggagtgggtggccatcatgcatggcctgggtgccctgctggaggtgtggctgactttccagcagaagtggatttttctgaataaagttctgcatgagatgaagatccagtttcctaatgctgacctgaactctcgtttcaaggtcatggatgaccagtatcgaaccctgatgcgcatctctgtagctgaccccatggttctgtcacttgtagtgcccagtgccgagaggagcccttacttccaaggccagcagctgcaacaactgctgcaagcaggatcggtggagctggagggcatcatcatgagtctggagagcgtgctctatggggtgtgtgctcacttcccccgcctcttcttccttagtgacagtgagctggtagccctgctggctgctcgactggaatcatgcgaagcccagctatgggtacgacgctgctttcctcatgtgcatgctgtgagcttcaggtcttgcccaactggtgagaaaaacacagatgactgggagtcaagcccaaacacacagactcaggtggaggcacttgcagtgctaggggcaggtggggaggaggtgaagctgcagggtccccttcctctgcatccagatctccctaagtggctggcctctctggagaagtgtctgcgcttggcactggtgcacatgctgcagggctgtgtggctgctcgccttgctcgaggcccatctctaggtgaggccctcaagcaactgcccaagcaaaacaagttgtacctgcaactgtatgtccagcactggatcgacttagtccaggccttcccatggcagtgtgtgctggtggcagaggaggtggtatggcgggccgagatggaggaggctctgcttgagtggggtaccctggccatggtctccatgcatatgcgcaagcttgaggtactggtgaattttatgcgggcccagagggcttcccaaggtgggcagtccctgccttctgtccgccagaccagccttctcagtgccctgctggtcatggcagtgactcaccgggatatagcacagctgctggaacagcaccaggtcagtgatctcacagactttcactgggtccgccaactcaagtatcacttgggttcacctcacataatccccaaaagccccctacagagtcttaagactattgcatcttctgaaccctctctgtcaccagcggcatgctggatagatgtgctaggcaggtccttcctgtacaattacgagtatctgggacctagactagggcctctacccagcctactgcctgaacggccagccctggtactattattggccctagaggaggtggcctgtgggaccgtactgggtcctaatggtgtgggcaagagagctatagtgaacagcctggcacaggccctgggccgccagctggtgatgctaccctgctcacctcagatagaggctcaatgcctgagcaactatctgaatggtgccctgcagggtggtgcctggctgctgttggagaaagttcatcagctgccccctggcttgctctctgccctgggccagcgcctgggtgaactgcaccacttgtatgccccactgtaccaggaggcttcccgaaacacaagcaccatagaccccacccagccccagctccttggcagtagcttctttgaaaaacatcacgtgtctgtgcgccttggctatggctgtctcctggtactgcgtgccctgagctctgctgtgcctgccaacctgcacctgctgctgcggcctgtggcattggcattgcctgatctgcggcaagtggcagagctgactctgctgggtgcagggatgagggatgccttccagatggctacccgcctatccaaattcttctctctagagcgtgagctggtgtctgggcccctgccctgccgcctgccactgctcaagcagatactggaagacacaatacggacactaaatgtgaccaaggaggaaccgaagtgccagaagcctcgcagcctagctgccattgaggaggctgccctactgcgctcaccactgtttagcattctcaatgggctccacctgcacaacctccgagggctgttgtgtgcgcttttccctagcgccagccaagtgctggcagaacctatgacttacaagctgatgaagccattggtggtggaggaactgcaacaggtaggtctggatcccagccctgacattttggggtccttggaacagttgagccaggccctgagccgggcctcaggcattctgctcctgggccctgcgggcagcggcaagaccacttgttggcacagcttatttaagatccagaatcggctggcagccatggaggacacctcaacccaaggctgccagcctgtggaaattacccacctgtaccccagtggcctcagcccccaggagttcctgggatggctagagggctcctgctggcatcatggcatctttcccaaggtacttcgtgcagccggtcagtgtaacaacatgggccaaaagaggcagacagaggaatcaatcgggatccagcactggataatatgtgatggagcctccaatggtgcttggctggactccatcacttgcctcctgagtgagcttccccagcttagtctccccagtggacagcagatagcacgacccccaggcacctttctcttgatggaggtggctgacacaacaggcatatcccccacagtggtaggctgttgtgccctagtctggtgtggtggagagcagacttggcagtgtatacttagtgccctgatggcatcccttccttatgagtaccgcctgcagcaccggacagtcgctgagctcaaccacatggctgaggttctggtgcctgcaacattgcgattcctcacctgccaaggtgtcagctctctgctgcaggtacacgggcagcaggctgtttgtgcaggtgtggcagaagttaccagcatggcacgcatcttgcatagtctgcttgacctccaccttcgcctaaaggaggagaaggcccctggcccagaggacctcagctatagtgatcctgtggcccaaagcttcaggtcttcaaaaagcagctttctaaaccggtcccaggttgacagtgacgatgtgccagataagtgcagggaacacttgctggctgtcagcagttttctttttgccttgatctggggctttggagcccaccttccctccaggttctggcccatctttgataccttcataagggattctattagtcgcctctccaactaccctgagccaccaccctcagccttggtgtttgatctacatgtaagccctgaagatggaacactggtccccttcactggccaatacctgagcagccacatcaaaggaactttgggcacctttcacccttctatccagactgaacggctcttgtatgtggtggacctgcttctgtcagggggacagccagtgttgctggctggagaggcagcaacagggaagtcagcctttgtggaggtgctggtagagccacatcacccttacatatacagccccatccaccctgccttcagttcctcccacctccgtctcctgctgagcagaggaatccagggccaaacacaagccagcccacagcctgggcatcaccaggattctaaaccctccctcctcttcttgctggaggacctgcacctagccacttctgacccagagaagagctgccagccagtgttggagactctgcgccaggccatggatggcactgtgtatgcccacagcaccttggaactgcagacgctgcagcctacagtcaacttccttgccactgtcacagtgccaggatactgtgagcgcccactgtgtccacgcctctttcgactcttcacagtcctggccctggaaagcatgacccaggccaccctgctggaaagacatgtgcctatcattcaggcttggcttgagcgtttcccttctgtggaacgggagcgtgctctggcacgaggtctggttagggcctcagtagaggcctgggaggctgtgtgcaattgcttcatgccttcacccctccacccacactaccacttctccctacactctgtgagccacctactgagcagcctgcagctgctgcccaacagaacaggctcccgaggttttgtggactatcccaaccaccaggagcacttgcgccgggtgtcaggcctgcgaggcacttgtctgaccgttatgatggccacacgcaatgtggtgcgtctttggttgcatgaggcacagagaaccttttgcgaccggctggacagccccagggaacgctcctactgtgccaagctgctcctagtagtagctcaaagtgtcttctgctgtgggccagggccccagcacctgggcaaggaccatcaggagagtgaggaggaggaggaggaggagagggtgcccgaagtagaatctgaaggggagttggcccagtgggaggacttcagcaacagcaatagtgaaacagaggaggaagaggaaccttatggccttcaggtcgccagagtctcaaactccagagatccaagtctaacaccatccataggaccagtaagcagggggatgaaggaaagcataagtcacaagataaggcaagagaaaggcacaagggcatccaactataggctccaggtaaggagatcattcaagacttggtggcagaagaaaccccagatggacctgatctcacccttgttgttaccagtgttactactacatccccaggaaaagccctcagacctggtcttcagtcaggagctgatactggggcctaactctgagacccccaacttgtacctggaacgacagtgggagaagctagaggagcagttggccacctcagctgctcaactgaagttgagcccccacctggcccggtgtcattccatggcccagcacgtggcccgcctggtccgggtgctggccaggccccggcagcatggcctgctgctctcgggggctctgggtactgggcgccacactgccatcactctggcttctagcatttgtcaggcccatttctttcatctaccatctgggtcagaggaggccattctccaatgtctacgagatgccagctggcatgctggcatgttaagccagccagtggctctgttggtacccagtggtgtggatctcactacacttcatcgcctcctggccctggcaacctcaggcagtttccctggccagtacacagaagcagatttggaccgcattggagaacacctccccagggagaaccttggtgtcaaacagaacatcaagaaggaaatggtgttgcagaggttccaccagcaagtgtgcagccaccttcacctgttcttcctgattggagataaacaggcccacaagcagctgccctccacccttttcctgaggctccttcaactggccactgccagcattgaccgctatgaaccctgggaccaagctgccctggccaaggtggcccagcatcacctggagggtgctcagagtgtgccccttgatgacggctcctggaagtacccagacctccaggcctcaattcccagtgtggccaaagccatggctcttatccacctttcggccacccactaccatgagcacctgtgccctgcattgccactcgtcacccccaagaccttcctagacttcctggacactttcctgatgctgcagcaacagacaatcctgaagattaagaacaaggcccagcgggtccagaatgccttggagaatctgagaatgctgattaaggagcacggtacccatgccaatctgatctttgacttggaacagcagctgaaagactccggcaagagtctcagcatgtttcagcagcagctagagcaaagcaagctcctatacaagcagcagctggaagagtgtcggcatcaagagaacctcattgagaacctggccaggcaacgggatgccctgcaagctcagcgagaggctttcctggagcagatgagcaaggcatttctggagcctctgagccagctgcaggtggctgactttgaggagatacggagctatcgagcaccaccagaatctgtggtccgggtaactgatgcaatgtgtgacttgttccaccatgaaacaggctgggccagtgccaaacagctgttatgcactgaggatttttatcaggagctggtgttcttccccaaggagaagataacagactcagagctgataaagttacatctaattctgaaggctccaggtatggacgatgcagccctgcgggcagtgagccgacctgcagccagcctggcagcctggctctgggctgttctgcactatgggctggcgcattgccggggactgcccacggacctgctgctgcagcaagtggaggcaacactcactcgggagcaggcccgcctgggctactaccagtttcaggcccaggagaccctggagcataatttggccctggctaagatggtggaggatgcccaagcttcccacaactgcgtggcaaagaccctcagtcaagcacagtgtgggcagtatcacaaatggcccatgaaggctgcactgctcacgcctatgcgtgcctggactacacagctccagaagctgaagggacgctgcatgactgtgtttggagataccctcctatgttcagctgccatcatctacctgggtcccttcccaccattgcggcgccaagagctactggacgagtggttagctctgtgtaggggctttcaggaggctctgggcccagatgatgtggcacaggcactgaagcggaagcaaaaatctgtcagcataccaccaaagaaccccctgctggctacacactctcccttcagtattctgtccttgctgagctctgaatcggagcagtaccagtgggatggaaacctgaagccacaggcaaagtcggcccacctggcaggcttgcttctgcgaagccccacacactacagtagttgccgttggcctctgctgcttgaccccagcaacgaggccctcatctggttggacccgctgcctctggaagagaatcgatcttttgcgccagccctcactgagggtagagggaaaggcctcatgagaaatcaaaagagagagagtaaaacggacatgaaagaggaagatgatgagagtgaagagagtaatgaggctgaggaccagacaaaagagcagaaggcagaggaaagaaaaaatgagcaggagaaagagcaagaggaaaatgaagagaaagaggaggagaagacagagagccaggggtcaaagccagcctatgagactcagcttccatcccttccctaccttagtgttctttcaggtgctgacccagagctgggttctcagctccaggaggcagctgcttgtggcctgcctgtgttactgaccaatgtggagctgggtctagggtgcgaagaactgcaatggctgctgcaacgggagcagctgagtccaccccaggtgcagcctggcttctgtctgtatctcagcaccaccctctccctctgtgccatggaaaaagtgctaggttgtgaactgctaaaggggctgaatgtgttggatctgggcctgaacatggaaatactggaagaacagatgctgcatgaaatcttgtgcagagagtatcctgaactcgagacccgctggcaggacctaaagatcagagccctagatacctgcaaggctgtggaggctgctgaggagcggctgctgacgatgctgctgttccagaatccgaagcgtcagaagccagccaagtttctgcggaacatagtgagggcccaaggaaagctatgccagctgcgtgctcattgtgaagagttagaagggcagaaactacaggagatggtattgtgggcaccctatcgacctgtggtttggcatggaatggccatggtaaaggccctaagccaactgcagaacctgctgccacttttctgtatgagcccagagaactggctggcagtcactaagcaggctctggacagcatgaagccacgtgagattaatcacggggaggacctggccagccatctactgcaattgagagcacacctgacccgccagctgctgggcagcaccgtgactgcactgggccttacccaagtacccttggtgggtgcattgggcgctttggctctgctgcaagcaacagggaaagcatcagagctggaaagactggcactctggcctggactagcagcctctcccagcacagtccacagcaagccagtctcagatgtggctcgaccggcctggcttgggccaaaagcctggcatgaatgtgagatgttagagctgctgcccccatttgttggcctgtgtgcctccctggcaggccactccagtgcttggcaggcttacctgtcactgtcatccacagtgctgggtcctgcacctgggccagggcctgagccactcagcctcctccagaagctgatcctgtggcgcgttctgcgacctgagtgcctggcaggtgccctggcagacttcaccactagcctcctgggtcggcccctggatgaaaacacgtatgctcccaccatgccctttaaacatagtcaggctactcagcccatgctgatcttgttgccaccgcctggccacccctcagccactctgcatcctctgactgtcatccagaaactggctgccaagtatcagcaggggcagaagcaactgcaggtgatagccctgggctctgaagcctgggacccagtctcagttgtggtcagcactctatcccaggctatgtatgaggggcactggctggtgctggacaactgtcatctgatgccccattggccgaaagagctgctacagctcttgctggaactgttaggcagagccaaggtggttgcagacctggaatcagaacagcttttagaccaacctgaaagcaggaatgtaagcactgttcacagagattttcgtctttggcttattgtgcctgcagagtctagtgcttctttgccagctgtgctgactcagcactccatgcctgttttctggaaccagtccctggagctgggccatgttttgattgacagtgtggagctagcccagcaagtactctacatgcaaccccccacccaggcactacctctgctcctcctccatggcctcctgctacaccggcagctctatggaacaaggctgcaggcacacagggggcgctggagtcaagtgactctaacccaggttcttcagacccaagaccagctgtgggcaagtcttagcaatccccgtgctgccatgcaagagctggctgcttcagttttctacgggggtcctctgggggacactgaggacagggaggccctgattagcctcacacaagcctgcctgagccccagtagtgggagctgggtccagccacacacacctcagtctttgctggccacgctcatgcccctcccagagctaagggagctggatgcaatggcagagtgcaaggcccagatgcacctactgccctcaccacctgaaccccggctctgcggactgagtgagggcccccaagcctggctgttgcgacgccagagtcgcgctctcttgagtgcgctgcagcggagttcacccgtgtgggttcctgagtctcgaagaggcgcccagcttgcggaaaggcgactgcggcaacgcctagtgcaagtcaaccggaggctggagtcactgcaggatctgctgacccacgtgattcgccaagacgagtccgacgccccgtggtcagtgctggggccaaatgcacggcggcctctggagggcgtcttagagaccgaggctctagaactgagccagttggtgggcacgctacaacgcgaccttgattgcctgttgcagcagctgaagggcgcacccccgtgcccctcccgccgctgtgctgcggtggcccacgctctctggactggccgcctacccttgccttggcgacctcatgcgccggccggtccgcagccgccctggcactggctgcgacagttgtcgcgccgtgggcaactgttggttcgttacttgggcgtgggcgcggacgcgagcagtgatgtaccagagcgcgtcttccacctgtcagcctttcgccacccgcgccgcctgctgctggcattgcgtggggaagctgccctggaccagaatgtgcccagctcgaatttccctggtagccgaggctcggtctccagtcagctccagtataaacgtctggagatgaacagcaaccctctgcacttcagggtggagaatggtccaaatcccacggttccagagagagggctgctgctgatcgggctacaggtcctacatgcggagtgggacccaatagctggagccttgcaggacagtccttccagccaacccagccctctgcctcccgtcagcatcagcacacaggccccgggcaccagtgacctgccagccccagccgacctgactgtgtactcgtgtcctgtgtacatgggagggccccttggcaccgctaagctgcagagcaggaacatcgtgatgcatctgcctttacccaccaagctcacccccaacacctgtgtccaaaggagggtccatgtgtgcagcccacccctgtcttgagcccgtctaccaaaataaagttgtagtgattccatg

SEQ ID NO: 239431 - DNA, 14262 bp, Artificial Sequence
  derived and/or modified sequence
atggtgcccgaggagagaagagtgggcctgagcagcgacgagaccagcagcgacagcctgaagagctggcacagcatctgcgtgctggacagcaaggagcagcccctggcctgccagcagaagcagagacagttcgtgaagcccgtgaccgagagcgagcagcccaccgtgctggagctgctgctggccgagctgagaaccctgttcagcgccgtgctgcaggacagcagccccgccgcctggagatacctgcacgccgtgctgggcctgctgcccccctacagagagctgctggtgggccacctggacctgctgcccttcctggagcagctgtactgctgggccccctgggtgcagacccacctgcacctggacctgctgggcgccatcgtgcaggccttcccccccgacagcagcctgctggacagcgccagccacgccgactgctgcccccagaagagaagactgcaccacagacccccctgccccgcctgccccttcgtgcaggcccagtggagcagacagcaggtgaaggaggagctggccacctggctgagacccctgaccctgcccgagctgcagagatgcctgggcatcgtgggcgcccaggtggccctggaggaggccgtgtggctggacggcctgagcctgctgcccctggccctggccgccgacatccccgtgagatacgagagcagcgacaccgacaacgccgaggtggagcccgtgggcagaaaggagaccagaagccagctggactacgaggtgcccagagagaaggccttccagaagagcagcaccggcttcagccccgagaccagcttcctggacagccaggtgatgaccgccctgaagatggagagatacctgaagaagatccacttcctgtacctgaacgtggcccccagcagatacttcagaccctacagcctgatggtggtgccccccgacaaggtgaaccccgagcactacatcttcagccccttcggcatcctgcacgtgcaccccgtggagggcagcgagaccatgaccctgggcacctggcaccaccactgcgtgctgtggcagcagctgcagttcatccccttcttcaagtactgcctgctgagaaagagcttcacctgctggaagaagaacgtgagactgcagggcctgcacagactgcagaagttcctggagaaccacctgctgctggccgtgccccacttcggcgccggcctgctgcacatcagcagactgctgcaggagctgcacagcgtgagctggctgccccaggagctggacagatgctacgagctgctggacctgcagaccgccctggccgaggagaagcacaaggccctgagactgctgcacagatgcctgaacctgtgcaccagcatcctgagactggtgcacgaggacacctaccacatgcagcagtgcctgcaggagagagtgcagaactgcgacagaatcagaaccggccagggcagcatctacctgcagagagtgcagcacaagcagctggagcagaagctgaagcaggccgaggcctggtggctgcagctgggcaagttcgccagactggtggactacatgatctgccagagcctgatcagcgtgctggaggagcagatcaccagcttcgtggccaacatcctgcaggcccccagacagaagcccttcctgagcagccagctggtgttcgacgaccacggccagctgagccacgtgccctgcgtggagaacatgatccagaccctgaccggcggcctgcagagcgtgaagaccagcgccctgcaggtggtgcagagcgccgacctgaagaccagcagcgacagcctgtacagcgaggaggaggacgaggaggaggacagcaaggacgagttcctgatgcccaagttccagggccagcccagcgacgccgtgagcatcttctgcggccccaacgtgggcctggtgtggccctggaagagccaccccatcgccggcatcctggaggtgagaggctgcagactgagaggccagtacttcccccacaactacaagcagctggaggaggacctggacaacaaccccaagatccagcaggccctgaacatccagcaggtgctgctggagggcgtgctgtgcaaggtgcaggagttctgcagagagcaccactggatcaccggcatctacgagttcctgcagagctggggcccccagaagctggaggacatgagaggcggccccatcaagaactacgtgaccctggtgagcagactgaacgtgtggcaggccagagtgagcagcatgcccatcgagctgctgaccaagggcggcctgctgctgctgagctgccacgacgtgcaggccgagatggagagcaagctgaacagcatcagaaaggacatcctggcccacgtgcagaacgagtgctggaacctgagccagcagctgatgaccgagctgaccgacttcatgcacatcttcagaaccatcaacagcgacatccacgccatcgcccagtgcacccagaagctgaacgaggccaacgagcagtacgtggagctggaggagagaatggagtacgtgagagccctgcacgagctgatcagaaaccacttcagcctgttcagcgccgagaacgaggccctggacatcagcgtgagaagacagttcggcgagagccccatccccccctgccccccccccccccagccccacctgctgcactgccccctgctggccccccagctgctggacatgtgggaggccttccagttcgagaagagccaggccagcgagttcctgctgagcaagagacacgccatcatgcccaagctgcagcagctgatggccgccgccctggccgagctggagggcctgctggccaaggccctgagcggccccttcatggaccccacccaggaccagagaagcaccgagcaccagctggtgagcctggagagacagttccagaacaccgtgagcgacctgagcgagctgcaccacgcctacgccatcttcaccgaggacgagacccccgtgcccctgcccatctgcggcaccagacccatcgtgcagcagcagagaatctggcacctgtacagagtgatcagcgagaacatcagcgagtggaagtgcatggccttcgccaagttcagccccgccatggcccaggagaagaccgagggctggctgaccgaggccgccagaatgagcaccaccctggagctgcacagccccgtgctgcagcactgcatgagaatcctgggcgagttcagaagctacctgcccctgctgaccaagctgggcagcctgcacccccagagcctgaactgccagtgcctgctgagagccctgggcctgggcagcctgcagaccatcgagctgctgaccctgggccagctgctgacctaccccctgctggagttcgccgacagaatcaaccaggtgtggcagaacgagaacgagagaatccacgcccaggagaccatcagaagactgcagagatactgggaggccagacagctgagactgctgaacttcatcctgcacgtgccctacgagccccccgccagcgagagaagcaagagacaggtgctgagaagcccccagtgggaggtggtggacaaggacagcggcaccttcatcctgagcgactacagcaacctgcaggacagcatccaggagagcctgcaggtgctgagcaagatcctggccatcgagaagagcggcgacctgaacaagatcgccctggagtgggtggccatcatgcacggcctgggcgccctgctggaggtgtggctgaccttccagcagaagtggatcttcctgaacaaggtgctgcacgagatgaagatccagttccccaacgccgacctgaacagcagattcaaggtgatggacgaccagtacagaaccctgatgagaatcagcgtggccgaccccatggtgctgagcctggtggtgcccagcgccgagagaagcccctacttccagggccagcagctgcagcagctgctgcaggccggcagcgtggagctggagggcatcatcatgagcctggagagcgtgctgtacggcgtgtgcgcccacttccccagactgttcttcctgagcgacagcgagctggtggccctgctggccgccagactggagagctgcgaggcccagctgtgggtgagaagatgcttcccccacgtgcacgccgtgagcttcagaagctgccccaccggcgagaagaacaccgacgactgggagagcagccccaacacccagacccaggtggaggccctggccgtgctgggcgccggcggcgaggaggtgaagctgcagggccccctgcccctgcaccccgacctgcccaagtggctggccagcctggagaagtgcctgagactggccctggtgcacatgctgcagggctgcgtggccgccagactggccagaggccccagcctgggcgaggccctgaagcagctgcccaagcagaacaagctgtacctgcagctgtacgtgcagcactggatcgacctggtgcaggccttcccctggcagtgcgtgctggtggccgaggaggtggtgtggagagccgagatggaggaggccctgctggagtggggcaccctggccatggtgagcatgcacatgagaaagctggaggtgctggtgaacttcatgagagcccagagagccagccagggcggccagagcctgcccagcgtgagacagaccagcctgctgagcgccctgctggtgatggccgtgacccacagagacatcgcccagctgctggagcagcaccaggtgagcgacctgaccgacttccactgggtgagacagctgaagtaccacctgggcagcccccacatcatccccaagagccccctgcagagcctgaagaccatcgccagcagcgagcccagcctgagccccgccgcctgctggatcgacgtgctgggcagaagcttcctgtacaactacgagtacctgggccccagactgggccccctgcccagcctgctgcccgagagacccgccctggtgctgctgctggccctggaggaggtggcctgcggcaccgtgctgggccccaacggcgtgggcaagagagccatcgtgaacagcctggcccaggccctgggcagacagctggtgatgctgccctgcagcccccagatcgaggcccagtgcctgagcaactacctgaacggcgccctgcagggcggcgcctggctgctgctggagaaggtgcaccagctgccccccggcctgctgagcgccctgggccagagactgggcgagctgcaccacctgtacgcccccctgtaccaggaggccagcagaaacaccagcaccatcgaccccacccagccccagctgctgggcagcagcttcttcgagaagcaccacgtgagcgtgagactgggctacggctgcctgctggtgctgagagccctgagcagcgccgtgcccgccaacctgcacctgctgctgagacccgtggccctggccctgcccgacctgagacaggtggccgagctgaccctgctgggcgccggcatgagagacgccttccagatggccaccagactgagcaagttcttcagcctggagagagagctggtgagcggccccctgccctgcagactgcccctgctgaagcagatcctggaggacaccatcagaaccctgaacgtgaccaaggaggagcccaagtgccagaagcccagaagcctggccgccatcgaggaggccgccctgctgagaagccccctgttcagcatcctgaacggcctgcacctgcacaacctgagaggcctgctgtgcgccctgttccccagcgccagccaggtgctggccgagcccatgacctacaagctgatgaagcccctggtggtggaggagctgcagcaggtgggcctggaccccagccccgacatcctgggcagcctggagcagctgagccaggccctgagcagagccagcggcatcctgctgctgggccccgccggcagcggcaagaccacctgctggcacagcctgttcaagatccagaacagactggccgccatggaggacaccagcacccagggctgccagcccgtggagatcacccacctgtaccccagcggcctgagcccccaggagttcctgggctggctggagggcagctgctggcaccacggcatcttccccaaggtgctgagagccgccggccagtgcaacaacatgggccagaagagacagaccgaggagagcatcggcatccagcactggatcatctgcgacggcgccagcaacggcgcctggctggacagcatcacctgcctgctgagcgagctgccccagctgagcctgcccagcggccagcagatcgccagaccccccggcaccttcctgctgatggaggtggccgacaccaccggcatcagccccaccgtggtgggctgctgcgccctggtgtggtgcggcggcgagcagacctggcagtgcatcctgagcgccctgatggccagcctgccctacgagtacagactgcagcacagaaccgtggccgagctgaaccacatggccgaggtgctggtgcccgccaccctgagattcctgacctgccagggcgtgagcagcctgctgcaggtgcacggccagcaggccgtgtgcgccggcgtggccgaggtgaccagcatggccagaatcctgcacagcctgctggacctgcacctgagactgaaggaggagaaggcccccggccccgaggacctgagctacagcgaccccgtggcccagagcttcagaagcagcaagagcagcttcctgaacagaagccaggtggacagcgacgacgtgcccgacaagtgcagagagcacctgctggccgtgagcagcttcctgttcgccctgatctggggcttcggcgcccacctgcccagcagattctggcccatcttcgacaccttcatcagagacagcatcagcagactgagcaactaccccgagcccccccccagcgccctggtgttcgacctgcacgtgagccccgaggacggcaccctggtgcccttcaccggccagtacctgagcagccacatcaagggcaccctgggcaccttccaccccagcatccagaccgagagactgctgtacgtggtggacctgctgctgagcggcggccagcccgtgctgctggccggcgaggccgccaccggcaagagcgccttcgtggaggtgctggtggagccccaccacccctacatctacagccccatccaccccgccttcagcagcagccacctgagactgctgctgagcagaggcatccagggccagacccaggccagcccccagcccggccaccaccaggacagcaagcccagcctgctgttcctgctggaggacctgcacctggccaccagcgaccccgagaagagctgccagcccgtgctggagaccctgagacaggccatggacggcaccgtgtacgcccacagcaccctggagctgcagaccctgcagcccaccgtgaacttcctggccaccgtgaccgtgcccggctactgcgagagacccctgtgccccagactgttcagactgttcaccgtgctggccctggagagcatgacccaggccaccctgctggagagacacgtgcccatcatccaggcctggctggagagattccccagcgtggagagagagagagccctggccagaggcctggtgagagccagcgtggaggcctgggaggccgtgtgcaactgcttcatgcccagccccctgcacccccactaccacttcagcctgcacagcgtgagccacctgctgagcagcctgcagctgctgcccaacagaaccggcagcagaggcttcgtggactaccccaaccaccaggagcacctgagaagagtgagcggcctgagaggcacctgcctgaccgtgatgatggccaccagaaacgtggtgagactgtggctgcacgaggcccagagaaccttctgcgacagactggacagccccagagagagaagctactgcgccaagctgctgctggtggtggcccagagcgtgttctgctgcggccccggcccccagcacctgggcaaggaccaccaggagagcgaggaggaggaggaggaggagagagtgcccgaggtggagagcgagggcgagctggcccagtgggaggacttcagcaacagcaacagcgagaccgaggaggaggaggagccctacggcctgcaggtggccagagtgagcaacagcagagaccccagcctgacccccagcatcggccccgtgagcagaggcatgaaggagagcatcagccacaagatcagacaggagaagggcaccagagccagcaactacagactgcaggtgagaagaagcttcaagacctggtggcagaagaagccccagatggacctgatcagccccctgctgctgcccgtgctgctgctgcacccccaggagaagcccagcgacctggtgttcagccaggagctgatcctgggccccaacagcgagacccccaacctgtacctggagagacagtgggagaagctggaggagcagctggccaccagcgccgcccagctgaagctgagcccccacctggccagatgccacagcatggcccagcacgtggccagactggtgagagtgctggccagacccagacagcacggcctgctgctgagcggcgccctgggcaccggcagacacaccgccatcaccctggccagcagcatctgccaggcccacttcttccacctgcccagcggcagcgaggaggccatcctgcagtgcctgagagacgccagctggcacgccggcatgctgagccagcccgtggccctgctggtgcccagcggcgtggacctgaccaccctgcacagactgctggccctggccaccagcggcagcttccccggccagtacaccgaggccgacctggacagaatcggcgagcacctgcccagagagaacctgggcgtgaagcagaacatcaagaaggagatggtgctgcagagattccaccagcaggtgtgcagccacctgcacctgttcttcctgatcggcgacaagcaggcccacaagcagctgcccagcaccctgttcctgagactgctgcagctggccaccgccagcatcgacagatacgagccctgggaccaggccgccctggccaaggtggcccagcaccacctggagggcgcccagagcgtgcccctggacgacggcagctggaagtaccccgacctgcaggccagcatccccagcgtggccaaggccatggccctgatccacctgagcgccacccactaccacgagcacctgtgccccgccctgcccctggtgacccccaagaccttcctggacttcctggacaccttcctgatgctgcagcagcagaccatcctgaagatcaagaacaaggcccagagagtgcagaacgccctggagaacctgagaatgctgatcaaggagcacggcacccacgccaacctgatcttcgacctggagcagcagctgaaggacagcggcaagagcctgagcatgttccagcagcagctggagcagagcaagctgctgtacaagcagcagctggaggagtgcagacaccaggagaacctgatcgagaacctggccagacagagagacgccctgcaggcccagagagaggccttcctggagcagatgagcaaggccttcctggagcccctgagccagctgcaggtggccgacttcgaggagatcagaagctacagagccccccccgagagcgtggtgagagtgaccgacgccatgtgcgacctgttccaccacgagaccggctgggccagcgccaagcagctgctgtgcaccgaggacttctaccaggagctggtgttcttccccaaggagaagatcaccgacagcgagctgatcaagctgcacctgatcctgaaggcccccggcatggacgacgccgccctgagagccgtgagcagacccgccgccagcctggccgcctggctgtgggccgtgctgcactacggcctggcccactgcagaggcctgcccaccgacctgctgctgcagcaggtggaggccaccctgaccagagagcaggccagactgggctactaccagttccaggcccaggagaccctggagcacaacctggccctggccaagatggtggaggacgcccaggccagccacaactgcgtggccaagaccctgagccaggcccagtgcggccagtaccacaagtggcccatgaaggccgccctgctgacccccatgagagcctggaccacccagctgcagaagctgaagggcagatgcatgaccgtgttcggcgacaccctgctgtgcagcgccgccatcatctacctgggccccttcccccccctgagaagacaggagctgctggacgagtggctggccctgtgcagaggcttccaggaggccctgggccccgacgacgtggcccaggccctgaagagaaagcagaagagcgtgagcatcccccccaagaaccccctgctggccacccacagccccttcagcatcctgagcctgctgagcagcgagagcgagcagtaccagtgggacggcaacctgaagccccaggccaagagcgcccacctggccggcctgctgctgagaagccccacccactacagcagctgcagatggcccctgctgctggaccccagcaacgaggccctgatctggctggaccccctgcccctggaggagaacagaagcttcgcccccgccctgaccgagggcagaggcaagggcctgatgagaaaccagaagagagagagcaagaccgacatgaaggaggaggacgacgagagcgaggagagcaacgaggccgaggaccagaccaaggagcagaaggccgaggagagaaagaacgagcaggagaaggagcaggaggagaacgaggagaaggaggaggagaagaccgagagccagggcagcaagcccgcctacgagacccagctgcccagcctgccctacctgagcgtgctgagcggcgccgaccccgagctgggcagccagctgcaggaggccgccgcctgcggcctgcccgtgctgctgaccaacgtggagctgggcctgggctgcgaggagctgcagtggctgctgcagagagagcagctgagccccccccaggtgcagcccggcttctgcctgtacctgagcaccaccctgagcctgtgcgccatggagaaggtgctgggctgcgagctgctgaagggcctgaacgtgctggacctgggcctgaacatggagatcctggaggagcagatgctgcacgagatcctgtgcagagagtaccccgagctggagaccagatggcaggacctgaagatcagagccctggacacctgcaaggccgtggaggccgccgaggagagactgctgaccatgctgctgttccagaaccccaagagacagaagcccgccaagttcctgagaaacatcgtgagagcccagggcaagctgtgccagctgagagcccactgcgaggagctggagggccagaagctgcaggagatggtgctgtgggccccctacagacccgtggtgtggcacggcatggccatggtgaaggccctgagccagctgcagaacctgctgcccctgttctgcatgagccccgagaactggctggccgtgaccaagcaggccctggacagcatgaagcccagagagatcaaccacggcgaggacctggccagccacctgctgcagctgagagcccacctgaccagacagctgctgggcagcaccgtgaccgccctgggcctgacccaggtgcccctggtgggcgccctgggcgccctggccctgctgcaggccaccggcaaggccagcgagctggagagactggccctgtggcccggcctggccgccagccccagcaccgtgcacagcaagcccgtgagcgacgtggccagacccgcctggctgggccccaaggcctggcacgagtgcgagatgctggagctgctgccccccttcgtgggcctgtgcgccagcctggccggccacagcagcgcctggcaggcctacctgagcctgagcagcaccgtgctgggccccgcccccggccccggccccgagcccctgagcctgctgcagaagctgatcctgtggagagtgctgagacccgagtgcctggccggcgccctggccgacttcaccaccagcctgctgggcagacccctggacgagaacacctacgcccccaccatgcccttcaagcacagccaggccacccagcccatgctgatcctgctgcccccccccggccaccccagcgccaccctgcaccccctgaccgtgatccagaagctggccgccaagtaccagcagggccagaagcagctgcaggtgatcgccctgggcagcgaggcctgggaccccgtgagcgtggtggtgagcaccctgagccaggccatgtacgagggccactggctggtgctggacaactgccacctgatgccccactggcccaaggagctgctgcagctgctgctggagctgctgggcagagccaaggtggtggccgacctggagagcgagcagctgctggaccagcccgagagcagaaacgtgagcaccgtgcacagagacttcagactgtggctgatcgtgcccgccgagagcagcgccagcctgcccgccgtgctgacccagcacagcatgcccgtgttctggaaccagagcctggagctgggccacgtgctgatcgacagcgtggagctggcccagcaggtgctgtacatgcagccccccacccaggccctgcccctgctgctgctgcacggcctgctgctgcacagacagctgtacggcaccagactgcaggcccacagaggcagatggagccaggtgaccctgacccaggtgctgcagacccaggaccagctgtgggccagcctgagcaaccccagagccgccatgcaggagctggccgccagcgtgttctacggcggccccctgggcgacaccgaggacagagaggccctgatcagcctgacccaggcctgcctgagccccagcagcggcagctgggtgcagccccacaccccccagagcctgctggccaccctgatgcccctgcccgagctgagagagctggacgccatggccgagtgcaaggcccagatgcacctgctgcccagcccccccgagcccagactgtgcggcctgagcgagggcccccaggcctggctgctgagaagacagagcagagccctgctgagcgccctgcagagaagcagccccgtgtgggtgcccgagagcagaagaggcgcccagctggccgagagaagactgagacagagactggtgcaggtgaacagaagactggagagcctgcaggacctgctgacccacgtgatcagacaggacgagagcgacgccccctggagcgtgctgggccccaacgccagaagacccctggagggcgtgctggagaccgaggccctggagctgagccagctggtgggcaccctgcagagagacctggactgcctgctgcagcagctgaagggcgcccccccctgccccagcagaagatgcgccgccgtggcccacgccctgtggaccggcagactgcccctgccctggagaccccacgcccccgccggcccccagcccccctggcactggctgagacagctgagcagaagaggccagctgctggtgagatacctgggcgtgggcgccgacgccagcagcgacgtgcccgagagagtgttccacctgagcgccttcagacaccccagaagactgctgctggccctgagaggcgaggccgccctggaccagaacgtgcccagcagcaacttccccggcagcagaggcagcgtgagcagccagctgcagtacaagagactggagatgaacagcaaccccctgcacttcagagtggagaacggccccaaccccaccgtgcccgagagaggcctgctgctgatcggcctgcaggtgctgcacgccgagtgggaccccatcgccggcgccctgcaggacagccccagcagccagcccagccccctgccccccgtgagcatcagcacccaggcccccggcaccagcgacctgcccgcccccgccgacctgaccgtgtacagctgccccgtgtacatgggcggccccctgggcaccgccaagctgcagagcagaaacatcgtgatgcacctgcccctgcccaccaagctgacccccaacacctgcgtgcagagaagagtgcacgtgtgcagcccccccctgagctag

SEQ ID NO: 239432 - protein, 1149 aa, Artificial Sequence
  derived and/or modified sequence
MSDAAEAPREATGENGETEMKEEEEPNPNYKEVEDPQQESKDDTIAWRESQEEERKTGEEEGEEEGKEDKKIVMEETEEKAGEVQEKEASGIQEETTVEPQEVTASMIRLETQITDSQSITSGIFPKTQRGSKSKLSLQLEDAETDELLRDLSTQIEFLDLDQISPEEQQISSPERQPSGELEEKTDRMPQDELGQERRDLEPENREEGQERRVSDIQSKAGISRESLVSSTTEDILFQKDKSTPVYPLTMTWSFGWNSSLPVYYIREERQRVLLYVCAHTAIIYNVFRNNQYHLQGHANIISCLCVSEDRRWIATADKGPDCLVIIWDSFTGIPVHTIFDSCPEGNGIMAMAMTHDAKYLATISDAEVQKVCIWKWTLAVETPACTLELPTEYGVQNYVTFNPTNNKELVSNSKTRAIYYAWYEERDTLAHSAPLLTEKTFNKLVGKFSQSIFHLNLTQILSATMEGKLVVWDIHRPPSSASTFLGFPYIKPCKLVHLQKEGITVLTTIDSYIVTGDIKGNIKFYDHTLSIVNWYSHLKLGAIRTLSFSKTPATPPTEKSNYPPDCTLKGDLFVLRNFIIGTSDAAVYHLTTDGTKLEKLFVEPKDAICAISCHPYQPLIAIGSICGMIKVWNYENKQYLFSRVFEKGLGVQSLTYNPEGALLGAGFTEGTVYILDAMSLENESPEPFKYSRTSVTHISFSHDSQYMATADRSFTVAVYMLVVRNGQRVWEYLARLRSHRKSIRSLLFGVYLDSNEPRLLSLGTDRLLIEYDLLRSYKDHLEVLDIHHTDQGCYPTCMVWYPPLTRELFLLICNSGYKVKLFNATTKMCRKTLLGPAYGSPIEQTQVLPVRSMAELQKRYLVFINRDKVGLQILPVDGNPHKTSAIVCHPNGVAGMAVSYDGCYAFTAGGHDRSVVQWKITLSVLEAAVSLGGEDLTPFYGLLSGGREGKFYRELEDYFYYSQLRSQGIDTMETRKVSEHICLSELPFVMRAIGFYPSEEKIDDIFNEIKFGEYVDTGKLIDKINLPDFLKVYLNHKPPFGNTMSGIHKSFEVLGYTNSKGKKAIRREDFLRLLVTKGEHMTEEEMLDCFASLFGLNPEGWKSEPATCSVKGSEICLEEELPDEITAEIFATEILGLTISEDSGQDGQ

SEQ ID NO: 239433 - DNA, 3450 bp, Artificial Sequence
  derived and/or modified sequence
atgagcgacgccgccgaggcccccagagaggccaccggcgagaacggcgagaccgagatgaaggaggaggaggagcccaaccccaactacaaggaggtggaggacccccagcaggagagcaaggacgacaccatcgcctggagagagagccaggaggaggagagaaagaccggcgaggaggagggcgaggaggagggcaaggaggacaagaagatcgtgatggaggagaccgaggagaaggccggcgaggtgcaggagaaggaggccagcggcatccaggaggagaccaccgtggagccccaggaggtgaccgccagcatgatcagactggagacccagatcaccgacagccagagcatcaccagcggcatcttccccaagacccagagaggcagcaagagcaagctgagcctgcagctggaggacgccgagaccgacgagctgctgagagacctgagcacccagatcgagttcctggacctggaccagatcagccccgaggagcagcagatcagcagccccgagagacagcccagcggcgagctggaggagaagaccgacagaatgccccaggacgagctgggccaggagagaagagacctggagcccgagaacagagaggagggccaggagagaagagtgagcgacatccagagcaaggccggcatcagcagagagagcctggtgagcagcaccaccgaggacatcctgttccagaaggacaagagcacccccgtgtaccccctgaccatgacctggagcttcggctggaacagcagcctgcccgtgtactacatcagagaggagagacagagagtgctgctgtacgtgtgcgcccacaccgccatcatctacaacgtgttcagaaacaaccagtaccacctgcagggccacgccaacatcatcagctgcctgtgcgtgagcgaggacagaagatggatcgccaccgccgacaagggccccgactgcctggtgatcatctgggacagcttcaccggcatccccgtgcacaccatcttcgacagctgccccgagggcaacggcatcatggccatggccatgacccacgacgccaagtacctggccaccatcagcgacgccgaggtgcagaaggtgtgcatctggaagtggaccctggccgtggagacccccgcctgcaccctggagctgcccaccgagtacggcgtgcagaactacgtgaccttcaaccccaccaacaacaaggagctggtgagcaacagcaagaccagagccatctactacgcctggtacgaggagagagacaccctggcccacagcgcccccctgctgaccgagaagaccttcaacaagctggtgggcaagttcagccagagcatcttccacctgaacctgacccagatcctgagcgccaccatggagggcaagctggtggtgtgggacatccacagaccccccagcagcgccagcaccttcctgggcttcccctacatcaagccctgcaagctggtgcacctgcagaaggagggcatcaccgtgctgaccaccatcgacagctacatcgtgaccggcgacatcaagggcaacatcaagttctacgaccacaccctgagcatcgtgaactggtacagccacctgaagctgggcgccatcagaaccctgagcttcagcaagacccccgccaccccccccaccgagaagagcaactacccccccgactgcaccctgaagggcgacctgttcgtgctgagaaacttcatcatcggcaccagcgacgccgccgtgtaccacctgaccaccgacggcaccaagctggagaagctgttcgtggagcccaaggacgccatctgcgccatcagctgccacccctaccagcccctgatcgccatcggcagcatctgcggcatgatcaaggtgtggaactacgagaacaagcagtacctgttcagcagagtgttcgagaagggcctgggcgtgcagagcctgacctacaaccccgagggcgccctgctgggcgccggcttcaccgagggcaccgtgtacatcctggacgccatgagcctggagaacgagagccccgagcccttcaagtacagcagaaccagcgtgacccacatcagcttcagccacgacagccagtacatggccaccgccgacagaagcttcaccgtggccgtgtacatgctggtggtgagaaacggccagagagtgtgggagtacctggccagactgagaagccacagaaagagcatcagaagcctgctgttcggcgtgtacctggacagcaacgagcccagactgctgagcctgggcaccgacagactgctgatcgagtacgacctgctgagaagctacaaggaccacctggaggtgctggacatccaccacaccgaccagggctgctaccccacctgcatggtgtggtacccccccctgaccagagagctgttcctgctgatctgcaacagcggctacaaggtgaagctgttcaacgccaccaccaagatgtgcagaaagaccctgctgggccccgcctacggcagccccatcgagcagacccaggtgctgcccgtgagaagcatggccgagctgcagaagagatacctggtgttcatcaacagagacaaggtgggcctgcagatcctgcccgtggacggcaacccccacaagaccagcgccatcgtgtgccaccccaacggcgtggccggcatggccgtgagctacgacggctgctacgccttcaccgccggcggccacgacagaagcgtggtgcagtggaagatcaccctgagcgtgctggaggccgccgtgagcctgggcggcgaggacctgacccccttctacggcctgctgagcggcggcagagagggcaagttctacagagagctggaggactacttctactacagccagctgagaagccagggcatcgacaccatggagaccagaaaggtgagcgagcacatctgcctgagcgagctgcccttcgtgatgagagccatcggcttctaccccagcgaggagaagatcgacgacatcttcaacgagatcaagttcggcgagtacgtggacaccggcaagctgatcgacaagatcaacctgcccgacttcctgaaggtgtacctgaaccacaagccccccttcggcaacaccatgagcggcatccacaagagcttcgaggtgctgggctacaccaacagcaagggcaagaaggccatcagaagagaggacttcctgagactgctggtgaccaagggcgagcacatgaccgaggaggagatgctggactgcttcgccagcctgttcggcctgaaccccgagggctggaagagcgagcccgccacctgcagcgtgaagggcagcgagatctgcctggaggaggagctgcccgacgagatcaccgccgagatcttcgccaccgagatcctgggcctgaccatcagcgaggacagcggccaggacggccagtag

SEQ ID NO: 239434 - DNA, 3450 bp, Artificial Sequence
  derived and/or modified sequence
atgtcggatgcagcagaggctcctcgagaggcaaccggcgaaaacggtgaaaccgagatgaaggaggaagaggagccaaacccaaattacaaagaggttgaggatcctcagcaggagagcaaggatgacaccattgcctggagggagagccaggaagaagagcggaagactggggaagaagagggagaggaagagggcaaggaggataagaagatagtgatggaggagaccgaagagaaggccggagaggtacaggagaaggaggcttcaggcatccaggaggagaccaccgtggaacctcaggaggtcaccgcgagtatgataagattagaaactcagattacggactcccagtctatcacatcgggcatttttccaaaaactcagcggggatcgaaatcaaagttgtccctccagttagaggacgccgaaaccgatgaattgctgagggacctgtcaacacaaatcgagttcctcgaccttgaccagattagtcccgaagagcagcaaatcagctcccccgagagacagccgtcgggagagctggaagaaaagactgaccgtatgcctcaggacgagctgggccaggaaagacgtgacctagaacccgagaacagggaagagggccaggagcggagggtgtcagacatccagagcaaagccggaatttccagggagagtctggtgagcagtaccaccgaagatatcctgttccagaaggacaagagcacaccggtctatccacttacaatgacttggagcttcgggtggaattctagcctcccagtatattatattcgggaagaacgacaacgcgtattactgtatgtctgtgcacacacagccattatttacaacgtctttcgcaataaccagtatcacctccagggacatgccaacatcatcagttgcctctgcgtgtccgaagaccgacgttggattgcgaccgccgataagggcccagactgtcttgtgataatctgggacagctttaccggcattcccgtgcatactattttcgactcgtgcccggaagggaatggcatcatggcaatggctatgacccatgatgcaaaatatctcgccacaatatccgacgctgaagtccagaaagtgtgcatttggaaatggacccttgcagtggagactcccgcttgtactctcgaactgccaacggagtatggggtccagaactacgtgaccttcaaccccactaacaataaagaactggtgtccaactctaaaacccgggccatttactacgcatggtacgaagagagagacaccctggctcattctgcccccttgctgaccgaaaaaaccttcaacaagctggtggggaagttctcccagtcaattttccacctcaacttgacgcagattctatccgcaactatggaggggaagttggtggtgtgggatattcataggccaccatcgtctgcatccaccttcctcgggtttccctacatcaagccgtgtaaactggtccacctgcagaaggagggtattaccgtgctgactaccatcgattcctacatagtgaccggtgatattaaagggaacataaaattctatgaccacactctgtccatcgtcaattggtattcacacttaaaattgggcgcaatcagaacactgtctttctctaagacccctgccacacctcccacagaaaaatcgaactatccacccgactgtactctcaaaggggacctttttgtcctgcggaactttataataggtacatcagatgctgcggtctatcatctaacgactgatggcaccaagctcgagaaactgttcgtagagccaaaagatgcaatttgcgctatcagctgccacccgtaccagcctttgatcgcaatcggctctatctgcggaatgataaaggtctggaactatgagaataaacaatatctcttctctcgcgtgttcgagaaaggcctgggagtccagtctctgacctacaaccctgagggggctctgctgggtgcagggttcaccgagggtacagtttatatcctggatgccatgtcactagagaacgagagtcctgaacctttcaaatacagccgaacatccgtgacccatatcagtttctcccacgactcgcaatatatggcaacagctgaccgcagctttacggtcgctgtctatatgctagtggtcagaaacggacagcgggtctgggagtatttagcccgactgaggtcccatagaaagagtatccgttcattgctcttcggcgtgtatctggatagtaacgagcccaggttgctgagcctcggaacagatagactgctgatcgaatatgacctacttagatcttacaaggaccaccttgaggtcctagatattcatcacactgatcagggctgctacccaacatgtatggtgtggtacccccctctgacacgagagctattcttgctgatctgtaactccgggtataaagtaaaactctttaatgcaactactaagatgtgccgaaagactctgctggggccagcttatgggagtcccatcgagcagacacaagtgctgcctgtccggagcatggctgagcttcaaaaacgttacctggttttcattaaccgagacaaggtgggtttgcaaatactgcccgtagacggcaatccccataaaacatccgcgattgtttgtcatcccaacggggtggcgggcatggcggtctcatacgatggttgctacgcattcacggccggaggtcacgaccgtagtgtggtacaatggaaaatcacactgtccgtgctggaagccgctgtgtcgctgggcggggaggacctgacaccattttatggcttgttgtctggcggcagggaaggcaaattctaccgggaactcgaagactatttctactattctcagttaagatcccaggggattgataccatggagactcgcaaggtctcagagcacatctgtctgtccgaacttcccttcgtgatgcgggccattggattttatccttccgaggaaaagatcgacgatatttttaatgagatcaagttcggtgagtatgttgataccggaaaactgattgacaagataaacctaccagatttcctgaaagtttatttgaatcataaacccccttttggtaatacaatgtcgggaatccacaagtcttttgaagtcctcggctacacaaacagcaaaggcaaaaaggcaatccgaagggaggatttcctgaggctgcttgtaaccaagggggagcatatgacagaagaggagatgctggactgtttcgccagtctgttcggactgaacccggagggctggaaatccgaaccagccacctgttccgtcaagggctcagaaatttgtctcgaggaagaactccccgacgagattaccgcggaaatatttgcaacagaaattctgggactaaccatctccgaggactcggggcaggatggacagtag

SEQ ID NO: 239435 - DNA, 3450 bp, Artificial Sequence
  derived and/or modified sequence
atgtctgatgctgctgaggccccccgggaggccaccggggagaatggagaaacagagatgaaggaggaggaggagcccaaccccaactacaaggaggtggaggacccccagcaggagagcaaggatgacaccatcgcctggagggagagccaggaggaggagaggaagacaggagaggaggagggggaggaggagggcaaggaggacaagaagatcgtgatggaggagacagaggagaaggccggggaggtgcaggagaaggaggccagcggcatccaggaggagaccaccgtggagccccaggaggtgacagcctccatgatccggctggagacccagatcacagacagccagagcatcaccagcggcatcttccccaagacccagaggggcagcaagagcaagctgagcctgcagctggaggatgctgagacagatgagctgctgcgggacctgagcacccagatcgagttcctggacctggaccagatcagccctgaggagcagcagatcagcagccctgagcggcagcccagcggggagctggaggagaagacagacaggatgccccaggatgagctgggccaggagcggcgggacctggagcctgagaaccgggaggagggccaggagcggcgggtgtctgacatccagagcaaggccggcatcagccgggagagcctggtgagcagcaccacagaggacatcctcttccagaaggacaagagcacccctgtgtaccccctgaccatgacctggagctttggctggaacagcagcctgcctgtgtactacatccgggaggagcggcagagggtgctgctgtatgtgtgtgcccacacagccatcatctacaacgtgttcaggaacaaccagtaccacctgcagggccacgccaacatcatcagctgcctgtgtgtgtctgaagatcggcgctggatcgccacagctgacaagggccctgactgcctggtgatcatctgggacagcttcaccggcatccctgtgcacaccatctttgacagctgcccagagggcaatggcatcatggccatggccatgacccatgatgccaagtacctggccaccatcagtgatgctgaggtgcagaaggtgtgcatctggaagtggaccctggccgtggagaccccagcctgcaccctggagctgcccacagaatatggagtgcagaactacgtgaccttcaaccccaccaacaacaaggagctggtgagcaacagcaagacccgggccatctactatgcctggtatgaggagcgggacaccctggcccacagcgcccccctgctgacagagaagaccttcaacaagctggtgggcaagttcagccagagcatcttccacctgaacctgacccagatcctgagcgccaccatggagggcaagctggtggtgtgggacatccaccggccccccagcagcgccagcaccttcctgggcttcccctacatcaagccctgcaagctggtgcacctgcagaaggagggcatcaccgtgctgaccaccatcgacagctacatcgtgactggagacatcaagggcaacatcaagttctatgaccacaccctgagcatcgtgaactggtacagccacctgaagctgggcgccatccgcaccctgtccttcagcaagaccccagccaccccacccacagagaagagcaactaccccccagactgcaccctgaagggggacctgtttgtgctgaggaacttcatcatcggcaccagtgatgctgctgtgtaccacctgaccacagatggcaccaagctggagaagctgtttgtggagcccaaggatgccatctgtgccatcagctgccacccctaccagcccctgattgccatcggcagcatctgtggcatgatcaaggtgtggaactatgagaacaagcagtacctgttcagccgggtgtttgagaagggcctgggcgtgcagagcctgacctacaaccctgagggcgccctgctgggcgccggcttcacagagggcaccgtgtacatcctggatgccatgagcctggagaatgaaagccctgagcccttcaagtacagcaggacctctgtgacccacatctccttcagccatgacagccagtacatggccacagctgacaggagcttcaccgtggccgtgtacatgctggtggtgagaaatggccagagggtgtgggagtacctggcccggctgcggagccacaggaagagcatccgcagcctgctgtttggagtgtacctggacagcaatgagccccggctgctgagcctgggcacagaccggctgctgattgaatatgacctgctgcggagctacaaggaccacctggaggtgctggacatccaccacacagaccagggctgctaccccacctgcatggtgtggtacccacccctgacccgggagctgttcctgctgatctgcaacagcggctacaaggtgaagctgttcaatgccaccaccaagatgtgcaggaagaccctgctgggccctgcctacggcagccccatcgagcagacccaggtgctgcctgtgcgctccatggccgagctgcagaagcgctacctggtgttcatcaacagagacaaggtgggcctgcagatcctgcctgtggatggcaacccccacaagaccagcgccatcgtgtgccaccccaacggggtggccggcatggctgtgtcctatgatggctgctacgccttcaccgctgggggccatgacagatctgtggtgcagtggaagatcaccctgtctgtgctggaggccgctgtgtccctgggcggggaggacctgacccccttctacggcctgctgagcggcggccgggagggcaagttctaccgggagctggaggactacttctactacagccagctgcggagccagggcatcgacaccatggagaccaggaaggtgtctgagcacatctgcctgtctgagctgccctttgtgatgagggccatcggcttctaccccagcgaggagaagattgatgacatcttcaatgagatcaagtttggagaatatgtggacaccgggaagctgattgacaagatcaacctgcctgacttcctgaaggtgtacctgaaccacaagcccccatttggaaacaccatgagcggcatccacaagagctttgaggtgctgggctacaccaacagcaagggcaagaaggccatcagaagagaggacttcctgcggctgctggtgaccaagggggagcacatgacagaggaggagatgctggactgctttgccagcctgtttggcctgaaccctgagggctggaagtctgagcccgccacctgcagcgtgaagggcagcgagatctgcctggaggaggagctgcctgatgagatcacagctgagatctttgccacagagatcctgggcctgaccatcagcgaggacagcggccaggacggccagtag

SEQ ID NO: 239436 - DNA, 3450 bp, Artificial Sequence
  derived and/or modified sequence
atgagcgacgccgccgaggccccccgggaggccaccggcgagaacggcgagacagaaatgaaggaggaggaagagcctaatccgaattacaaagaagtggaggatccccagcaggaaagcaaggatgacacaatcgcatggcgggaatctcaggaggaggagagaaaaaccggcgaggaggagggagaggaagaggggaaggaggacaagaagatcgtgatggaggagacagaggagaaagcaggggaggtgcaggagaaagaagcatcagggatccaggaggaaacaacagtggagccccaggaagttacggcatcaatgattaggttggagactcagattaccgacagccaatccattaccagcggaatcttcccgaagacccagcgagggagtaagagcaaactttccctgcagctcgaagatgccgagaccgatgagctgctgcgtgatctctccactcaaatcgaattcctggatctggatcagatttcacccgaggagcagcagatatcgagcccagaacgacagccaagcggagagttagaggagaagaccgaccggatgccccaggatgagctaggccaggagcgccgggatctggagccagaaaatcgggaggaaggtcaagagagaagagtgtcagatatccagtctaaagcagggatcagcagagaatccctggtgagtagcacgacagaagacattctgttccagaaggataagagcactcctgtctaccccctcacaatgacctggagttttggttggaatagttcgttgccagtgtactacatccgagaagaacggcagcgcgtcctgctgtacgtttgtgcgcacacagccatcatctacaacgtctttcgcaacaaccagtaccatctccagggccatgccaatattatctcctgcctgtgcgtgtcagaagaccggcgatggatcgccacagctgacaagggtcctgattgccttgtgataatttgggacagctttactggaattcccgtccacactatttttgactcttgccccgaaggaaacggcataatggcaatggccatgacacatgatgcgaagtaccttgctacgatcagcgatgcggaggtccagaaggtgtgcatatggaaatggacccttgctgtggaaacccctgcatgcactctggagttgcccacggagtacggggtacagaactacgtgacttttaatccaacaaataataaagagttagtgtcaaattcgaagacacgggccatatactacgcctggtacgaagagcgggatactctggcacactccgctcccctcctgacagagaaaacattcaacaagcttgtcggaaaattcagccagagcatcttccaccttaacctgactcaaattttgtctgccaccatggaaggcaagctagtcgtctgggacattcatcgtccaccctcgagcgcgagcacatttttgggctttccgtatataaagccatgtaaactggtacacctgcagaaggaaggtatcaccgttttaacaacaatcgattcatacatcgtaactggcgatatcaagggcaacattaaattctacgatcacaccctctctatagtaaattggtactcgcatctcaagctaggggctattagaactctgtcttttagtaagacccctgcaacccctcctacagagaagtccaactacccgcctgattgtacactgaagggggatctctttgtactacgtaattttatcattgggacatctgacgccgctgtgtaccacctgacgactgatggaaccaaactggaaaaactgttcgtagaacctaaggatgccatttgtgcaataagctgtcatccctaccagcctttgatcgcaatcggatctatctgcggcatgataaaagtgtggaactatgagaataagcagtacctgttctcccgcgtattcgagaaaggtctcggagtgcagtccctcacctacaatcccgaaggtgccctgctgggcgctggatttaccgagggtacagtatacattctggacgccatgtccttggaaaatgagtctcccgagccatttaaatattctagaacaagcgtcacacacatttcattctctcatgatagccagtatatggcgacagccgatagaagcttcactgtggccgtgtatatgctggtggtgagaaatggacagagagtttgggaatacctagctaggctacgctcccatcgaaaatcaatcaggtcactgctttttggcgtatacttggactcaaacgagccaagattattgtcactggggactgacagactgttgatcgagtatgacctgctgaggtcatataaagaccacctggaggtgctcgatatccatcacactgatcaaggatgctacccgacctgcatggtgtggtacccacccctgacgcgcgagctgttcctgcttatttgcaatagcggatataaggtcaagcttttcaacgctactacaaaaatgtgcaggaagactctgttggggccagcatacgggtccccgattgaacagacccaagtgttacccgtaagaagtatggcggaactacaaaaacgttacctcgttttcatcaaccgcgacaaagtggggctccagatcttacccgttgacgggaatccacataagacatcggcaatagtgtgtcatcccaatggagtggctggaatggctgtttcatatgacggatgctacgcatttaccgccgggggtcatgatcgctcagtggttcagtggaaaatcacactgagtgtactcgaggcagcagtgagcctgggcggagaagatctgacgccgttttacggtttattgtcaggaggacgtgaggggaaattttacagggaacttgaagattatttttactactcccagctgcgatctcagggtatcgataccatggagacaaggaaagtgtcagagcacatttgtctctccgaactcccttttgtgatgcgagcaattgggttttatcccagcgaggagaagatcgatgacatatttaacgagataaagtttggggaatatgtcgatacggggaagctcattgacaagataaatctcccagacttcctgaaagtctacctcaatcacaagcccccctttgggaatacgatgagcggaatccacaaatccttcgaagttctaggctacactaactccaagggaaagaaagccattcggagagaagattttttgaggctgctggtgacaaaaggggagcatatgacagaggaggaaatgctggattgctttgctagcctgtttgggctgaacccagagggttggaaatccgaacctgcgacatgttccgtgaaaggcagtgagatctgcttagaagaagagctgccagatgagataactgcagagatcttcgcgactgagatcctgggtctcacaatctcagaagactctggccaagatggtcagtag

SEQ ID NO: 239437 - DNA, 3450 bp, Artificial Sequence
  derived and/or modified sequence
atgtctgacgccgctgaggccccaagggaggcaactggcgagaatggagagacagagatgaaagaggaggaggaacctaatccaaactataaggaggtcgaggacccccagcaggagagcaaggatgatacaattgcctggcgggaaagtcaagaggaagagcggaagactggtgaggaggagggagaggaggagggcaaagaggataagaagattgtaatggaagaaacggaggaaaaggcaggagaggtacaagaaaaggaggccagcggtattcaagaagaaacaactgtcgaaccccaggaggtaactgcttcaatgatcaggttagagacacagatcaccgacagtcagagcatcacctcaggcatatttcctaagacccagagaggctcgaagagcaagctttctctgcagctcgaggatgcagagaccgacgagctcttaagagatctgtccacacagatcgagttcttggatttggaccaaattagtccagaagagcagcagatatcctcacctgaacgccaaccaagtggcgagctcgaggagaagactgataggatgccacaggacgagttgggccaggagagacgcgatctcgaacctgagaacagggaagaagggcaggagcgacgtgtcagcgacatccagagtaaagccggtattagcagagagtcacttgtctcttccactaccgaggatattctatttcaaaaggataaatccacgccagtatatcccctcacaatgacttggagtttcggctggaatagctcacttccagtttactacattcgagaggaacgccagcgcgttcttctctacgtctgcgcccatacagcaatcatttataatgttttccgcaacaaccagtaccacttgcagggtcacgcaaatatcatctcctgtctatgcgtgtccgaagaccgccgatggatcgcaacggctgataagggtccagattgtttggtaattatctgggatagcttcaccgggatccctgtccacacaattttcgactcctgtccagaggggaacggaattatggcaatggcaatgactcacgacgccaaatacctcgccacaatctccgatgccgaagtgcagaaagtctgtatttggaaatggaccctggcagtggagacaccagcctgcaccttggaacttcctacagaatatggagtgcagaattacgtgacattcaatccaacaaataataaagaacttgtgagtaacagtaagactcgagctatatactacgcctggtacgaggaacgtgatacactcgcgcattctgctccactgctgacagagaagacgtttaacaaattagtgggtaaattcagtcaatccattttccatctgaatctgacccaaatccttagcgcaacaatggaaggaaaattggtggtgtgggacatacataggccgccttcctctgcctcaaccttcttaggattcccatatattaaaccttgtaaattggtgcacctgcaaaaggaaggaattacagtgctcacaacaatcgactcttatattgtcacaggcgatattaaggggaatatcaagttttatgatcataccctgagcatcgtcaactggtattcccacctaaaactgggtgctataagaacactctcattcagcaaaactcccgcaacgccacccactgagaaaagcaactatcccccagattgtactttgaaaggtgacttgtttgtcttacggaattttattataggcacatctgacgctgcagtgtaccacctgactaccgacggcacgaaactagagaaattattcgtcgagccaaaggacgccatttgcgccataagttgtcacccctaccaacccctgattgccatcgggtccatctgcgggatgattaaggtgtggaactatgaaaataagcaatacctgttttcacgcgtctttgagaaagggttgggggtgcagagtctgacctacaatcccgagggcgcactccttggcgctggtttcacagaaggaaccgtatacattttagacgctatgagtcttgaaaatgagagccctgaacccttcaaatattctaggacctcagtgacgcacataagtttttcgcacgactcccagtatatggcaaccgccgatcgcagctttacagtggcggtgtacatgttggtggtgcggaatgggcaacgggtctgggaataccttgccagattgcggagccatcgaaaatccattaggagcttattgtttggagtttacttggactccaacgagcccagacttctcagtctgggaactgaccgtcttctaatagaatatgacctactgcgatcatacaaggaccatttggaagtgctggatattcatcatacagaccagggatgctaccctacatgcatggtgtggtacccgcctctaacacgtgaactgtttttgttgatatgtaacagcggatacaaggttaagctcttcaatgccaccactaagatgtgccgcaagaccctactggggcctgcatacggctctccaattgaacaaacgcaggtgctgcccgtgcgcagcatggccgaactgcagaaaagatatctcgttttcatcaatcgggataaggtagggcttcagattcttccggttgacgggaaccctcataagacatctgcaattgtgtgccaccctaatggcgttgcagggatggctgtaagctacgatggatgctacgccttcaccgccggaggtcacgacagaagtgtggtgcaatggaaaatcaccctctcagtgctggaggccgctgtctccctaggcggtgaggacttaacccctttctatggcctactgtcaggcggtagggaaggaaagttctacagagagttggaagattacttctattactctcaattgcgctcccaggggatcgacaccatggaaacacgcaaggtgagcgagcacatttgcttaagcgagctccctttcgtgatgcgcgcaatcgggttttacccttctgaagagaagatagacgacatcttcaacgagattaagttcggcgagtacgtggacaccgggaagcttattgacaaaattaatctgcccgacttcctgaaagtctatctcaaccacaagccgccatttggtaacaccatgtcaggaatccataaatcgtttgaggttcttggttacaccaacagtaaaggtaaaaaagccatcagacgggaagacttcctgaggctcctggtaacaaagggcgagcacatgaccgaagaggaaatgctggactgcttcgctagccttttcggtctgaatccggagggttggaaatctgaacccgctacttgttccgtaaagggcagtgagatctgtctggaggaggagctcccagacgagatcaccgccgagatctttgctacagaaatattaggtctgaccatttccgaggactccgggcaagatgggcagtag

SEQ ID NO: 239438 - DNA, 4467 bp, Artificial Sequence
  derived and/or modified sequence
tttatcctttcttttttattttaagatgtatgcatattaatcaatttaccatcactggggcatggcagtgtgggcggggagaattattcacattctcctaaaatgacagcagcagagagccttctgcctcagtggctctggctggtttcctgcaggggtcccagtggaaacccgtgtggccacctgttgccgtcttccatgagatgttagtggagagccactttgacgtggaatgatcctaatagatatagccagaccggttttgcggaaacgctttgtgctgagaaccgcaagctggtgcaccctgtgtcatatctgcccccagccagctggaattgtctgcaacacgcggtgcccggtgaggaggcaggcaggacggttgtgtgctgcatccatgagacctggaaattcagtttgcttttggaaaagagcattgtatccgagttcatacttctccaccccatcttgccaaggttgcggaaagtaaaaattggcagtattggccgctgcagcttcttaggggacgggaccatgtgaaaaggtgggatcgtgcgagcggaggaaggacagaaaagcgaggaaagtctatgccgccagcgaccggcaggaggcacgtcgggcacgctcgtcaccgtttcctggcacgtgaccaccgccctgccctgtcgctttagggcctgtcgcttccggcggtggcggttgccatggggacggagcttgggtggcaaccagaactagggagctggtggagaaggtggcggccgctggaaggaggcccgggaggtggctgaggggtccaggcggcgggacgactctggccttttgaagaccgggaggaaactctacagagaagaatgtcagatgcagcagaagctccccgagaagcaacaggagaaaatggagaaacagaaatgaaagaagaggaggaacctaatccaaattataaagaagtagaagatccacaacaggaatcaaaagatgacacaatagcatggagagagtctcaggaggaggagaggaaaacgggcgaggaggaaggggaggaggaggggaaggaggacaaaaagattgtcatggaagaaactgaggaaaaggctggagaagtccaagagaaggaggcttcaggaatacaggaagaaaccacagtagagccccaagaagtcacagcgtccatgatccgtttggagacacagattactgattcccagtcaatcacatcaggaattttcccaaaaacccaaagaggtagcaagtcaaagctttccttacaattggaggatgcagaaacagatgagcttttaagagacctgagcacacaaattgaatttcttgatttggatcaaatcagtcctgaggaacaacagattagttcccctgaaaggcagccctcaggagagcttgaggagaaaaccgaccggatgccccaagatgaactgggacaagaaagaagggacttggagccagaaaacagagaggagggacaagaaaggagagtatccgacatccagtccaaagcagggatctcccgggagtcactggtgtccagcaccacagaggacattctgtttcaaaaggataaaagcaccccggtgtatcccttgaccatgacctggtcgtttggatggaacagttctcttcctgtttactatattcgagaggaaaggcagagagttcttctgtatgtttgtgctcacactgcgatcatctacaacgtgttcaggaacaatcaataccaccttcagggccacgccaatattatctcctgcctctgcgtcagtgaagacaggcggtggatcgccacagcagacaaagggccagactgcctggtgattatatgggactccttcacaggtattcctgtgcacacaatatttgacagctgccctgaagggaatggcatcatggccatggccatgacccacgacgccaagtatctggcaaccatctcagatgctgaagtccagaaggtatgcatctggaagtggactttggcagtggaaacgccagcatgcactctcgaactccccacagagtacggtgttcagaactacgttacttttaacccaacaaataataaagaattggtgagcaatagtaaaacacgggcaatatattatgcatggtatgaagagagggatacactggctcacagtgccccacttttaactgaaaaaaccttcaacaagcttgtgggaaagtttagccagtccatctttcacttgaatttaacacaaatactctcagccacaatggaagggaagctggttgtctgggacatacaccgcccaccctcatctgcctccacctttttgggctttccctatatcaagccttgtaaattggttcatttgcagaaagagggtatcacggtacttaccacaattgatagctacattgtcacaggtgacattaaggggaacattaagttctatgatcacaccctgtctattgttaactggtacagtcacttgaaactgggcgccataagaactctgtccttttcaaagaccccagcaactcctcctactgaaaaatcaaactatcctcctgactgcactttaaaaggtgacctttttgtcttaaggaattttatcattggaacatctgatgccgcggtgtaccacttaacaacagatgggaccaaacttgagaagttatttgtagagcccaaggatgccatttgtgccatctcctgccacccatatcaacccctcattgccatcgggagcatctgtgggatgatcaaagtgtggaattatgaaaacaaacaatatcttttcagcagggtttttgagaaggggcttggagtccagagtctgacctacaaccccgaaggagcccttcttggagctggctttacagaggggacagtttacattcttgatgcaatgtctttagaaaatgaaagcccagagcctttcaaatattccagaaccagtgtgactcatataagcttttcccatgactcccagtatatggcaactgctgatagaagttttactgtggctgtttacatgctggtggtcagaaatggacagagggtctgggagtacttagcaagacttcgctctcatcgcaaaagcattcgaagtctcctgtttggggtttacctggacagcaatgagcctagactgctgagccttgggacagacaggctcttgatagagtatgatcttctcaggagctacaaagaccacctggaagtcctggacattcaccacaccgaccagggctgctatcccacctgcatggtctggtacccaccactcaccagggaactcttcctgcttatttgcaacagtggctacaaagtgaagctttttaatgctactaccaaaatgtgcagaaagacgcttctggggccagcttatggttcccctattgagcagacacaagtcctcccagtgagaagcatggcggagctacagaaacgctacttggtgtttattaacagagacaaggtgggacttcagatcttaccagttgacggcaatccacataagacatctgctattgtttgccacccgaacggggtggccggcatggccgtttcctatgatggctgctacgccttcactgcgggagggcacgatcgctcggtggtgcagtggaaaatcaccttaagtgtcctggaggcagcggtttctcttgggggtgaagacttgaccccattctatggtctgctgtctggtggccgggaaggaaaattctacagggagctagaagactacttctactattctcagctccgcagtcaaggcatcgacacaatggagaccagaaaggtgtcagaacacatttgcctgtcagagcttccttttgtcatgagagcaattggcttttacccatctgaagagaagattgatgatatatttaacgaaatcaaatttggtgaatatgtggacactggaaagctaatcgacaagatcaacttaccagatttcctaaaagtgtaccttaaccacaagccaccttttggtaacaccatgagtggcatccacaagagctttgaggtgctcggttataccaactccaaagggaaaaaggccattcgaagagaggacttcctgagactgctcgttactaaaggtgagcatatgacggaggaggagatgttggattgctttgcttcactgtttggcctgaatcccgagggatggaaatccgagcctgcaacctgctccgtcaaaggttcagaaatttgccttgaagaagaacttccagacgaaatcactgcagaaatattcgcgactgaaattcttggcttaaccatttcagaagattccggccaggatggtcagtgaagttaccaggaatgtttaaagcacaaaggactttgggtgtgtgtgcatgcacatgtgtgtgttttccatgaggcactgctttttatgcatttccctcccccctctcatctttagaacatttagacattaaagcaagtttctggtgagcaatggaattcacaaa

SEQ ID NO: 239439 - protein, 266 aa, Artificial Sequence
  derived and/or modified sequence
MRLLFLAVLRPHTGNAVTAQRVRAHLEAAGHVCVLKDAFDFESRSEIANLILAENCEAALALHLYRGGRLLQGHRIPFGVIFGGTDVNEDANQAEKNTVMGRVLEEARFAVAFTESMKEMAQAQWVDPVFTREVKAKVKRAAGVRLIGEMPQEDLHAVVKNCFAVVNSSVSEGMSAAILEAMDLEVPVLARNIPGNAAVVKHEVTGLLFSNPQEFVHLAKRLVSDPALEKEIVVNGREYVRMYHSWQVERDTYQQLIRKLEGSTED

SEQ ID NO: 239440 - DNA, 801 bp, Artificial Sequence
  derived and/or modified sequence
atgaggctgctcttcctggcggtactacgccctcatacaggcaatgccgtgaccgcccagcgcgtgcgggctcacctagaagctgcagggcatgtgtgcgtcttgaaagatgctttcgatttcgagagtaggtcagagatcgctaacttaatcctcgctgagaattgcgaggctgccctcgccttacatctatacagggggggtcgtctgctccaaggacaccgcatcccttttggcgtgattttcggcggaacggacgtaaacgaggacgcaaatcaggccgagaaaaacaccgtgatgggaagggtgctggaggaggcaagattcgccgtcgcctttacggagtctatgaaggaaatggcccaggcccagtgggtcgacccagtcttcactagggaagtgaaagcgaaagtgaagcgggcagcaggagttaggctgatcggagagatgccccaggaggacctccatgccgtggtcaagaattgtttcgcggtagtaaactccagcgtctcagagggtatgagtgcagccatcctagaggccatggacctggaggtcccggtactggcgcgaaatatccctggtaatgcggcagtcgtcaaacacgaggtgaccgggctcctgttcagcaatccccaagagttcgtgcacctggccaaaaggctggtgtccgatcccgctctcgaaaaggagatagtcgtgaacggcagagagtacgtccgaatgtaccacagttggcaggtggagagggacacctatcagcaactgatccggaaactagaaggttccacggaggactag

SEQ ID NO: 239441 - DNA, 801 bp, Artificial Sequence
  derived and/or modified sequence
atgcgcctcctgtttcttgctgtcctgaggccccacaccgggaatgcagtcacggctcagagggtgcgggctcatcttgaagcggcaggacatgtatgtgtgctcaaggacgccttcgacttcgagagccgatctgaaatcgccaacttgattctggctgaaaactgtgaagccgcacttgctttgcacctgtatcggggcggccgactgctccaaggccatcgcatcccttttggggtcatttttggagggacagatgtcaacgaagatgctaaccaggcagagaaaaatacggtgatgggtagggtgttggaagaagcccgatttgcagtcgcattcacggaaagcatgaaagaaatggcgcaggcacagtgggttgatcctgtatttactagggaggttaaagcgaaggttaagagagcagctggagtccgacttatcggggaaatgccacaggaggatcttcacgctgtcgtgaagaactgcttcgctgttgtgaatagctccgtaagtgaaggaatgagcgctgctatactggaagcaatggatctcgaggtgcccgtgctcgcaagaaatattccaggaaatgctgccgttgttaagcacgaggttacaggtctcctgtttagcaaccctcaagagttcgttcatctcgcaaaaaggttggtctctgatccggcgcttgagaaggagatagttgtaaacggccgggaatacgtaaggatgtaccattcttggcaagtggagcgtgacacctaccagcagttgataaggaagttagagggctccaccgaagactag

SEQ ID NO: 239442 - DNA, 801 bp, Artificial Sequence
  derived and/or modified sequence
atgcgccttctatttctagccgtcctgcgtccccacaccggtaacgccgttacagctcagcgggtgcgagcccatctggaggcggctggacatgtgtgcgtgctcaaagatgcttttgacttcgaatctcgctccgaaatagccaaccttatacttgccgagaactgcgaggccgcactcgccttacacctgtacagagggggaagacttcttcaagggcatcggataccattcggggtcattttcggcgggacagacgttaacgaagatgccaatcaggctgagaagaacacagtgatgggaagggtactggaagaggctcggtttgctgttgcctttacagagtcaatgaaggagatggcccaggctcaatgggtggaccccgtcttcactcgcgaggttaaggccaaggtgaaacgggctgccggagtccgattgatcggtgaaatgccccaagaggaccttcatgctgtcgtgaaaaactgttttgctgtggtgaactcatcagtctctgaaggaatgagtgccgctatcctcgaggcaatggacctcgaagttcctgttctcgctcgtaacatccctggaaatgcagcagtggtgaaacacgaggtaacggggttattgttctccaaccctcaagagttcgtccatctagcgaaacggctcgtgtccgaccctgcactggagaaggagattgtagtgaacggcagagagtatgtgcgtatgtatcattcgtggcaggttgaacgtgacacctaccaacagttgatcaggaagttagagggaagcacagaagattag

SEQ ID NO: 239443 - DNA, 2721 bp, Artificial Sequence
  derived and/or modified sequence
gtcggcggcggcggggccggtcgatggcccgggcggcggcggcggcatgcggctcctgttcctggcggtgctgcggccacacaccggcaacgcggtcacggcccagcgcgttcgggcccatctagaggctgcagggcacgtgtgcgttttgaaggatgcctttgactttgaaagccgatctgagattgcaaacctcatcttggctgagaactgcgaggctgccctggctcttcatctctataggggaggcaggcttttgcaaggccaccgaatcccttttggagtcatctttggtggaactgatgtaaatgaagatgccaaccaggcggaaaaaaacacagtcatgggcagagttcttgaggaagccagatttgctgtcgctttcacagagtcaatgaaggaaatggcacaagcgcagtgggtcgatccagtgtttacaagggaagtgaaagccaaagtgaaaagagccgctggggtacgattgattggagagatgcctcaagaagatctgcacgcggtggtgaagaattgcttcgcggtggtgaatagctctgtctctgaaggcatgtcagctgcaattttggaggcaatggatttagaagtaccggtattggccaggaacatccccgggaatgctgccgtggtgaagcatgaagtcacagggctactgttttccaatcctcaggagtttgttcatctggcaaagagactggttagtgatcctgcattagaaaaggaaatcgtagtgaacggaagggaatacgtgagaatgtatcattcatggcaggtggaaagagacacctaccaacagctcatcaggaagctggaaggaagcactgaagattgagggccccgcctcatcagacacctgctctctgacacacagctctgggtgcacactcagagacagagttctggatcacgtgggcccagtgcagttcaaataaaaccagcctcagcggaatcctagaaaatgttagtcgtgagtccccagagccactgcattcatcccatatccttctgtgcgttcagatgctgtcccaggcgtgttcaccagccagtcctgatggaggtgcatgagtgactgggttgactgggacagggaaaggggaactggttttcagggaatttgggagagaatttgattacctgccttagggctttggtgtggacaatagaggcttattttcaagcagtcatggttcagactcctcccgcctgccttctgaccaacctctccccatcgttgccagtttgaaaggcaaaagcaaaacagacgtgtcagctgagccgagtcctcgcaggatttttgttgtgatctcaggactctgacaggcacgtgggtgacccgaggcttctctgaacactagaaagcgctgtgagtgagctcacgcccggcacagctcacttttcaatggtggaattgaaagttgtgctttttagaaaagtggccaggctgcccgcaggccccgcccacctcttggctgaatttgagtggaaaaccaggaaggaacaagcgccacgtcacgcatagcctgcaaatcgcccgcgtgaccctgagatggaggcctgaggctttgggtccagggtgggctcttccccttcccacatcagggacccggggatggatgtcggaagggtcaccagcctccagcctttggcaggatggagcttgggtctgcagggctttgcagccacacagcgaggtcagtccggggccagccgcgccatcatggtaatggtggcctcgccccatccatgtcatccatgtcacatgaggacgtgcagtcttccttgtcctctcctagtggaatttgcctgggagaacctccactgaatactgaaattgttgcatgcctgtggattccttacgacaatggggaacgcggtgtttcccacctcttgtgggtagaaagcagtctgctttgaggaggcgagaaggcaaagccagggcagggcgttgctgtgggaagcgttcggtgaaagcgggtttcgacgcttaggagggccgagggagaagattccaccagcattgtccttgcttcaagttttaggatgtctgaactttcagctttcatgttttcaaccatcatttttttaatggcacaacctacatcttgtttttaaaagaagtagcctcaaattaaactccttaaactctgatgccctggggatgagaacaactagcttggatctcgtgccgtgtaattcaatgtttcattccgctgcctccatcatgtaatagaatcgctttccagaaaggcagttaactggaagcagcagaggctcccagccgtgagaggactgctcaacaatgccccccatcgccgcccccccacccctcgcaccccttgtgttttccctctgaggggcccaagggttatggctttcatgtctaggtgtggggacagaggagggagaggcagatcctgggccgggagaggatggcctggtctgaatctggagtaattaatgccacccaaagaaaaggccctgccaggtccaatgttgtcttagatctgatgatgctgctatttacaaaacactgatcgtccgaaagcttgaatctgttcctcctcgaatgaccctgtagatgcctgacctccaccgtacctccacatcactattcatgtccttctaggaaaatgtgcacatgcctcacgcactatgtgggaagggcgtgtttttaaattaataaagtgtgtcaccattagccatacg

SEQ ID NO: 239444 - DNA, 801 bp, Artificial Sequence
  derived and/or modified sequence
atgagactgctgttcctggccgtgctgagaccccacaccggcaacgccgtgaccgcccagagagtgagagcccacctggaggccgccggccacgtgtgcgtgctgaaggacgccttcgacttcgagagcagaagcgagatcgccaacctgatcctggccgagaactgcgaggccgccctggccctgcacctgtacagaggcggcagactgctgcagggccacagaatccccttcggcgtgatcttcggcggcaccgacgtgaacgaggacgccaaccaggccgagaagaacaccgtgatgggcagagtgctggaggaggccagattcgccgtggccttcaccgagagcatgaaggagatggcccaggcccagtgggtggaccccgtgttcaccagagaggtgaaggccaaggtgaagagagccgccggcgtgagactgatcggcgagatgccccaggaggacctgcacgccgtggtgaagaactgcttcgccgtggtgaacagcagcgtgagcgagggcatgagcgccgccatcctggaggccatggacctggaggtgcccgtgctggccagaaacatccccggcaacgccgccgtggtgaagcacgaggtgaccggcctgctgttcagcaacccccaggagttcgtgcacctggccaagagactggtgagcgaccccgccctggagaaggagatcgtggtgaacggcagagagtacgtgagaatgtaccacagctggcaggtggagagagacacctaccagcagctgatcagaaagctggagggcagcaccgaggactag

SEQ ID NO: 239445 - DNA, 801 bp, Artificial Sequence
  derived and/or modified sequence
atgcgtctgctttttctggcagtcctgcgaccccatactggtaatgccgtgacagcacagagagtgcgggcccatctcgaggcagccgggcatgtttgcgtgttaaaggatgcatttgatttcgaaagccgatccgaaatagcgaacttaattttggcagaaaattgcgaggccgccctggccctccacctgtacagaggtgggcggttattacaagggcatagaatcccctttggcgtgatatttggaggtaccgacgtcaatgaggatgcaaaccaagctgaaaagaacacggttatgggtagagtgctcgaagaagcgcgcttcgccgtggcctttaccgaatcaatgaaagagatggcccaggcgcagtgggtagatcccgtttttacacgggaggtcaaggccaaagtgaagcgagctgccggcgtgaggttaatcggcgagatgccccaagaagacctccacgctgtcgttaaaaactgtttcgcagtcgttaactctagcgttagcgaaggtatgtctgcggcaattttagaggcaatggacctcgaggtaccagttctcgcacggaacattcctggcaacgcagccgttgtgaagcatgaggtgactggccttctcttctccaacccacaggagttcgttcatcttgcaaagcgcctggttagtgatcccgccttggagaaggagattgtagtgaatggaagggagtacgttagaatgtatcacagctggcaagtcgagagagatacataccagcagttgatacgcaaactcgagggctcaaccgaggactag

SEQ ID NO: 239446 - DNA, 801 bp, Artificial Sequence
  derived and/or modified sequence
atgaggctgctcttcctggccgtgctgcggccccacactggaaatgctgtgacagcccagagggtgcgggcccacctggaggccgccggccacgtgtgtgtgctgaaggatgcctttgattttgagagccgctcagaaattgccaacctgatcctggccgagaactgtgaggccgccctggccctgcacctgtacagaggaggccgcctgctgcagggccaccgcatcccctttggagtcatctttggaggaacagatgtgaatgaagatgccaaccaggccgagaagaacacagtgatgggccgggtgctggaggaggccaggtttgctgtggccttcacagagagcatgaaggagatggcccaggcccagtgggtggaccccgtcttcacccgggaggtgaaggccaaggtgaagagagctgctggggtgcggctgattggagagatgccccaggaggacctgcatgctgtggtgaagaactgctttgctgtggtgaacagctctgtgtctgagggcatgtctgctgccatcctggaggccatggacctggaggtgcctgtgctggccaggaacatccctggaaatgctgctgtggtgaagcatgaggtgacaggcctgctcttcagcaacccccaggagtttgtgcacctggccaagaggctggtgtctgaccctgccctggagaaggagatcgtggtgaatggccgggagtatgtgaggatgtaccacagctggcaggtggagcgggacacctaccagcagctgatcaggaagctggagggcagcacagaagattag

SEQ ID NO: 239447 - DNA, 801 bp, Artificial Sequence
  derived and/or modified sequence
atgcggctgctgttcctggccgtgctgcggccccacaccggcaacgccgtgacggctcagcgcgtccgcgctcacttagaggccgccggacatgtctgcgttctgaaagatgctttcgacttcgagtcccggtcagaaatagccaacctgattttggcagaaaactgtgaagcagctttggctctccacctgtataggggaggtcgattgctacagggacacagaatccccttcggcgtgattttcggtggcacggatgtgaatgaagacgccaatcaggccgaaaagaatactgtcatgggaagggtgctagaagaggcaaggtttgcggttgcttttactgaatctatgaaagagatggctcaagcgcagtgggtggatccggttttcacccgcgaagtcaaggctaaggtcaagagagccgcaggcgtccggttaattggtgaaatgccacaggaggacctccacgctgtagtgaaaaattgcttcgcagtggtgaacagcagcgtctccgagggaatgtcggccgcaatcctagaggcaatggacctggaagtgccggtgttagcccgcaacattccaggtaacgctgcggtggtgaagcacgaggtcaccggactcctcttcagcaaccctcaggagttcgttcatctggccaaacgcttggtatctgaccccgccctagaaaaggagatcgtcgtaaacggcagagagtatgtgcggatgtaccactcatggcaggtggagagggacacataccaacagttgataagaaagttggaagggtctacggaagactag

SEQ ID NO: 239448 - RNA, 801 nt, Artificial Sequence
  derived and/or modified sequence
augcgccuccuguuucuugcuguccugaggccccacaccgggaaugcagucacggcucagagggugcgggcucaucuugaagcggcaggacauguaugugugcucaaggacgccuucgacuucgagagccgaucugaaaucgccaacuugauucuggcugaaaacugugaagccgcacuugcuuugcaccuguaucggggcggccgacugcuccaaggccaucgcaucccuuuuggggucauuuuuggagggacagaugucaacgaagaugcuaaccaggcagagaaaaauacggugauggguaggguguuggaagaagcccgauuugcagucgcauucacggaaagcaugaaagaaauggcgcaggcacaguggguugauccuguauuuacuagggagguuaaagcgaagguuaagagagcagcuggaguccgacuuaucggggaaaugccacaggaggaucuucacgcugucgugaagaacugcuucgcuguugugaauagcuccguaagugaaggaaugagcgcugcuauacuggaagcaauggaucucgaggugcccgugcucgcaagaaauauuccaggaaaugcugccguuguuaagcacgagguuacaggucuccuguuuagcaacccucaagaguucguucaucucgcaaaaagguuggucucugauccggcgcuugagaaggagauaguuguaaacggccgggaauacguaaggauguaccauucuuggcaaguggagcgugacaccuaccagcaguugauaaggaaguuagagggcuccaccgaagacuag

SEQ ID NO: 239449 - RNA, 801 nt, Artificial Sequence
  derived and/or modified sequence
augcgccuucuauuucuagccguccugcguccccacaccgguaacgccguuacagcucagcgggugcgagcccaucuggaggcggcuggacaugugugcgugcucaaagaugcuuuugacuucgaaucucgcuccgaaauagccaaccuuauacuugccgagaacugcgaggccgcacucgccuuacaccuguacagagggggaagacuucuucaagggcaucggauaccauucggggucauuuucggcgggacagacguuaacgaagaugccaaucaggcugagaagaacacagugaugggaaggguacuggaagaggcucgguuugcuguugccuuuacagagucaaugaaggagauggcccaggcucaauggguggaccccgucuucacucgcgagguuaaggccaaggugaaacgggcugccggaguccgauugaucggugaaaugccccaagaggaccuucaugcugucgugaaaaacuguuuugcuguggugaacucaucagucucugaaggaaugagugccgcuauccucgaggcaauggaccucgaaguuccuguucucgcucguaacaucccuggaaaugcagcaguggugaaacacgagguaacgggguuauuguucuccaacccucaagaguucguccaucuagcgaaacggcucguguccgacccugcacuggagaaggagauuguagugaacggcagagaguaugugcguauguaucauucguggcagguugaacgugacaccuaccaacaguugaucaggaaguuagagggaagcacagaagauuag

SEQ ID NO: 239450 - protein, 1454 aa, Artificial Sequence
  derived and/or modified sequence
MWAQLLLGMLALSPAIAEELPNYLVTLPARLNFPSVQKVCLDLSPGYSDVKFTVTLETKDKTQKLLEYSGLKKRHLHCISFLVPPPAGGTEEVATIRVSGVGNNISFEEKKKVLIQRQGNGTFVQTDKPLYTPGQQVYFRIVTMDSNFVPVNDKYSMVELQDPNSNRIAQWLEVVPEQGIVDLSFQLAPEAMLGTYTVAVAEGKTFGTFSVEEYVLPKFKVEVVEPKELSTVQESFLVKICCRYTYGKPMLGAVQVSVCQKANTYWYREVEREQLPDKCRNLSGQTDKTGCFSAPVDMATFDLIGYAYSHQINIVATVVEEGTGVEANATQNIYISPQMGSMTFEDTSNFYHPNFPFSGKIRVRGHDDSFLKNHLVFLVIYGTNGTFNQTLVTDNNGLAPFTLETSGWNGTDVSLEGKFQMEDLVYNPEQVPRYYQNAYLHLRPFYSTTRSFLGIHRLNGPLKCGQPQEVLVDYYIDPADASPDQEISFSYYLIGKGSLVMEGQKHLNSKKKGLKASFSLSLTFTSRLAPDPSLVIYAIFPSGGVVADKIQFSVEMCFDNQVSLGFSPSQQLPGAEVELQLQAAPGSLCALRAVDESVLLLRPDRELSNRSVYGMFPFWYGHYPYQVAEYDQCPVSGPWDFPQPLIDPMPQGHSSQRSIIWRPSFSEGTDLFSFFRDVGLKILSNAKIKKPVDCSHRSPEYSTAMGAGGGHPEAFESSTPLHQAEDSQVRQYFPETWLWDLFPIGNSGKEAVHVTVPDAITEWKAMSFCTSQSRGFGLSPTVGLTAFKPFFVDLTLPYSVVRGESFRLTATIFNYLKDCIRVQTDLAKSHEYQLESWADSQTSSCLCADDAKTHHWNITAVKLGHINFTISTKILDSNEPCGGQKGFVPQKGRSDTLIKPVLVKPEGVLVEKTHSSLLCPKGKVASESVSLELPVDIVPDSTKAYVTVLGDIMGTALQNLDGLVQMPSGCGEQNMVLFAPIIYVLQYLEKAGLLTEEIRSRAVGFLEIGYQKELMYKHSNGSYSAFGERDGNGNTWLTAFVTKCFGQAQKFIFIDPKNIQDALKWMAGNQLPSGCYANVGNLLHTAMKGGVDDEVSLTAYVTAALLEMGKDVDDPMVSQGLRCLKNSATSTTNLYTQALLAYIFSLAGEMDIRNILLKQLDQQAIISGESIYWSQKPTPSSNASPWSEPAAVDVELTAYALLAQLTKPSLTQKEIAKATSIVAWLAKQHNAYGGFSSTQDTVVALQALAKYATTAYMPSEEINLVVKSTENFQRTFNIQSVNRLVFQQDTLPNVPGMYTLEASGQGCVYVQTVLRYNILPPTNMKTFSLSVEIGKARCEQPTSPRSLTLTIHTSYVGSRSSSNMAIVEVKMLSGFSPMEGTNQLLLQQPLVKKVEFGTDTLNIYLDELIKNTQTYTFTISQSVLVTNLKPATIKVYDYYLPDEQATIQYSDPCE

SEQ ID NO: 239451 - protein, 1454 aa, Artificial Sequence
  derived and/or modified sequence
MWAQLLLGMLALSPAIAEELPNYLVTLPARLNFPSVQKVCLDLSPGYSDVKFTVTLETKDKTQKLLEYSGLKKRHLHCISFLVPPPAGGTEEVATIRVSGVGNNISFEEKKKVLIQRQGNGTFVQTDKPLYTPGQQVYFRIVTMDSNFVPVNDKVSWEEGQDPNSNRIAQWLEVVPEQGIVDLSFQLAPEAMLGTYTVAVAEGKTFGTFSVEEYVLPKFKVEVVEPKELSTVQESFLVKICCRYTYGKPMLGAVQVSVCQKANTYWYREVEREQLPDKCRNLSGQTDKTGCFSAPVDMATFDLIGYAYSHQINIVATVVEEGTGVEANATQNIYISPQMGSMTFEDTSNFYHPNFPFSGKIRVRGHDDSFLKNHLVFLVIYGTNGTFNQTLVTDNNGLAPFTLETSGWNGTDVSLEGKFQMEDLVYNPEQVPRYYQNAYLHLRPFYSTTRSFLGIHRLNGPLKCGQPQEVLVDYYIDPADASPDQEISFSYYLIGKGSLVMEGQKHLNSKKKGLKASFSLSLTFTSRLAPDPSLVIYAIFPSGGVVADKIQFSVEMCFDNQVSLGFSPSQQLPGAEVELQLQAAPGSLCALRAVDESVLLLRPDRELSNRSVYGMFPFWYGHYPYQVAEYDQCPVSGPWDFPQPLIDPMPQGHSSQRSIIWRPSFSEGTDLFSFFRDVGLKILSNAKIKKPVDCSHRSPEYSTAMGAGGGHPEAFESSTPLHQAEDSQVRQYFPETWLWDLFPIGNSGKEAVHVTVPDAITEWKAMSFCTSQSRGFGLSPTVGLTAFKPFFVDLTLPYSVVRGESFRLTATIFNYLKDCIRVQTDLAKSHEYQLESWADSQTSSCLCADDAKTHHWNITAVKLGHINFTISTKILDSNEPCGGQKGFVPQKGRSDTLIKPVLVKPEGVLVEKTHSSLLCPKGKVASESVSLELPVDIVPDSTKAYVTVLGDIMGTALQNLDGLVQMPSGCGEQNMVLFAPIIYVLQYLEKAGLLTEEIRSRAVGFLEIGYQKELMYKHSNGSYSAFGERDGNGNTWLTAFVTKCFGQAQKFIFIDPKNIQDALKWMAGNQLPSGCYANVGNLLHTAMKGGVDDEVSLTAYVTAALLEMGKDVDDPMVSQGLRCLKNSATSTTNLYTQALLAYIFSLAGEMDIRNILLKQLDQQAIISGESIYWSQKPTPSSNASPWSEPAAVDVELTAYALLAQLTKPSLTQKEIAKATSIVAWLAKQHNAYGGFSSTQDTVVALQALAKYATTAYMPSEEINLVVKSTENFQRTFNIQSVNRLVFQQDTLPNVPGMYTLEASGQGCVYVQTVLRYNILPPTNMKTFSLSVEIGKARCEQPTSPRSLTLTIHTSYVGSRSSSNMAIVEVKMLSGFSPMEGTNQLLLQQPLVKKVEFGTDTLNIYLDELIKNTQTYTFTISQSVLVTNLKPATIKVYDYYLPDEQATIQYSDPCE

SEQ ID NO: 239452 - protein, 1004 aa, Artificial Sequence
  derived and/or modified sequence
SFLGIHRLNGPLKCGQPQEVLVDYYIDPADASPDQEISFSYYLIGKGSLVMEGQKHLNSKKKGLKASFSLSLTFTSRLAPDPSLVIYAIFPSGGVVADKIQFSVEMCFDNQVSLGFSPSQQLPGAEVELQLQAAPGSLCALRAVDESVLLLRPDRELSNRSVYGMFPFWYGHYPYQVAEYDQCPVSGPWDFPQPLIDPMPQGHSSQRSIIWRPSFSEGTDLFSFFRDVGLKILSNAKIKKPVDCSHRSPEYSTAMGAGGGHPEAFESSTPLHQAEDSQVRQYFPETWLWDLFPIGNSGKEAVHVTVPDAITEWKAMSFCTSQSRGFGLSPTVGLTAFKPFFVDLTLPYSVVRGESFRLTATIFNYLKDCIRVQTDLAKSHEYQLESWADSQTSSCLCADDAKTHHWNITAVKLGHINFTISTKILDSNEPCGGQKGFVPQKGRSDTLIKPVLVKPEGVLVEKTHSSLLCPKGKVASESVSLELPVDIVPDSTKAYVTVLGDIMGTALQNLDGLVQMPSGCGEQNMVLFAPIIYVLQYLEKAGLLTEEIRSRAVGFLEIGYQKELMYKHSNGSYSAFGERDGNGNTWLTAFVTKCFGQAQKFIFIDPKNIQDALKWMAGNQLPSGCYANVGNLLHTAMKGGVDDEVSLTAYVTAALLEMGKDVDDPMVSQGLRCLKNSATSTTNLYTQALLAYIFSLAGEMDIRNILLKQLDQQAIISGESIYWSQKPTPSSNASPWSEPAAVDVELTAYALLAQLTKPSLTQKEIAKATSIVAWLAKQHNAYGGFSSTQDTVVALQALAKYATTAYMPSEEINLVVKSTENFQRTFNIQSVNRLVFQQDTLPNVPGMYTLEASGQGCVYVQTVLRYNILPPTNMKTFSLSVEIGKARCEQPTSPRSLTLTIHTSYVGSRSSSNMAIVEVKMLSGFSPMEGTNQLLLQQPLVKKVEFGTDTLNIYLDELIKNTQTYTFTISQSVLVTNLKPATIKVYDYYLPDEQATIQYSDPCE

SEQ ID NO: 239453 - DNA, 4365 bp, Artificial Sequence
  derived and/or modified sequence
atgtgggcccagctgttgctcggaatgctggccctgagccccgcaatcgccgaagaactacccaactatctcgtaactctaccggcaagactgaatttcccaagcgtgcagaaggtgtgtctggatttgtcccccggctattcggacgttaagttcaccgtaaccctcgagacaaaggataagactcaaaagttgttggagtactccggcctgaaaaagaggcacctgcattgtatttcctttttagtgccaccacccgcagggggcacagaggaggtggccacaataagagtgagtggagtgggaaataatatcagcttcgaggagaagaagaaggtcctgattcagagacaggggaacggtaccttcgtgcagacagacaagcctttatacactcctgggcagcaggtgtattttaggatcgtgacaatggacagtaacttcgttcccgtcaatgacaaatacagtatggttgaactacaggaccccaactcgaacagaattgctcagtggctcgaggttgttccagaacagggcatcgttgatctaagcttccagctggccccggaggctatgctagggacctatacagtcgccgtggctgagggaaaaaccttcgggacattctcagtggaggagtacgtgttgcccaagtttaaggtggaggtggtcgagccgaaggaattatccacagtccaggaatcctttcttgtaaagatctgctgccggtacacatacggtaagcccatgctgggggccgtgcaggtaagcgtttgccagaaagccaacacctattggtatagagaagtggagcgcgagcagttacctgataagtgccgaaacttatcgggccagactgataagaccggctgcttctccgcccctgtcgacatggctaccttcgatcttattggttatgcgtacagccatcaaatcaatatagttgccactgtggtcgaagaaggaactggcgtggaggctaatgctacccagaatatctacatcagcccacagatggggtccatgacatttgaagatacttctaacttttatcaccccaatttccccttttcaggcaagattagggtgcgtggccacgacgatagcttcttgaaaaatcatctcgtgtttctggttatctacggcacgaacggaacattcaaccaaacacttgtcaccgacaacaacggtctcgccccctttactcttgagacctccgggtggaacggcactgatgtgtcactggagggaaagttccagatggaagatctggtttataatcctgaacaggtgcccaggtattaccaaaacgcttatctccatctgcgccccttttacagcactacacgctcgtttctgggcatccaccggttgaacggccccttgaagtgtggtcaaccccaggaggtccttgtggattactacattgatcctgcggacgcctctcccgatcaagagatcagcttctcatactatctgatcgggaaaggctccctggttatggaaggacagaaacacctaaactcaaaaaagaaaggtctgaaagccagcttctctctgagcctaacatttacatcacgattagcacctgatcccagcttagtaatctatgcaatcttcccgtccggtggcgtcgtggccgacaagattcagttctcagttgagatgtgcttcgataaccaagtctccctcggctttagccctagtcagcagcttcccggggcagaggtggagcttcaattgcaggccgcaccgggcagtctgtgcgctctgcgagcagtggacgagtccgtacttcttcttagaccggaccgggaactaagtaacaggtccgtgtacgggatgttcccgttctggtatggccactacccataccaagtggctgaatatgaccagtgtcctgtttccgggccttgggattttccacaacctcttatagaccctatgccccagggccacagttcccagcgctcaataatttggcggcccagcttcagtgaggggacagacttgttttctttctttagggacgtaggcctgaaaatcctgagtaatgctaaaatcaagaagcctgttgattgtagtcaccgtagcccggaatacagcacagccatgggagccggcggcggacaccctgaggccttcgaatccagcacacctctccaccaggccgaagactcccaggtgcgccagtactttccggaaacctggctctgggatcttttccccattggcaatagtgggaaagaagctgtgcatgtcactgttccggatgctataactgagtggaaggccatgtctttttgtacctcccagagccgggggttcggcttgagccccacagtgggtctcacggccttcaaaccatttttcgttgatttgacactgccatacagcgttgtcaggggcgagagttttcgattgactgccaccatattcaattatcttaaggactgtatccgcgtgcagactgacctggccaagagccacgaataccagctggagtcctgggccgatagccaaacctcttcttgtctgtgcgcagatgacgctaagacccaccactggaatataactgctgtgaaactgggccatattaacttcactatttctactaaaattttggactccaacgaaccctgtggaggacaaaaaggatttgttccccagaagggaagatccgacaccctgatcaagcccgtacttgtcaaaccagaaggagtgcttgtagaaaaaacacactcatctctgctctgccctaaaggcaaagtagcatccgagagcgttagccttgagctcccggtggatattgttccggacagtacaaaggcctacgtaacagtcctcggtgacattatggggacagcactgcagaaccttgacgggttggtacaaatgccttccggctgtggcgagcaaaacatggtattatttgcaccaatcatctacgttttacagtacttggaaaaagctggacttctcactgaggaaatcaggtctcgcgcggtcggattcctggaaattggctaccaaaaggaactgatgtacaagcatagcaacggtagctactcagccttcggcgagcgggatggcaacgggaacacatggctgacagcgttcgtgaccaagtgctttggccaggctcagaagtttattttcatcgatcctaagaacattcaggacgccctaaagtggatggcaggcaatcagttgccttccggttgctacgccaacgtaggcaacctcctgcataccgccatgaagggaggagtggacgacgaagtaagcctcaccgcttatgtgacagccgccttattagaaatgggaaaggacgttgatgacccgatggtgtcccaaggactgcggtgtttgaagaattctgccaccagtacaactaacctgtatactcaagccctgctagcctatatctttagcctggcgggcgagatggacatcaggaacatactactcaaacagttagatcaacaggccattatcagtggagagagcatttattggtctcagaaacctacgcccagcagtaacgcctctccatggagcgaaccagcagccgtggacgtggaactgacggcctatgcattgctggcccagctaaccaagccaagcttaacacagaaagagatagccaaagccacgtctatagtggcttggctggccaagcagcacaacgcttacgggggcttctcatctacacaggatacagtggtcgcgctacaggccctggcgaaatacgccacaacagcctacatgccatcagaggagattaatctggtcgttaagtctacggagaacttccaaagaaccttcaacatccaatccgttaacagactggtgttccagcaggacacattgcccaacgtgcccgggatgtacactctggaagcgagcggccaaggatgcgtctatgtgcagacagtgctgcgctacaacatcttaccccctacaaacatgaagaccttctccttgagtgtcgagatcggcaaggcaaggtgcgagcaacctactagtcccagaagccttaccctgactatacatacgtcatatgtaggatctcgaagttccagcaatatggccattgtggaggtgaaaatgttatccgggtttagccccatggaaggcacgaaccagttgctcctccagcagccactcgtgaaaaaggtggagtttggaacagatactcttaacatttacctagatgaactgattaaaaatacccagacctatactttcacgattagccaaagcgtgctagtcacgaacctcaagcccgccaccattaaggtgtacgattactatctgcccgacgagcaggccacaatccaatactccgatccctgtgaatag

SEQ ID NO: 239454 - DNA, 4365 bp, Artificial Sequence
  derived and/or modified sequence
atgtgggcgcagcttttgttaggaatgttagctttatctccggctattgccgaggagttgccaaattatctggtgacactcccggcccgacttaattttccttccgttcagaaggtgtgtctggacctgtcaccagggtacagcgacgtcaaatttacagtgactctcgagacaaaagataagacccagaaactgctggagtactctggcctcaaaaagcggcacctgcactgtatcagttttttggtgcctcccccagccggcggcaccgaggaagtggccaccattagggtgtctggcgtgggcaataacattagcttcgaggaaaaaaagaaagtattgatccagcgccagggaaatgggactttcgttcagacggacaagccgttgtacacaccaggacaacaggtgtatttccgtatcgtcacgatggacagtaacttcgtacccgtcaatgacaaagtgtcatgggaagaaggccaggatcccaatagtaacagaatcgcccagtggctggaggtggtaccagaacagggcattgtcgacctgagcttccagctcgcacccgaagctatgctcggcacctatacagtggcggtggccgaggggaagaccttcggaactttctcagttgaggagtatgttctgcccaagttcaaagtcgaggtcgtagagccaaaggaactaagcacagtgcaagagtcatttctcgttaaaatctgttgtcggtacacttacggcaagccgatgctcggagctgttcaagtgagcgtgtgtcaaaaagccaatacctattggtatcgggaggtggagagggagcaactccccgacaagtgcaggaacctgtccgggcagaccgataaaacaggctgtttctccgctcccgtggatatggctaccttcgatctcattggatacgcctacagccaccaaataaacattgtcgctaccgtggtcgaagaaggaactggggttgaggcaaatgccactcagaatatatatatcagccctcagatgggcagtatgacttttgaagataccagcaacttttatcatcccaattttcccttctccgggaaaattagagttcgcggccacgacgacagcttcctgaaaaaccatctggtgtttttggtgatttacggcacaaatggtacattcaatcagacgctggttactgataacaacggactggctcctttcacactcgaaacgtccggctggaatggcaccgatgtgtccctagagggcaaatttcaaatggaggacttagtctataatcctgagcaggtcccacgctattaccagaatgcctacctccacttgcgccctttctattccacaacgcgaagttttctaggaattcacaggttaaatggaccactgaagtgtgggcaaccccaggaagtgcttgtggactactatattgaccccgccgacgcgtctcccgatcaggagatctcattctcgtactatctgattggcaagggctccctcgttatggagggccagaaacatttgaattctaagaaaaaaggactgaaggcctcattttccctgtcattgaccttcacatcgcggctagccccagatcccagccttgtgatctacgctatctttccaagcggtggcgtggtggctgataaaattcagtttagtgtggagatgtgcttcgataatcaggtcagcttgggtttctccccctcacagcagcttccgggcgctgaggttgagctgcagttacaagccgcaccagggtccttatgcgccctgagagcagttgacgagagcgttctgctgcttcgccccgatagggaattgtcgaacaggagcgtgtacggcatgttcccattctggtatggacattacccctaccaggtcgctgaatacgaccagtgcccagtcagcggcccgtgggatttcccgcagccactgattgatcccatgcctcagggacacagctcgcagaggagcattatttggcgtccgtccttttcagagggcacggatctattcagcttcttcagagatgtcggcctcaagattctgtccaacgccaagatcaaaaagcctgtggattgctctcaccggtctcctgagtactcaacagccatgggggccgggggaggtcacccagaggcctttgagtcaagcacacccctgcaccaggccgaggactcccaggtgcggcagtacttcccagaaacctggctgtgggatttgttcccaatcggaaacagtggcaaggaggcagtacatgtaacagtaccagacgcgattacagagtggaaggctatgtcattctgcaccagccagagtagaggcttcgggctttccccaacggtaggattgaccgcgttcaagcccttctttgtagatctgacgctgccatacagtgtggtgcgaggtgagagttttaggctgacggccacaatatttaattatctgaaggactgtatacgcgttcagacagatcttgccaaatcccatgaataccagttagaatcttgggcagactcacagaccagctcttgtctgtgtgccgacgacgccaaaacccaccattggaatatcacagcagtcaagctcggccacatcaacttcactatcagcactaagatactggactctaatgagccatgcggaggccagaagggattcgtgccacaaaagggcaggagtgacaccttgattaaacctgtgctggtcaaaccagagggagtactggtcgagaaaactcacagctccctcctgtgccccaagggtaaggtggccagcgaatcagtgtctctggaactgccagtagacatcgtgcctgacagcacaaaagcatacgtcaccgtcttaggggatattatgggcacagccttacagaacttagacgggcttgttcaaatgccctctggttgcggcgaacagaatatggtcttgtttgcccccataatttatgttttacagtatcttgaaaaagctgggctgttaacagaggagatccggtcccgcgctgtgggctttcttgagatcggatatcagaaagagctaatgtataagcatagcaacgggagctactctgcttttggagaacgggatggaaatggaaatacatggctgactgcattcgtaactaagtgctttggccaggctcagaagtttatttttatcgacccaaagaatattcaggatgcactgaaatggatggctgggaaccagctgccctccgggtgctacgctaacgtgggcaatcttctgcacactgccatgaagggcggggtggatgatgaggtgagtctcaccgcttacgtaacggccgcattactggagatggggaaggatgtcgacgaccctatggtctcccaaggcctccgatgtcttaaaaacagcgctacctcaactactaatctctacacccaagcccttctcgcctatatcttcagcctggctggggaaatggacatcagaaacattctattaaaacagcttgaccagcaggccatcatttctggggagagcatctactggagccaaaaaccaaccccttctagcaacgcctccccatggtctgaacccgccgccgtcgacgttgagctcactgcgtacgccctgctggcccagctgactaagcctagcctaacacagaaggagattgccaaagcaacctccatcgtggcctggctggctaaacaacataacgcttacgggggtttcagcagcacccaggatactgttgtggccttgcaagcactcgcaaagtacgccactacagcatatatgccctctgaggaaataaacttagtcgtcaaatcaactgaaaactttcaaaggacctttaatattcagtcagtgaatcggctcgtctttcagcaggatactctccccaacgtacctggcatgtatacattggaagctagcggacagggatgcgtctacgtgcagactgtgctgaggtacaatatcctgcctcctaccaacatgaagacattctccttatccgttgagatcggcaaggcaaggtgtgaacaacccacaagccctcgtagcttaacgctgacaattcatacttcatacgttggatcaagatccagcagcaacatggcaatcgttgaagttaaaatgttaagtgggttctctcccatggagggcacaaaccagctgctcctccagcagccactcgtgaagaaggtcgaatttggcacggatactcttaatatttatctcgatgaactgataaaaaatacccagacatacacatttaccattagccagtccgtactcgttactaatctgaagcccgcgaccatcaaagtctatgactactatttgccggacgagcaggccacaatccagtatagcgatccctgcgaatag

SEQ ID NO: 239455 - DNA, 3015 bp, Artificial Sequence
  derived and/or modified sequence
tcctttctcggtatccataggttgaacggcccattaaaatgtggacagccgcaagaggtcctggtcgattactatatagacccggccgatgcctcgcccgatcaggagattagcttttcctactatcttattgggaagggtagccttgttatggaagggcagaagcatctgaattccaagaagaagggactcaaggccagttttagtctctctctcacattcacaagccggttagcacctgaccccagcctggtgatttatgcaatcttcccaagcggaggagtggtggcagacaaaatacagttttcggtcgaaatgtgttttgataaccaggtctcactgggattttctccaagccagcagctccctggggcagaggtcgaattacaactgcaagccgcacctggctccttgtgtgccctgcgagccgttgatgaaagcgttctgttgttgcggcctgaccgagagctgtccaaccgctctgtgtacgggatgtttccgttctggtacggacattacccgtaccaggtggcagagtatgatcagtgcccggtgtctggaccatgggatttcccccagccactgatcgatcccatgccacaaggccattccagccaacgttccattatttggcgccccagcttcagcgagggcacagatcttttctcttttttcagagacgtaggcctgaaaatcctcagcaacgcgaaaatcaaaaagccagtagactgctcccatcgctctcccgaatattcaacagcaatgggggccgggggggggcatccagaggcattcgaatcttctacgcctctgcaccaagctgaagatagtcaggtgcgacaatatttcccagagacttggctttgggatctgttcccgattggaaacagcggcaaggaagctgtccacgtcactgttccagacgctatcacagaatggaaagccatgtcattctgcacctcgcagagccggggttttggattgtcccccacagtgggcctgaccgctttcaagcccttctttgtggatctgacactgccctattctgtcgtgcgtggcgaatctttccgcctgactgccactatttttaattaccttaaagattgtatcagagttcagaccgatctggccaagagtcatgagtaccagctcgagtcctgggccgactcacaaacatcatcctgtctttgtgccgatgacgccaagacccatcactggaacattaccgcagttaaactaggccatataaatttcactatttcaacaaagattctggattctaacgagccttgtgggggacaaaagggttttgtcccccagaaaggccgatcagacaccctgatcaagcctgtattggtgaaacccgagggcgtgcttgtggagaaaacacattcttccttgctatgccccaaaggcaaggtagcttcagagagcgtgagccttgagctccctgtcgacatcgttccagactccactaaagcctatgtgaccgtactgggggacatcatgggcacggcgctgcagaacctggacggactcgtgcagatgccaagtgggtgcggcgaacagaacatggtccttttcgcacctatcatctatgttttgcaatatctcgagaaggccggcctgctcaccgaagaaatccggtcacgggccgtgggattccttgagatcggataccagaaagaactgatgtacaagcatagtaacgggtcttactcagcctttggtgagagggatggcaacggaaacacatggctaactgcctttgtaacaaagtgttttggccaagcccagaagttcatttttatcgatcccaagaacatccaggatgcccttaaatggatggcagggaaccagctgcccagcggatgctacgccaacgtgggcaatctgctgcatacagcaatgaagggaggggtggacgatgaagtctctttgaccgcctacgtaaccgctgccctgctggaaatgggtaaggatgtggacgacccgatggtgagtcagggtctgcgttgtctgaagaatagtgctaccagcacaactaacttatatacccaggcactcctggcctacatctttagtctagccggcgagatggacatccgtaacattctcctaaagcaattagaccagcaggccattatttcaggggaaagtatctattggagtcagaagccaacgcccagctcgaacgcttcaccgtggtccgaacctgcagctgtggatgtggaattaacagcctatgcgctgctcgcccagctgaccaaaccgtctctgactcagaaagaaatcgcaaaagccacctctattgttgcatggctggccaaacaacacaatgcctacggagggttctcctctactcaggatacggtcgtggctcttcaagccctcgcgaagtacgcaaccacagcctacatgccatctgaggagatcaaccttgtggttaagagcacagagaactttcagaggacatttaacatccagtcggtaaacagactcgtattccagcaggacacactccccaacgtaccaggaatgtataccttggaggcttcaggccaagggtgcgtttatgtccagaccgtgttacgatataacattctgccacctactaatatgaagactttcagtctgtctgtggaaattggcaaagcccggtgcgagcaaccaaccagtcctagaagccttactttgaccatccatacttcctatgtgggatcccgaagcagctctaatatggctatagttgaagttaagatgctttcgggtttctccccaatggaaggaactaatcagctcctgctgcagcagccgctcgtgaagaaggtcgaatttggtactgatacattaaatatctacctggacgagctgatcaagaatacacaaacttacacatttacaatctctcagtctgtgttggtcacgaacctgaagcctgcaaccattaaggtttatgactactatctgcctgatgagcaggcaactattcaatattcggacccctgcgaatag

SEQ ID NO: 239456 - DNA, 4365 bp, Artificial Sequence
  derived and/or modified sequence
atgtgggcccagctgctgctgggcatgctggccctgagccctgccatcgccgaggagctgcccaactacctggtgaccctgcctgcccggctgaacttccccagcgtgcagaaggtgtgcctggacctgagccctggctacagtgatgtgaagttcaccgtgaccctggagaccaaggacaagacccagaagctgctggagtacagcggcctgaagaagaggcacctgcactgcatctccttcctggtgcccccacctgctgggggcacagaggaggtggccaccatccgggtgtctggagtgggcaacaacatcagctttgaggagaagaagaaggtgctgatccagaggcagggcaatggcacctttgtgcagacagacaagcccctgtacaccccaggccagcaggtgtacttcagaattgtgaccatggacagcaactttgtgcctgtgaatgacaagtacagcatggtggagctgcaggaccccaacagcaaccgcatcgcccagtggctggaggtggtgcctgagcagggcatcgtggacctgtccttccagctggcccctgaggccatgctgggcacctacacagtggccgtggccgagggcaagaccttcggcaccttctctgtggaggagtatgtgctgcccaagttcaaggtggaggtggtggagcccaaggagctgagcacagtgcaggagagcttcctggtgaagatctgctgccgctacacctacggcaagcccatgctgggcgctgtgcaggtgtctgtgtgccagaaggccaacacctactggtaccgggaggtggagcgggagcagctgcctgacaagtgcaggaacctgagcggccagacagacaagacaggctgcttcagcgcccctgtggacatggccacctttgacctgattggctacgcctacagccaccagatcaacatcgtggccaccgtggtggaggagggcactggagtggaggccaatgccacccagaacatctacatcagcccccagatgggctccatgacctttgaggacaccagcaacttctaccaccccaacttccccttcagcggcaagatccgggtgcggggccatgatgacagcttcctgaagaaccacctggtgttcctggtgatctacggcaccaacggcaccttcaaccagaccctggtgacagacaacaacggcctggcccccttcaccctggagaccagcggctggaatggaacagatgtgtccctggagggcaagttccagatggaggacctggtgtacaaccctgagcaggtgccccgctactaccagaatgcctacctgcacctgcggcccttctacagcaccaccaggagcttcctgggcatccaccggctgaatggccccctgaagtgtggccagccccaggaggtgctggtggactactacatcgaccctgcagatgccagcccagaccaggagatctccttctcctactacctgattggcaagggcagcctggtgatggagggccagaagcacctgaacagcaagaagaagggcctgaaggccagcttcagcctgagcctgaccttcaccagccggctggccccagaccccagcctggtgatctatgccatcttccccagcggcggcgtggtggccgacaagatccagttctctgtggagatgtgctttgacaaccaggtgtccctgggcttcagccccagccagcagctgcctggagctgaggtggagctgcagctgcaggccgcccctggcagcctgtgtgccctgcgggctgtggatgaatctgtgctgctgctgcggccagaccgggagctgagcaacagatctgtgtatggcatgttccccttctggtacggccactacccctaccaggtggccgagtatgaccagtgccctgtgtctggcccctgggacttcccccagcccctgattgaccccatgccccagggccacagcagccagaggagcatcatctggaggcccagcttcagcgagggcacagacctcttctccttcttcagagatgtgggcctgaagatcctgagcaatgccaagatcaagaagcctgtggactgcagccacaggagccctgagtacagcacagccatgggcgccggcggcggccaccctgaggcctttgagagcagcacccccctgcaccaggccgaggacagccaggtgcggcagtacttccctgagacctggctgtgggacctcttccccatcggcaacagcggcaaggaggccgtgcacgtgacagtgcctgatgccatcacagagtggaaggccatgtccttctgcaccagccagagccggggcttcggcctgagccccaccgtgggcctgacagccttcaagcccttctttgtggacctgaccctgccctacagcgtggtgcggggggagagcttccggctgacagccaccatcttcaactacctgaaggactgcatccgggtgcagacagacctggccaagagccatgagtaccagctggagagctgggccgacagccagaccagcagctgcctgtgtgctgatgatgccaagacccaccactggaacatcacagctgtgaagctgggccacatcaacttcaccatcagcaccaagatcctggacagcaatgagccctgtggcggccagaagggctttgtgccccagaagggccgcagtgacaccctcatcaagcctgtgctggtgaagccagagggcgtgctggtggagaagacccacagcagcctgctgtgccccaagggcaaggtggccagcgagagcgtgtccctggagctgcctgtggacatcgtgcctgacagcaccaaggcctacgtgacagtgctgggggacatcatgggcacagccctgcagaacctggatggcctggtgcagatgcccagcggctgtggggagcagaacatggtgctgtttgcccccatcatctacgtgctgcagtacctggagaaggccggcctgctgacagaggagatccgcagcagagctgtgggcttcctggagatcggctaccagaaggagctgatgtacaagcacagcaatggcagctacagcgccttcggggagagagatggaaatggaaacacctggctgacagcctttgtgaccaagtgcttcggccaggcccagaagttcatcttcatcgaccccaagaacatccaggatgccctgaagtggatggccggcaaccagctgcccagcggctgctacgccaacgtgggcaacctgctgcacacagccatgaagggcggcgtggatgatgaggtgtccctgacagcctacgtgacagctgccctgctggagatgggcaaggatgtggatgaccccatggtgtcccagggcctgcgctgcctgaagaacagcgccaccagcaccaccaacctgtacacccaggccctgctggcctacatcttcagcctggccggggagatggacatccggaacatcctgctgaagcagctggaccagcaggccatcatctctggagagagcatctactggagccagaagcccacccccagcagcaatgccagcccctggagcgagcctgctgctgtggatgtggagctgacagcctatgccctgctggcccagctgaccaagcccagcctgacccagaaggagatcgccaaggccaccagcatcgtggcctggctggccaagcagcacaatgcctacggcggcttcagcagcacccaggacacagtggtggccctgcaggccctggccaagtatgccaccacagcctacatgcccagcgaggagatcaacctggtggtgaagagcacagagaacttccagaggaccttcaacatccagagcgtgaaccggctggtgttccagcaggacaccctgcccaacgtgcccggcatgtacaccctggaggccagcggccagggctgtgtgtatgtgcagacagtgctgcgctacaacatcctgccccccaccaacatgaagaccttcagcctgtctgtggagatcggcaaggcccgctgtgagcagcccaccagccccaggagcctgaccctgaccatccacaccagctatgtgggcagccgcagcagcagcaacatggccatcgtggaggtgaagatgctgagcggcttcagccccatggagggcaccaaccagctgctgctgcagcagcccctggtgaagaaggtggagtttggaacagacaccctgaacatctacctggatgagctgatcaagaacacccagacctacaccttcaccatcagccagagcgtgctggtgaccaacctgaagccagccaccatcaaggtgtatgactactacctgcctgatgagcaggccaccatccagtacagcgacccctgtgagtag

SEQ ID NO: 239457 - DNA, 4365 bp, Artificial Sequence
  derived and/or modified sequence
atgtgggcccagctgctgctgggcatgctggccctgagccctgccatcgccgaggagctgcccaactacctggtgaccctgcctgcccggctgaacttccccagcgtgcagaaggtgtgcctggacctgagccctggctacagtgatgtgaagttcaccgtgaccctggagaccaaggacaagacccagaagctgctggagtacagcggcctgaagaagaggcacctgcactgcatctccttcctggtgcccccacctgctgggggcacagaggaggtggccaccatccgggtgtctggagtgggcaacaacatcagctttgaggagaagaagaaggtgctgatccagaggcagggcaatggcacctttgtgcagacagacaagcccctgtacaccccaggccagcaggtgtacttcagaattgtgaccatggacagcaactttgtgcctgtgaatgacaaggtgtcctgggaggagggccaggaccccaacagcaaccgcatcgcccagtggctggaggtggtgcctgagcagggcatcgtggacctgtccttccagctggcccctgaggccatgctgggcacctacacagtggccgtggccgagggcaagaccttcggcaccttctctgtggaggagtatgtgctgcccaagttcaaggtggaggtggtggagcccaaggagctgagcacagtgcaggagagcttcctggtgaagatctgctgccgctacacctacggcaagcccatgctgggcgctgtgcaggtgtctgtgtgccagaaggccaacacctactggtaccgggaggtggagcgggagcagctgcctgacaagtgcaggaacctgagcggccagacagacaagacaggctgcttcagcgcccctgtggacatggccacctttgacctgattggctacgcctacagccaccagatcaacatcgtggccaccgtggtggaggagggcactggagtggaggccaatgccacccagaacatctacatcagcccccagatgggctccatgacctttgaggacaccagcaacttctaccaccccaacttccccttcagcggcaagatccgggtgcggggccatgatgacagcttcctgaagaaccacctggtgttcctggtgatctacggcaccaacggcaccttcaaccagaccctggtgacagacaacaacggcctggcccccttcaccctggagaccagcggctggaatggaacagatgtgtccctggagggcaagttccagatggaggacctggtgtacaaccctgagcaggtgccccgctactaccagaatgcctacctgcacctgcggcccttctacagcaccaccaggagcttcctgggcatccaccggctgaatggccccctgaagtgtggccagccccaggaggtgctggtggactactacatcgaccctgcagatgccagcccagaccaggagatctccttctcctactacctgattggcaagggcagcctggtgatggagggccagaagcacctgaacagcaagaagaagggcctgaaggccagcttcagcctgagcctgaccttcaccagccggctggccccagaccccagcctggtgatctatgccatcttccccagcggcggcgtggtggccgacaagatccagttctctgtggagatgtgctttgacaaccaggtgtccctgggcttcagccccagccagcagctgcctggagctgaggtggagctgcagctgcaggccgcccctggcagcctgtgtgccctgcgggctgtggatgaatctgtgctgctgctgcggccagaccgggagctgagcaacagatctgtgtatggcatgttccccttctggtacggccactacccctaccaggtggccgagtatgaccagtgccctgtgtctggcccctgggacttcccccagcccctgattgaccccatgccccagggccacagcagccagaggagcatcatctggaggcccagcttcagcgagggcacagacctcttctccttcttcagagatgtgggcctgaagatcctgagcaatgccaagatcaagaagcctgtggactgcagccacaggagccctgagtacagcacagccatgggcgccggcggcggccaccctgaggcctttgagagcagcacccccctgcaccaggccgaggacagccaggtgcggcagtacttccctgagacctggctgtgggacctcttccccatcggcaacagcggcaaggaggccgtgcacgtgacagtgcctgatgccatcacagagtggaaggccatgtccttctgcaccagccagagccggggcttcggcctgagccccaccgtgggcctgacagccttcaagcccttctttgtggacctgaccctgccctacagcgtggtgcggggggagagcttccggctgacagccaccatcttcaactacctgaaggactgcatccgggtgcagacagacctggccaagagccatgagtaccagctggagagctgggccgacagccagaccagcagctgcctgtgtgctgatgatgccaagacccaccactggaacatcacagctgtgaagctgggccacatcaacttcaccatcagcaccaagatcctggacagcaatgagccctgtggcggccagaagggctttgtgccccagaagggccgcagtgacaccctcatcaagcctgtgctggtgaagccagagggcgtgctggtggagaagacccacagcagcctgctgtgccccaagggcaaggtggccagcgagagcgtgtccctggagctgcctgtggacatcgtgcctgacagcaccaaggcctacgtgacagtgctgggggacatcatgggcacagccctgcagaacctggatggcctggtgcagatgcccagcggctgtggggagcagaacatggtgctgtttgcccccatcatctacgtgctgcagtacctggagaaggccggcctgctgacagaggagatccgcagcagagctgtgggcttcctggagatcggctaccagaaggagctgatgtacaagcacagcaatggcagctacagcgccttcggggagagagatggaaatggaaacacctggctgacagcctttgtgaccaagtgcttcggccaggcccagaagttcatcttcatcgaccccaagaacatccaggatgccctgaagtggatggccggcaaccagctgcccagcggctgctacgccaacgtgggcaacctgctgcacacagccatgaagggcggcgtggatgatgaggtgtccctgacagcctacgtgacagctgccctgctggagatgggcaaggatgtggatgaccccatggtgtcccagggcctgcgctgcctgaagaacagcgccaccagcaccaccaacctgtacacccaggccctgctggcctacatcttcagcctggccggggagatggacatccggaacatcctgctgaagcagctggaccagcaggccatcatctctggagagagcatctactggagccagaagcccacccccagcagcaatgccagcccctggagcgagcctgctgctgtggatgtggagctgacagcctatgccctgctggcccagctgaccaagcccagcctgacccagaaggagatcgccaaggccaccagcatcgtggcctggctggccaagcagcacaatgcctacggcggcttcagcagcacccaggacacagtggtggccctgcaggccctggccaagtatgccaccacagcctacatgcccagcgaggagatcaacctggtggtgaagagcacagagaacttccagaggaccttcaacatccagagcgtgaaccggctggtgttccagcaggacaccctgcccaacgtgcccggcatgtacaccctggaggccagcggccagggctgtgtgtatgtgcagacagtgctgcgctacaacatcctgccccccaccaacatgaagaccttcagcctgtctgtggagatcggcaaggcccgctgtgagcagcccaccagccccaggagcctgaccctgaccatccacaccagctatgtgggcagccgcagcagcagcaacatggccatcgtggaggtgaagatgctgagcggcttcagccccatggagggcaccaaccagctgctgctgcagcagcccctggtgaagaaggtggagtttggaacagacaccctgaacatctacctggatgagctgatcaagaacacccagacctacaccttcaccatcagccagagcgtgctggtgaccaacctgaagccagccaccatcaaggtgtatgactactacctgcctgatgagcaggccaccatccagtacagcgacccctgtgagtag

SEQ ID NO: 239458 - DNA, 3015 bp, Artificial Sequence
  derived and/or modified sequence
tccttcctgggcatccaccggctgaatggccccctgaagtgtggccagccccaggaggtgctggtggactactacatcgaccctgcagatgccagcccagaccaggagatctccttctcctactacctgattggcaagggcagcctggtgatggagggccagaagcacctgaacagcaagaagaagggcctgaaggccagcttcagcctgagcctgaccttcaccagccggctggccccagaccccagcctggtgatctatgccatcttccccagcggcggcgtggtggccgacaagatccagttctctgtggagatgtgctttgacaaccaggtgtccctgggcttcagccccagccagcagctgcctggagctgaggtggagctgcagctgcaggccgcccctggcagcctgtgtgccctgcgggctgtggatgaatctgtgctgctgctgcggccagaccgggagctgagcaacagatctgtgtatggcatgttccccttctggtacggccactacccctaccaggtggccgagtatgaccagtgccctgtgtctggcccctgggacttcccccagcccctgattgaccccatgccccagggccacagcagccagaggagcatcatctggaggcccagcttcagcgagggcacagacctcttctccttcttcagagatgtgggcctgaagatcctgagcaatgccaagatcaagaagcctgtggactgcagccacaggagccctgagtacagcacagccatgggcgccggcggcggccaccctgaggcctttgagagcagcacccccctgcaccaggccgaggacagccaggtgcggcagtacttccctgagacctggctgtgggacctcttccccatcggcaacagcggcaaggaggccgtgcacgtgacagtgcctgatgccatcacagagtggaaggccatgtccttctgcaccagccagagccggggcttcggcctgagccccaccgtgggcctgacagccttcaagcccttctttgtggacctgaccctgccctacagcgtggtgcggggggagagcttccggctgacagccaccatcttcaactacctgaaggactgcatccgggtgcagacagacctggccaagagccatgagtaccagctggagagctgggccgacagccagaccagcagctgcctgtgtgctgatgatgccaagacccaccactggaacatcacagctgtgaagctgggccacatcaacttcaccatcagcaccaagatcctggacagcaatgagccctgtggcggccagaagggctttgtgccccagaagggccgcagtgacaccctcatcaagcctgtgctggtgaagccagagggcgtgctggtggagaagacccacagcagcctgctgtgccccaagggcaaggtggccagcgagagcgtgtccctggagctgcctgtggacatcgtgcctgacagcaccaaggcctacgtgacagtgctgggggacatcatgggcacagccctgcagaacctggatggcctggtgcagatgcccagcggctgtggggagcagaacatggtgctgtttgcccccatcatctacgtgctgcagtacctggagaaggccggcctgctgacagaggagatccgcagcagagctgtgggcttcctggagatcggctaccagaaggagctgatgtacaagcacagcaatggcagctacagcgccttcggggagagagatggaaatggaaacacctggctgacagcctttgtgaccaagtgcttcggccaggcccagaagttcatcttcatcgaccccaagaacatccaggatgccctgaagtggatggccggcaaccagctgcccagcggctgctacgccaacgtgggcaacctgctgcacacagccatgaagggcggcgtggatgatgaggtgtccctgacagcctacgtgacagctgccctgctggagatgggcaaggatgtggatgaccccatggtgtcccagggcctgcgctgcctgaagaacagcgccaccagcaccaccaacctgtacacccaggccctgctggcctacatcttcagcctggccggggagatggacatccggaacatcctgctgaagcagctggaccagcaggccatcatctctggagagagcatctactggagccagaagcccacccccagcagcaatgccagcccctggagcgagcctgctgctgtggatgtggagctgacagcctatgccctgctggcccagctgaccaagcccagcctgacccagaaggagatcgccaaggccaccagcatcgtggcctggctggccaagcagcacaatgcctacggcggcttcagcagcacccaggacacagtggtggccctgcaggccctggccaagtatgccaccacagcctacatgcccagcgaggagatcaacctggtggtgaagagcacagagaacttccagaggaccttcaacatccagagcgtgaaccggctggtgttccagcaggacaccctgcccaacgtgcccggcatgtacaccctggaggccagcggccagggctgtgtgtatgtgcagacagtgctgcgctacaacatcctgccccccaccaacatgaagaccttcagcctgtctgtggagatcggcaaggcccgctgtgagcagcccaccagccccaggagcctgaccctgaccatccacaccagctatgtgggcagccgcagcagcagcaacatggccatcgtggaggtgaagatgctgagcggcttcagccccatggagggcaccaaccagctgctgctgcagcagcccctggtgaagaaggtggagtttggaacagacaccctgaacatctacctggatgagctgatcaagaacacccagacctacaccttcaccatcagccagagcgtgctggtgaccaacctgaagccagccaccatcaaggtgtatgactactacctgcctgatgagcaggccaccatccagtacagcgacccctgtgagtag

SEQ ID NO: 239459 - DNA, 5274 bp, Artificial Sequence
  derived and/or modified sequence
gtccaccacctaacctggtggttacagaaggaggaacacagtcctcctgtgttccaggtgccaggaggtgactgactatagcatcagtcatcactgcacaccctacctggaattagtatataaagctacgcggagcgatctctgcccctgaccctggaaaaatctgtctcacccacaaagatgtgggctcagctccttctaggaatgttggccctatcaccagccattgcagaagaacttccaaactacctggtgacattaccagcccggctaaatttcccctccgttcagaaggtttgtttggacctgagccctgggtacagtgatgttaaattcacggttactctggagaccaaggacaagacccagaagttgctagaatactctggactgaagaagaggcacttacattgtatctcctttcttgtaccacctcctgctggtggcacagaagaagtggccacaatccgggtgtcgggagttggaaataacatcagctttgaggagaagaaaaaggttctaattcagaggcaggggaacggcacctttgtacagactgacaaacctctctacaccccagggcagcaagtgtatttccgcattgtcaccatggatagcaacttcgttccagtgaatgacaagtactccatggtggaactacaggatccaaatagcaacaggattgcacagtggctggaagtggtacctgagcaaggcattgtagacctgtccttccaactggcaccagaggcaatgctgggcacctacactgtggcagtggctgagggcaagacctttggtactttcagtgtggaggaatatgtgctgccgaagtttaaggtggaagtggtggaacccaaggagttatcaacggtgcaggaatctttcttagtaaaaatttgttgtaggtacacctatggaaagcccatgctaggggcagtgcaggtatctgtgtgtcagaaggcaaatacttactggtatcgagaggtggaacgggaacagcttcctgacaaatgcaggaacctctctggacagactgacaaaacaggatgtttctcagcacctgtggacatggccacctttgacctcattggatatgcgtacagccatcaaatcaatattgtggctactgttgtggaggaagggacaggtgtggaggccaatgccactcagaatatctacatttctccacaaatgggatcaatgacctttgaagacaccagcaatttttaccatccaaatttccccttcagtgggaagataagagttaggggccatgatgactccttcctcaagaaccatctagtgtttctggtgatttatggcacaaatggaaccttcaaccagaccctggttactgataacaatggcctagctccctttaccttggagacatccggttggaatgggacagacgtttctctggagggaaagtttcaaatggaagacttagtatataatccggaacaagtgccacgttactaccaaaatgcctacctgcacctgcgacccttctacagcacaacccgcagcttccttggcatccaccggctaaacggccccttgaaatgtggccagccccaggaagtgctggtggattattacatcgacccggccgatgcaagccctgaccaagagatcagcttctcctactatttaatagggaaaggaagtttggtgatggaggggcagaaacacctgaactctaagaagaaaggactgaaagcctccttctctctctcactgaccttcacttcgagactggcccctgatccttccctggtgatctatgccatttttcccagtggaggtgttgtagctgacaaaattcagttctcagtcgagatgtgctttgacaatcaggtttcccttggcttctccccctcccagcagcttccaggagcagaagtggagctgcagctgcaggcagctcccggatccctgtgtgcgctccgggcggtggatgagagtgtcttactgcttaggccagacagagagctgagcaaccgctctgtctatgggatgtttccattctggtatggtcactacccctatcaagtggctgagtatgatcagtgtccagtgtctggcccatgggactttcctcagcccctcattgacccaatgccccaagggcattcgagccagcgttccattatctggaggccctcgttctctgaaggcacggaccttttcagctttttccgggacgtgggcctgaaaatactgtccaatgccaaaatcaagaagccagtagattgcagtcacagatctccagaatacagcactgctatgggtgcaggcggtggtcatccagaggcttttgagtcatcaactcctttacatcaagcagaggattctcaggtccgccagtacttcccagagacctggctctgggatctgtttcctattggtaactcggggaaggaggcggtccacgtcacagttcctgacgccatcaccgagtggaaggcgatgagtttctgcacttcccagtcaagaggcttcgggctttcacccactgttggactaactgctttcaagccgttctttgttgacctgactctcccttactcagtagtccgtggggaatcctttcgtcttactgccaccatcttcaattacctaaaggattgcatcagggttcagactgacctggctaaatcgcatgagtaccagctagaatcatgggcagattctcagacctccagttgtctctgtgctgatgacgcaaaaacccaccactggaacatcacagctgtcaaattgggtcacattaactttactattagtacaaagattctggacagcaatgaaccatgtgggggccagaaggggtttgttccccaaaagggccgaagtgacacgctcatcaagccagttctcgtcaaacctgagggagtcctggtggagaagacacacagctcattgctgtgcccaaaaggaaaggtggcatctgaatctgtctccctggagctcccagtggacattgttcctgactcgaccaaggcttatgttacggttctgggagacattatgggcacagccctgcagaacctggatggtctggtgcagatgcccagtggctgtggcgagcagaacatggtcttgtttgctcccatcatctatgtcttgcagtacctggagaaggcagggctgctgacggaggagatcaggtctcgggcagtgggtttcctggaaatagggtaccagaaggagctgatgtacaaacacagcaatggctcatacagtgcctttggggagcgagatggaaatggaaacacatggctgacagcgtttgtcacaaaatgctttggccaagctcagaaattcatcttcattgatcccaagaacatccaggatgctctcaagtggatggcaggaaaccagctccccagtggctgctatgccaacgtgggaaatctccttcacacagctatgaagggtggtgttgatgatgaggtctccttgactgcgtatgtcacagctgcattgctggagatgggaaaggatgtagatgacccaatggtgagtcagggtctacggtgtctcaagaattcggccacctccacgaccaacctctacacacaggccctgttggcttacattttctccctggctggggaaatggacatcagaaacattctccttaaacagttagatcaacaggctatcatctcaggagaatccatttactggagccagaaacctactccatcatcgaacgccagcccttggtctgagcctgcggctgtagatgtggaactcacagcatatgcattgttggcccagcttaccaagcccagcctgactcaaaaggagatagcgaaggccactagcatagtggcttggttggccaagcaacacaatgcatatgggggcttctcttctactcaggatactgtagttgctctccaagctcttgccaaatatgccactaccgcctacatgccatctgaggagatcaacctggttgtaaaatccactgagaatttccagcgcacattcaacatacagtcagttaacagattggtatttcagcaggataccctgcccaatgtccctggaatgtacacgttggaggcctcaggccagggctgtgtctatgtgcagacggtgttgagatacaatattctccctcccacaaatatgaagacctttagtcttagtgtggaaataggaaaagctagatgtgagcaaccgacttcacctcgatccttgactctcactattcacaccagttatgtggggagccgtagctcttccaatatggctattgtggaagtgaagatgctatctgggttcagtcccatggagggcaccaatcagttacttctccagcaacccctggtgaagaaggttgaatttggaactgacacacttaacatttacttggatgagctcattaagaacactcagacttacaccttcaccatcagccaaagtgtgctggtcaccaacttgaaaccagcaaccatcaaggtctatgactactacctaccagatgaacaggcaacaattcagtattctgatccctgtgaatgaggataggagctggaaactcaattagtcctctgtgacatttactggagggtggaacattcttctgtcgcttgaagcagaactcattcaatcaaataatttaatttctctgactagtatatgggtaacaaatgaatatgtctgaacctcagctataatactttctactacctttgcaaggagatgggataggaacaatcactcagaggaggcgttgcatgggcagggtcatagggggaagaaaggtggtttagctgttttatttagccattcagggggctctccagagaggagacggtggtagagggtgaactagagaagataagaatgtcttcctaggccggatgcggtggctcacgcctgtaatcccagcactttgggattgcgaggtgggcggatcacttgaggtcaggagttcaagaccagcctggccaacatggtaaaacccgtctctactaacaatacaaagattagcctggtgtggtggcacgggcctgtaatcgcagccccttggaaggccaaggcaggagaatcgcctcaacactggaggtggaggttgcagtgagctgagattgtgccactgcactccagcctgggcaatgaggcaagaccctgtctcaaaaaataataaataataataataataatgtttttctagagtttcagtctaagggaaaatgtgatttagggctttggaaattggctaaaaaaataaaaatggaaaagaaaatc

SEQ ID NO: 239460 - DNA, 5190 bp, Artificial Sequence
  derived and/or modified sequence
atcagtcatcactgcacaccctacctggaattagtatataaagctacgcggagcgatctctgcccctgaccctggaaaaatctgtctcacccacaaagatgtgggctcagctccttctaggaatgttggccctatcaccagccattgcagaagaacttccaaactacctggtgacattaccagcccggctaaatttcccctccgttcagaaggtttgtttggacctgagccctgggtacagtgatgttaaattcacggttactctggagaccaaggacaagacccagaagttgctagaatactctggactgaagaagaggcacttacattgtatctcctttcttgtaccacctcctgctggtggcacagaagaagtggccacaatccgggtgtcgggagttggaaataacatcagctttgaggagaagaaaaaggttctaattcagaggcaggggaacggcacctttgtacagactgacaaacctctctacaccccagggcagcaagtgtatttccgcattgtcaccatggatagcaacttcgttccagtgaatgacaaggtgagttgggaggagggacaggatccaaatagcaacaggattgcacagtggctggaagtggtacctgagcaaggcattgtagacctgtccttccaactggcaccagaggcaatgctgggcacctacactgtggcagtggctgagggcaagacctttggtactttcagtgtggaggaatatgtgctgccgaagtttaaggtggaagtggtggaacccaaggagttatcaacggtgcaggaatctttcttagtaaaaatttgttgtaggtacacctatggaaagcccatgctaggggcagtgcaggtatctgtgtgtcagaaggcaaatacttactggtatcgagaggtggaacgggaacagcttcctgacaaatgcaggaacctctctggacagactgacaaaacaggatgtttctcagcacctgtggacatggccacctttgacctcattggatatgcgtacagccatcaaatcaatattgtggctactgttgtggaggaagggacaggtgtggaggccaatgccactcagaatatctacatttctccacaaatgggatcaatgacctttgaagacaccagcaatttttaccatccaaatttccccttcagtgggaagataagagttaggggccatgatgactccttcctcaagaaccatctagtgtttctggtgatttatggcacaaatggaaccttcaaccagaccctggttactgataacaatggcctagctccctttaccttggagacatccggttggaatgggacagacgtttctctggagggaaagtttcaaatggaagacttagtatataatccggaacaagtgccacgttactaccaaaatgcctacctgcacctgcgacccttctacagcacaacccgcagcttccttggcatccaccggctaaacggccccttgaaatgtggccagccccaggaagtgctggtggattattacatcgacccggccgatgcaagccctgaccaagagatcagcttctcctactatttaatagggaaaggaagtttggtgatggaggggcagaaacacctgaactctaagaagaaaggactgaaagcctccttctctctctcactgaccttcacttcgagactggcccctgatccttccctggtgatctatgccatttttcccagtggaggtgttgtagctgacaaaattcagttctcagtcgagatgtgctttgacaatcaggtttcccttggcttctccccctcccagcagcttccaggagcagaagtggagctgcagctgcaggcagctcccggatccctgtgtgcgctccgggcggtggatgagagtgtcttactgcttaggccagacagagagctgagcaaccgctctgtctatgggatgtttccattctggtatggtcactacccctatcaagtggctgagtatgatcagtgtccagtgtctggcccatgggactttcctcagcccctcattgacccaatgccccaagggcattcgagccagcgttccattatctggaggccctcgttctctgaaggcacggaccttttcagctttttccgggacgtgggcctgaaaatactgtccaatgccaaaatcaagaagccagtagattgcagtcacagatctccagaatacagcactgctatgggtgcaggcggtggtcatccagaggcttttgagtcatcaactcctttacatcaagcagaggattctcaggtccgccagtacttcccagagacctggctctgggatctgtttcctattggtaactcggggaaggaggcggtccacgtcacagttcctgacgccatcaccgagtggaaggcgatgagtttctgcacttcccagtcaagaggcttcgggctttcacccactgttggactaactgctttcaagccgttctttgttgacctgactctcccttactcagtagtccgtggggaatcctttcgtcttactgccaccatcttcaattacctaaaggattgcatcagggttcagactgacctggctaaatcgcatgagtaccagctagaatcatgggcagattctcagacctccagttgtctctgtgctgatgacgcaaaaacccaccactggaacatcacagctgtcaaattgggtcacattaactttactattagtacaaagattctggacagcaatgaaccatgtgggggccagaaggggtttgttccccaaaagggccgaagtgacacgctcatcaagccagttctcgtcaaacctgagggagtcctggtggagaagacacacagctcattgctgtgcccaaaaggaaaggtggcatctgaatctgtctccctggagctcccagtggacattgttcctgactcgaccaaggcttatgttacggttctgggagacattatgggcacagccctgcagaacctggatggtctggtgcagatgcccagtggctgtggcgagcagaacatggtcttgtttgctcccatcatctatgtcttgcagtacctggagaaggcagggctgctgacggaggagatcaggtctcgggcagtgggtttcctggaaatagggtaccagaaggagctgatgtacaaacacagcaatggctcatacagtgcctttggggagcgagatggaaatggaaacacatggctgacagcgtttgtcacaaaatgctttggccaagctcagaaattcatcttcattgatcccaagaacatccaggatgctctcaagtggatggcaggaaaccagctccccagtggctgctatgccaacgtgggaaatctccttcacacagctatgaagggtggtgttgatgatgaggtctccttgactgcgtatgtcacagctgcattgctggagatgggaaaggatgtagatgacccaatggtgagtcagggtctacggtgtctcaagaattcggccacctccacgaccaacctctacacacaggccctgttggcttacattttctccctggctggggaaatggacatcagaaacattctccttaaacagttagatcaacaggctatcatctcaggagaatccatttactggagccagaaacctactccatcatcgaacgccagcccttggtctgagcctgcggctgtagatgtggaactcacagcatatgcattgttggcccagcttaccaagcccagcctgactcaaaaggagatagcgaaggccactagcatagtggcttggttggccaagcaacacaatgcatatgggggcttctcttctactcaggatactgtagttgctctccaagctcttgccaaatatgccactaccgcctacatgccatctgaggagatcaacctggttgtaaaatccactgagaatttccagcgcacattcaacatacagtcagttaacagattggtatttcagcaggataccctgcccaatgtccctggaatgtacacgttggaggcctcaggccagggctgtgtctatgtgcagacggtgttgagatacaatattctccctcccacaaatatgaagacctttagtcttagtgtggaaataggaaaagctagatgtgagcaaccgacttcacctcgatccttgactctcactattcacaccagttatgtggggagccgtagctcttccaatatggctattgtggaagtgaagatgctatctgggttcagtcccatggagggcaccaatcagttacttctccagcaacccctggtgaagaaggttgaatttggaactgacacacttaacatttacttggatgagctcattaagaacactcagacttacaccttcaccatcagccaaagtgtgctggtcaccaacttgaaaccagcaaccatcaaggtctatgactactacctaccagatgaacaggcaacaattcagtattctgatccctgtgaatgaggataggagctggaaactcaattagtcctctgtgacatttactggagggtggaacattcttctgtcgcttgaagcagaactcattcaatcaaataatttaatttctctgactagtatatgggtaacaaatgaatatgtctgaacctcagctataatactttctactacctttgcaaggagatgggataggaacaatcactcagaggaggcgttgcatgggcagggtcatagggggaagaaaggtggtttagctgttttatttagccattcagggggctctccagagaggagacggtggtagagggtgaactagagaagataagaatgtcttcctaggccggatgcggtggctcacgcctgtaatcccagcactttgggattgcgaggtgggcggatcacttgaggtcaggagttcaagaccagcctggccaacatggtaaaacccgtctctactaacaatacaaagattagcctggtgtggtggcacgggcctgtaatcgcagccccttggaaggccaaggcaggagaatcgcctcaacactggaggtggaggttgcagtgagctgagattgtgccactgcactccagcctgggcaatgaggcaagaccctgtctcaaaaaataataaataataataataataatgtttttctagagtttcagtctaagggaaaatgtgatttagggctttggaaattggctaaaaaaataaaaatggaaaagaaaa

SEQ ID NO: 239461 - DNA, 3370 bp, Artificial Sequence
  derived and/or modified sequence
agcttccttggcatccaccggctaaacggccccttgaaatgtggccagccccaggaagtgctggtggattattacatcgacccggccgatgcaagccctgaccaagagatcagcttctcctactatttaatagggaaaggaagtttggtgatggaggggcagaaacacctgaactctaagaagaaaggactgaaagcctccttctctctctcactgaccttcacttcgagactggcccctgatccttccctggtgatctatgccatttttcccagtggaggtgttgtagctgacaaaattcagttctcagtcgagatgtgctttgacaatcaggtttcccttggcttctccccctcccagcagcttccaggagcagaagtggagctgcagctgcaggcagctcccggatccctgtgtgcgctccgggcggtggatgagagtgtcttactgcttaggccagacagagagctgagcaaccgctctgtctatgggatgtttccattctggtatggtcactacccctatcaagtggctgagtatgatcagtgtccagtgtctggcccatgggactttcctcagcccctcattgacccaatgccccaagggcattcgagccagcgttccattatctggaggccctcgttctctgaaggcacggaccttttcagctttttccgggacgtgggcctgaaaatactgtccaatgccaaaatcaagaagccagtagattgcagtcacagatctccagaatacagcactgctatgggtgcaggcggtggtcatccagaggcttttgagtcatcaactcctttacatcaagcagaggattctcaggtccgccagtacttcccagagacctggctctgggatctgtttcctattggtaactcggggaaggaggcggtccacgtcacagttcctgacgccatcaccgagtggaaggcgatgagtttctgcacttcccagtcaagaggcttcgggctttcacccactgttggactaactgctttcaagccgttctttgttgacctgactctcccttactcagtagtccgtggggaatcctttcgtcttactgccaccatcttcaattacctaaaggattgcatcagggttcagactgacctggctaaatcgcatgagtaccagctagaatcatgggcagattctcagacctccagttgtctctgtgctgatgacgcaaaaacccaccactggaacatcacagctgtcaaattgggtcacattaactttactattagtacaaagattctggacagcaatgaaccatgtgggggccagaaggggtttgttccccaaaagggccgaagtgacacgctcatcaagccagttctcgtcaaacctgagggagtcctggtggagaagacacacagctcattgctgtgcccaaaaggaaaggtggcatctgaatctgtctccctggagctcccagtggacattgttcctgactcgaccaaggcttatgttacggttctgggagacattatgggcacagccctgcagaacctggatggtctggtgcagatgcccagtggctgtggcgagcagaacatggtcttgtttgctcccatcatctatgtcttgcagtacctggagaaggcagggctgctgacggaggagatcaggtctcgggcagtgggtttcctggaaatagggtaccagaaggagctgatgtacaaacacagcaatggctcatacagtgcctttggggagcgagatggaaatggaaacacatggctgacagcgtttgtcacaaaatgctttggccaagctcagaaattcatcttcattgatcccaagaacatccaggatgctctcaagtggatggcaggaaaccagctccccagtggctgctatgccaacgtgggaaatctccttcacacagctatgaagggtggtgttgatgatgaggtctccttgactgcgtatgtcacagctgcattgctggagatgggaaaggatgtagatgacccaatggtgagtcagggtctacggtgtctcaagaattcggccacctccacgaccaacctctacacacaggccctgttggcttacattttctccctggctggggaaatggacatcagaaacattctccttaaacagttagatcaacaggctatcatctcaggagaatccatttactggagccagaaacctactccatcatcgaacgccagcccttggtctgagcctgcggctgtagatgtggaactcacagcatatgcattgttggcccagcttaccaagcccagcctgactcaaaaggagatagcgaaggccactagcatagtggcttggttggccaagcaacacaatgcatatgggggcttctcttctactcaggatactgtagttgctctccaagctcttgccaaatatgccactaccgcctacatgccatctgaggagatcaacctggttgtaaaatccactgagaatttccagcgcacattcaacatacagtcagttaacagattggtatttcagcaggataccctgcccaatgtccctggaatgtacacgttggaggcctcaggccagggctgtgtctatgtgcagacggtgttgagatacaatattctccctcccacaaatatgaagacctttagtcttagtgtggaaataggaaaagctagatgtgagcaaccgacttcacctcgatccttgactctcactattcacaccagttatgtggggagccgtagctcttccaatatggctattgtggaagtgaagatgctatctgggttcagtcccatggagggcaccaatcagttacttctccagcaacccctggtgaagaaggttgaatttggaactgacacacttaacatttacttggatgagctcattaagaacactcagacttacaccttcaccatcagccaaagtgtgctggtcaccaacttgaaaccagcaaccatcaaggtctatgactactacctaccagatgaacaggcaacaattcagtattctgatccctgtgaatgaggatctggctctgttgcccaggctgcagtgcagtggcgtgatctcagctcactgcagcctctgcctcccaagttcaagcgattcttgtgcctcagcctcctgagtagctgggatgacaggcacgtgccatcacgcccagctaattttttttgtatttttaatagagatggggtttcgccatgttggtcaggctggtctcaaactcctggcctcaggtgatccgcctacttcagcctcccaaagtgctgggattacaggtgtaagccactgtgcccggcctgtcctaaactcttgaaaatagtttacagaagaaaaagctaatgcttggtattaaaacaatacttttttctatcag

SEQ ID NO: 239462 - DNA, 4365 bp, Artificial Sequence
  derived and/or modified sequence
atgtgggcccagctgctgctgggcatgctggccctgagccccgccatcgctgaggagcttcccaactatctggtcacactgccggcgagattgaattttcccagcgtgcaaaaggtttgtctggacttatcaccaggttattccgatgtgaaatttaccgtgaccctagaaacaaaagacaagacacagaaattgctagagtacagtggcttaaagaagcgacatctgcactgcattagctttctggtgcctcctccagctgggggaaccgaagaggtggcaactattagagtgtccggggtgggaaataatatatcgttcgaggaaaaaaagaaggtgcttatccaacgtcagggaaatggcacctttgttcagaccgacaaacccttgtatactcccggtcagcaggtatattttaggatagttaccatggactctaattttgttccagtcaatgacaaatatagtatggttgaactccaagatccgaactccaatagaattgcccaatggctggaggtggtgcctgagcagggcatcgttgacctgagctttcaactggccccagaagccatgctggggacgtataccgtcgctgtagccgagggcaaaactttcggcactttttcagtggaagagtacgtgctgcctaagttcaaggtcgaggtcgtcgagcccaaagaactgagcaccgtgcaggagtcttttctggtgaagatctgttgccggtacacttacggcaaaccaatgctgggcgctgtgcaagtaagtgtgtgtcagaaggccaatacctactggtatcgggaggtagagagagaacagctgcctgataaatgcagaaatctcagcggtcaaaccgacaaaaccggctgtttctccgcgcctgtggacatggctaccttcgatctgatcgggtatgcttattctcatcagattaatatcgtggcaactgtcgtggaagagggtacaggcgtggaggcaaatgcgacccagaacatatatattagccctcaaatgggaagtatgacctttgaggacacaagcaatttctatcaccctaattttcccttcagtggcaagatcagagtccgggggcatgacgacagttttttgaagaaccatctcgtattcttggtgatttacggtaccaatggcacctttaatcagaccttagtcacggacaataatgggttggccccattcaccttggaaaccagcggctggaatggcactgacgtctccctcgaaggaaagtttcaaatggaggatcttgtatataatccagagcaggtccccagatactatcaaaatgcttaccttcacctgcgtcctttttattctacgactcggtcttttctgggcattcaccggcttaatgggccgctcaagtgtggccagcctcaggaggttctggttgactactatatcgaccccgcagacgcctcccctgatcaggagattagcttttcatactatctaatcggaaaggggagtcttgtgatggaaggacagaagcatttaaacagtaagaaaaagggcctcaaggctagtttttccctctccctgacatttactagccgacttgcgcccgacccatctctcgttatctatgccattttcccttcaggtggagttgtggctgacaagattcagttctctgtcgagatgtgctttgacaatcaggtgagcctgggcttctctccaagtcagcaattaccgggcgcagaagtagaactgcagctgcaagctgcccccggctccttgtgcgccctgagagctgtggatgaatccgtgcttttactgcgtcctgaccgggagctctccaacagatcagtctatggaatgtttcccttctggtacgggcactacccctaccaggtcgccgagtacgaccagtgccctgtgagcggcccgtgggactttccccagccgctcatagaccccatgccgcaaggccactctagtcagcgaagtattatctggcgtcctagtttttctgagggcaccgatctatttagcttcttcagggatgtgggtctcaagattctcagcaatgctaaaataaagaaacctgtcgactgttctcacaggtcccctgagtactctacagccatgggcgccggcggtggccatcccgaggccttcgaatcctctacccctctgcaccaggcggaagacagccaagtgcgccaatatttcccagagacctggttgtgggaccttttccctatcggaaactcaggtaaagaggcagtgcatgtaacagttcctgatgctattacagaatggaaggccatgtccttctgcacctcccagtctcgtggattcggcttaagccccacggtaggactgacagcttttaagcccttcttcgtggatctcacattgccttattctgtggtgcggggagagtcattccggctgacagccaccatcttcaactatctcaaggattgcattcgcgtgcagaccgacctggccaagtctcacgagtaccaattggaatcatgggcggacagtcagaccagttcctgcctgtgtgcggatgatgctaaaacacaccactggaacattactgctgtcaagctgggacatatcaactttacaatttctactaagatactagacagcaatgagccatgtggtggccagaagggattcgtccctcagaaggggcggtcagatacactgattaagcctgtgttagtgaagcccgagggggtcctggtggagaaaacgcactcaagcttattgtgtcccaaagggaaagtggcctctgaatccgtttccctggagttaccggtcgatatcgtaccagactctaccaaagcttatgttaccgttctcggggatataatggggacagcattgcagaacctagacgggctcgttcaaatgccgtccggttgtggcgagcagaatatggtgctatttgcaccaattatatatgtgttacagtacctagaaaaggctggattactcacagaagagatccggtcgagagccgtgggcttcctggagatcggctatcagaaagagctgatgtacaaacattctaacgggagttactcggctttcggcgagcgggatgggaatggcaatacttggctgacggcttttgtgactaaatgtttcggacaggcccagaagttcatcttcatcgatcccaaaaacatccaagatgccctaaaatggatggccggtaatcaactgccaagcggctgttatgcaaacgtgggcaaccttctccacacagcaatgaagggtggagtggacgacgaggtgtccttaacggcttacgtcactgcagctctgttggaaatgggcaaagacgtggacgaccctatggtctcacaagggttacggtgtttgaagaattccgctacctcgacaactaacctgtatacccaggctttacttgcatacattttctcgctcgctggcgagatggacattaggaacattctgcttaagcagctcgatcagcaggctatcattagtggagaatctatttattggagccaaaagccaacgccatcctccaatgcatccccttggagcgaacccgcagctgtagacgtggagctcacagcatatgccctcctggctcagctcactaaaccctctctcacacagaaggaaattgccaaagccacttctattgtagcctggcttgctaaacagcacaatgcgtatggcggattcagcagcacacaggacactgttgtggcccttcaagccctggctaagtacgcgaccactgcatacatgccatctgaggagattaaccttgtggtgaagagtactgaaaattttcagcgcacgttcaatatccaatcagtgaatcgattagttttccagcaggatacgctgccaaacgtgcccggtatgtacacactggaagcctcgggccaaggttgcgtctatgtgcagacagttctcaggtacaacatcctccctccaaccaacatgaaaaccttctcactgagcgtcgagattgggaaggcacgttgtgagcagcccacatccccacgctctctcacgctaactatccacacctcatacgtggggagcagatcctcttccaatatggcaattgtggaggtcaagatgctcagcggcttctcgccgatggagggaacaaatcagctcctgctgcaacaacctttggtaaagaaagttgaatttggcacagacacactcaacatctacctggatgagctgattaagaatactcagacctatacgtttacaataagtcagagtgtactagtgactaacctgaagccagcgaccataaaagtctacgattattatctgccagacgaacaggcaaccatacaatactcagacccatgcgagtag

SEQ ID NO: 239463 - DNA, 4365 bp, Artificial Sequence
  derived and/or modified sequence
atgtgggcccagctgctgctgggcatgctggccctgagccccgccatcgccgaggagctgcctaactatcttgttacactgcccgccaggctcaactttccctcagttcagaaggtctgcctggatctgtctccggggtatagtgacgtcaaatttactgtcacccttgagactaaggacaagacgcagaaattgctcgagtatagcggactgaagaaaagacaccttcattgtatctcctttctcgtaccaccccccgccggcggaaccgaggaggtggctactattagagtgtcaggtgttggcaacaacatttccttcgaggaaaagaaaaaggtgcttatccagaggcaggggaatgggacgttcgtgcagacggataagcctctttacactccaggtcaacaggtgtatttccgaatcgtgactatggatagtaatttcgtgccagtcaacgacaaggtctcctgggaagaaggtcaggatccaaattctaaccgtattgcccaatggctcgaagtagttccagagcagggaatcgtcgatctgtcatttcagctcgcgcctgaagccatgctggggacctacaccgtcgctgtcgccgaaggaaagacgttcggcaccttttccgtagaagaatacgtgttacccaagttcaaggtggaggtggtggagccaaaagagttgagtactgtgcaagaatcatttctcgttaaaatctgttgtcgttacacctacggcaaacctatgctgggcgctgtgcaagtgagtgtgtgtcaaaaggccaacacctactggtacagagaggtagagagagaacagcttcctgacaaatgtaggaacctgtccggacaaactgataaaacgggctgcttttcagccccagtcgacatggcgacctttgatctgatagggtatgcttacagccatcagataaacatagtggcgacagttgttgaagagggcaccggagtagaagccaacgccactcagaacatctatatctcccctcagatgggctccatgacttttgaagacacctccaatttctatcaccccaacttcccattcagcggcaagataagggtcagaggacatgatgacagcttccttaagaatcacctggtctttctcgttatttatggtaccaatggcacatttaatcagacccttgtgacagataataatggcctggccccctttaccctggagaccagtggatggaacggtacagatgtgagtctcgaaggaaagtttcagatggaggatctagtttataaccccgagcaggtgccccggtactatcagaacgcctatctacatctcaggcctttctattccacaacccgctcgttcctagggatccatcgcctgaatggtccactgaagtgtggtcagccccaggaagtgctggttgattattacatcgaccccgcagatgctagccccgatcaggaaatctcattcagctattatctcatcgggaagggctcgttggtaatggagggacagaaacacttgaactctaagaagaagggtcttaaagcaagcttctctctctctcttacattcaccagcagactagcccccgacccttcactggttatctacgcaatcttcccttccgggggtgttgtggcagacaaaattcagtttagcgtggaaatgtgtttcgataaccaggtctccctcggattcagccctagccagcagttgcctggtgctgaggtcgaacttcagttgcaggccgccccaggctctctgtgcgctttacgcgcagttgacgagagcgtgctcttgttgcgacccgatcgcgaactgtccaaccggtcagtttatggtatgttcccgttctggtacgggcactatccataccaggtcgccgaatatgaccagtgcccggttagcggaccgtgggacttcccccaaccacttatcgacccaatgccacaaggacactcctctcagcgcagtattatatggagaccttcattctctgaaggaacagatctgtttagtttcttcagggatgtgggccttaagattcttagcaatgcaaagataaagaaaccagtggattgctctcaccgctcccctgagtattcaacagctatgggcgccggcggcggccacccagaggcctttgagagctccaccccattgcaccaggcagaagattcccaggtgcgccagtatttccccgagacatggctgtgggatttgttcccaatcggtaacagtggaaaggaagctgtccacgtgaccgtccctgacgccatcaccgagtggaaagcgatgagtttctgtacctctcaatccagggggtttggcctctctcccaccgtgggactcaccgccttcaagcctttctttgttgatctcaccctgccctattctgttgttaggggagaatcctttagactaacagccactatctttaactacctgaaagactgcattagggttcagaccgatctggccaaaagccacgagtatcagctggaatcatgggccgactcccagactagttcatgcttatgcgccgatgacgccaaaacacatcattggaatattacagccgtcaagctgggacacatcaatttcacgatttcgacaaaaatattagatagcaatgagccctgcggcggtcagaagggcttcgtaccccaaaaaggacggagcgacacactcattaagcctgttttggtcaaaccggaaggcgtgctggttgagaagacacacagctctctgctgtgtcctaaagggaaggtcgctagcgagagcgtctctcttgaacttcccgtggacatcgtccctgatagcaccaaagcctacgtgaccgttctcggggatataatggggacagctctacaaaacctggatggcttggtgcagatgcccagcggttgcggcgaacagaatatggtgctgttcgcccctattatctacgtcctgcagtatctggagaaggccggcttgcttacagaagagataagaagtcgggcagttggctttctggagatcggctaccagaaggaacttatgtacaaacactccaacgggagttactccgcttttggtgagcgagatgggaatggaaacacttggcttacggcattcgtgacaaagtgctttggacaagcacaaaagttcatcttcattgatcccaagaatatccaggatgccctgaaatggatggccgggaatcagttaccgtctgggtgctacgcaaatgttgggaacctactgcataccgccatgaagggtggagtcgacgacgaggtgagcctcaccgcatacgttacagccgcactgttagaaatgggcaaagatgtcgacgacccaatggttagtcagggtttgaggtgcctcaagaatagcgcaacctcgactaccaatctctatacacaggcgctgctggcttatatttttagcctggcaggagaaatggacatccggaacatacttctgaagcaactggatcagcaggccatcatttcaggcgaatcgatctattggtctcagaagccaacaccctctagtaacgccagcccttggagcgagcctgctgccgtcgatgtcgaattgactgcctacgcccttttggcccagctgaccaagccatcactgactcaaaaggagatagcaaaggctacaagtatcgtagcatggctggctaaacagcacaacgcatacggggggttttccagtacacaggataccgtcgtggcccttcaggcattggccaaatacgcgacaaccgcgtacatgccaagtgaggagattaatcttgtcgtcaagtcaactgaaaacttccagagaacgttcaatattcagagtgtcaataggctggttttccaacaagacacacttcctaatgttcctgggatgtacaccttggaggcctctgggcagggttgtgtatacgtccaaactgtcttgagatataatattttaccgcccactaacatgaagactttttcactgagcgtagagataggcaaggccagatgtgaacagccaacaagcccccgaagcctgacccttaccatacacactagctatgtcggcagcagatcatcttctaacatggccattgtcgaggttaagatgctgagcggcttcagccccatggaaggcaccaaccaactcctgctgcaacagcctcttgtgaagaaagtggagtttggaacggacaccctgaatatttatctcgatgagctcattaagaacacccagacttacacctttacaatctctcaaagcgtcctggtgaccaatctaaaaccggccactatcaaggtctacgattattacttaccggacgagcaagcaacaattcagtactcagacccctgtgagtag

SEQ ID NO: 239464 - DNA, 3015 bp, Artificial Sequence
  derived and/or modified sequence
agcttcctgggcatccaccggctgaacggccccctgaagtgcggccagccacaagaggtgttagtagattactacatcgatcctgccgacgctagccctgaccaagaaataagcttcagctactacctgattggtaagggtagtcttgtgatggaaggccagaagcacctgaatagcaaaaagaaagggctgaaggcgtcatttagcctgtcattaacatttacctcgcggctggcgccagatcccagccttgtgatctacgccatctttccaagtggtggtgtggtcgctgataagattcagttttcggttgagatgtgttttgataaccaggtatctctgggcttttctccttcccagcagctccccggagccgaggtcgaactacagttgcaggccgcgcccgggtccctctgcgctctgagggccgttgacgaaagtgtcctgctgctccgcccagacagggaactcagcaacaggtcagtttacgggatgtttccattttggtacggacattacccataccaggtcgctgagtatgaccagtgtccagtctctggcccttgggactttccccagcctttaattgatccaatgcctcagggacactcctcacagagaagcatcatttggaggccttccttcagcgaaggaacagatttgtttagcttcttcagagatgtggggctgaaaatactcagcaatgccaagatcaagaaaccagtcgactgcagtcatagatcaccagagtattcaacagctatgggagccgggggtggtcatcctgaggcatttgagagcagtactcctctccaccaagccgaggattcacaggttcggcaatatttccccgaaacttggctctgggacctgttccccattgggaattcggggaaggaggcggtgcatgtgactgtgcctgatgcgattaccgaatggaaggcaatgtccttctgtacctcccagagcagaggctttggactctcacctaccgtaggcttgactgccttcaagccctttttcgtcgacctgactctcccatattccgtcgtccgtggagagtcatttcggctgaccgcaacaatttttaattacctaaaggattgcatcagagtgcagactgacttagctaaaagccacgagtaccagttggagtcctgggcagactcgcagacttccagctgcctgtgtgcggacgatgcaaagacacatcattggaatatcaccgcagttaaactcggacacataaacttcacaatctctactaagattctcgacagcaatgagccgtgtggtggacagaaaggctttgttccacaaaaaggccggtccgatactctcattaagcccgtcttggtcaaacctgaaggagtcctggtagagaagacacacagcagcctgctctgtcccaagggaaaggtggcgtcagagtccgtgtctttagaactccccgtggatattgttccagattctaccaaagcctacgtcactgtactgggcgatatcatgggcacagcacttcagaatctggatggcctcgttcagatgcctagcggctgtggtgaacagaatatggttctgttcgccccaattatctatgtcctgcagtatttggaaaaggctggactcctcaccgaagaaatccgctctcgagcggttggatttctcgagataggataccagaaagagctcatgtataaacattctaacggatcctactctgccttcggtgaaagggacggcaatggtaacacctggctgacagctttcgtgaccaaatgcttcggacaggcgcagaaattcatcttcatcgaccccaagaacattcaggacgcgctgaagtggatggcaggaaatcagctgccctcaggctgttacgccaatgtcgggaacctcctgcacacagccatgaaggggggagttgatgacgaggtgagtctgaccgcctacgtgacggcagcccttctggagatggggaaagacgtcgacgaccccatggtgagccagggcctgcgctgccttaaaaatagtgctacatccactacaaacctgtacacgcaagccctcctagcctacattttctctctggccggagaaatggatatacgaaatatcctcctgaaacaacttgatcaacaggccatcatctctggcgagtctatatactggtctcagaagccaacaccatcctctaatgcaagcccctggtcagagcctgcagctgtggatgtcgaactgacggcctacgcactactggcacagctgacaaagccaagcttgacacaaaaagagatagcaaaggcgactagtatcgtcgcttggttagccaagcagcataacgcgtacggtggtttcagctccactcaggacaccgtggtggcattgcaggccctggctaaatacgcaaccacagcttacatgccttcggaggaaatcaatctcgttgtgaagtcaaccgagaactttcagaggaccttcaacattcaaagcgtgaacaggcttgtctttcagcaggacaccttaccaaacgtccctgggatgtatacactggaagccagtgggcaggggtgtgtgtatgttcaaacagttctgcgatacaacattttacctccaacaaatatgaaaaccttcagtctgtcagtggagattggcaaggcaagatgcgagcaacctacttctcccagatcactcaccctgactatccacaccagctatgtgggctcccgctcttcttctaatatggccatcgtagaagtcaaaatgttgagtggcttcagccctatggagggaaccaaccagttgttactccagcagcccctggtgaagaaggtggagtttgggaccgataccttaaatatctacctggatgagctcattaagaacacacaaacctataccttcactatatcccaaagcgtgctagtaacaaacctgaagcctgctaccatcaaagtctacgactattaccttccagatgaacaggcaacaattcagtattcggacccttgcgaatag
